(19) United States
(12) Patent Application Publication
(10) Pub. No.: US 2008/0301839 A1
(43) Pub. Date: Dec. 4, 2008

(54) Transgenic plants with enhanced agronomic traits

(76) Inventor: Monica P. Ravanello, Fairfield, CA (US)

Correspondence Address: MONSANTO COMPANY, 800 N. LINDBERGH BLVD., ATTENTION: GAIL P. WUELLNER, IP PARALEGAL, (E2NA), ST. LOUIS, MO, 63167, US

(21) Appl. No.: 11/512,557

(22) Filed: Aug. 30, 2006

Related U.S. Application Data
(60) Provisional application No. 60/713,150, filed on Aug. 30, 2005.

(51) Int. Cl. C12N 15/11; A01H 5/00; A01G 1/00; G01N 33/53

(52) U.S. Cl. 800/289; 800/298; 800/320.1; 800/320.2; 800/320.3; 800/320; 800/312; 800/314; 800/300; 800/301; 435/7.2; 800/278; 47/58.1 R; 47/58.1 FV

(57) ABSTRACT

This invention provides recombinant DNA for expression of proteins that are useful for imparting enhanced agronomic trait(s) to transgenic crop plants. Also provided by this invention is transgenic seed for growing a transgenic plant having recombinant DNA in its genome and exhibiting an enhance agronomic trait, i.e. enhanced nitrogen use efficiency, increased yield, enhanced water use efficiency, enhanced tolerance to cold stress and/or improved seed compositions. Also disclosed are methods for identifying such transgenic plants by screening for nitrogen use efficiency, yield, water use efficiency, growth under cold stress, and seed composition changes. This invention also discloses a method of identifying the target genes of a transcription factor.

### CROSS REFERENCE TO RELATED APPLICATIONS

[0001] This application claims benefit under 35USC § 119(e) of U.S. provisional application Ser. No. 60/713,150, filed Aug. 30, 2005, and incorporated herein by reference.

### INCORPORATION OF SEQUENCE LISTING

[0002] Two copies of the sequence listing (Copy 1 and Copy 2) and a computer readable form (CRF) of the sequence listing, all on CD-Rs, each containing the text file named 38-21(53948)C_seqListing.txt, which is 33,136,640 bytes (measured in MS-WINDOWS) and was created on Aug. 30, 2006 are incorporated herein by reference.

### INCORPORATION OF COMPUTER PROGRAM LISTING

[0003] One copy of the Computer Program Listing (Copy 1) and a computer readable form (CRF) containing folders hmmer-2.3.2 and 124pfamDir, all on CD-Rs are incorporated herein by reference in their entirety. Folder hmmer-2.3.2 contains the source code and other associated file for implementing the HMMer software for Pfam analysis. Folder 124pfamDir contains 124 Pfam Hidden Markov Models. Both folders were created on CD-R on Aug. 30, 2006, having a total size of 12,042,240 bytes (measured in MS-WINDOWS).

### FIELD OF THE INVENTION

[0004] Disclosed herein are inventions in the field of plant genetics and developmental biology. More specifically, the present inventions provide transgenic seeds for crops, wherein the genome of said seed comprises recombinant DNA, the expression of which results in the production of transgenic plants with enhanced agronomic traits.

### BACKGROUND OF THE INVENTION

[0005] Transgenic plants with enhanced agronomic traits such as increased yield, enhanced environmental stress tolerance, enhanced pest resistance, enhanced herbicide tolerance, improved seed compositions, and the like are desired by both farmers and consumers. Although considerable efforts in plant breeding have provided significant gains in desired traits, the ability to introduce specific DNA into plant genomes provides further opportunities for generation of plants with enhanced and/or unique traits. Merely introducing recombinant DNA into a plant genome doesn't always produce a transgenic plant with an enhanced agronomic trait. Thorough screening is required to identify those transgenic events that are characterized by the enhanced agronomic trait.

### BRIEF DESCRIPTION OF FIGURES

[0006] FIG. 1 is a map of plasmid pMON82060.

[0007] FIG. 2 is a map of plasmid pMON82053

[0008] FIG. 3 is a map of plasmid pMON99053

[0009] FIG. 4 is a map of plasmid pMON17730

### SUMMARY OF THE INVENTION

[0010] This invention employs recombinant DNA for expression of proteins that are useful for imparting enhanced agronomic traits to the transgenic plants. Recombinant DNA in this invention is provided in a construct comprising a promoter that is functional in plant cells and that is operably linked to DNA that encodes a protein having at least one amino acid domain in a sequence that exceeds the Pfam gathering cutoff for amino acid sequence alignment with a protein domain family identified by a Pfam name in the group of Pfam domain names as identified in Table 11. In more specific embodiments of the invention the protein expressed in plant cells has an amino acid sequence with at least 90% identity to a consensus amino acid sequence in the group of consensus amino acid sequences consisting of the consensus amino acid sequence constructed for SEQ ID NO: 194 and homologs thereof listed in Table 7 through the consensus amino acid sequence constructed for SEQ ID NO: 386 and homologs thereof listed in Table 7. In even more specific embodiments of the invention the protein expressed in plant cells is a protein selected from the group of proteins identified in Table 1.

[0011] Other aspects of the invention are specifically directed to transgenic plant cells comprising the recombinant DNA of the invention, transgenic plants comprising a plurality of such plant cells, progeny transgenic seed, embryo and transgenic pollen from such plants. Such plant cells are selected from a population of transgenic plants regenerated from plant cells transformed with recombinant DNA and that express the protein by screening transgenic plants in the population for an enhanced trait as compared to control plants that do not have said recombinant DNA, where the enhanced trait is selected from group of enhanced traits consisting of enhanced water use efficiency, enhanced cold tolerance, increased yield, enhanced nitrogen use efficiency, enhanced seed protein and enhanced seed oil.

[0012] In yet another aspect of the invention the plant cells, plants, seeds, embryo and pollen further comprise DNA expressing a protein that provides tolerance from exposure to an herbicide applied at levels that are lethal to a wild type of said plant cell. Such tolerance is especially useful not only as an advantageous trait in such plants but is also useful in a selection step in the methods of the invention. In aspects of the invention the agent of such herbicide is a glyphosate, dicamba, or glufosinate compound.

[0013] Yet other aspects of the invention provide transgenic plants which are homozygous for the recombinant DNA and transgenic seed of the invention from corn, soybean, cotton, canola, alfalfa, wheat or rice plants.

[0014] In other important embodiments for practice of various aspects of the invention, the plants of this invention can be further enhanced with stacked traits, e.g., a crop having an enhanced agronomic trait resulting from expression of DNA disclosed herein, in combination with herbicide, disease, and/or pest resistance traits.

[0015] This invention also provides methods for manufacturing non-natural, transgenic seed that can be used to produce a crop of transgenic plants with an enhanced trait resulting from expression of stably-integrated, recombinant DNA for expressing a protein having at least one domain of amino acids in a sequence that exceeds the Pfam gathering cutoff for amino acid sequence alignment with a protein domain family identified by a Pfam name in the group of Pfam names identified in Table 11. More specifically the method comprises (a) screening a population of plants for an enhanced trait and a recombinant DNA, where individual plants in the population can exhibit the trait at a level less than, essentially the same as or greater than the level that the trait is exhibited in control plants which do not express the recombinant DNA, (b) selecting from the population one or more plants that exhibit the trait at a level greater than the level that said trait is exhibited in control plants, (c) verifying that the recombinant DNA is stably integrated in said selected plants, (d) analyzing tissue of a selected plant to determine the production of a protein having the function of a protein encoded by nucleotides in a sequence of one of SEQ ID NO:1-193; and (e) collecting seed from a selected plant. In one aspect of the invention the plants in the population further comprise DNA expressing a protein that provides tolerance to exposure to an herbicide applied at levels that are lethal to wild type plant cells and the selecting is effected by treating the population with the herbicide, e.g. a glyphosate, dicamba, or glufosinate compound. In another aspect of the invention the plants are selected by identifying plants with the enhanced trait. The methods are especially useful for manufacturing corn, soybean, cotton, alfalfa, wheat or rice seed.

[0016] Another aspect of the invention provides a method of producing hybrid corn seed comprising acquiring hybrid corn seed from a herbicide tolerant corn plant which also has stably-integrated, recombinant DNA comprising a promoter that is (a) functional in plant cells and (b) is operably linked to DNA that encodes a protein having at least one domain of amino acids in a sequence that exceeds the Pfam gathering cutoff for amino acid sequence alignment with a protein domain family identified by a Pfam name in the group of Pfam names identified in Table 11. The methods further comprise producing corn plants from said hybrid corn seed, wherein a fraction of the plants produced from said hybrid corn seed is homozygous for said recombinant DNA, a fraction of the plants produced from said hybrid corn seed is hemizygous for said recombinant DNA, and a fraction of the plants produced from said hybrid corn seed has none of said recombinant DNA; selecting corn plants which are homozygous and hemizygous for said recombinant DNA by treating with an herbicide; collecting seed from herbicide-treated-surviving corn plants and planting said seed to produce further progeny corn plants; repeating the selecting and collecting steps at least once to produce an inbred corn line; and crossing the inbred corn line with a second corn line to produce hybrid seed.

[0017] Another aspect of the invention provides a method of selecting a plant comprising plant cells of the invention by using an immunoreactive antibody to detect the presence of protein expressed by recombinant DNA in seed or plant tissue. Yet another aspect of the invention provides anti-counterfeit milled seed having, as an indication of origin, a plant cell of this invention.

[0018] Still other aspects of this invention relate to transgenic plants with enhanced water use efficiency or enhanced nitrogen use efficiency. For instance, this invention provides methods of growing a corn, cotton or soybean crop without irrigation water comprising planting seed having plant cells of the invention which are selected for enhanced water use efficiency. Alternatively methods comprise applying reduced irrigation water, e.g. providing up to 300 millimeters of ground water during the production of a corn crop. This invention also provides methods of growing a corn, cotton or soybean crop without added nitrogen fertilizer comprising planting seed having plant cells of the invention which are selected for enhanced nitrogen use efficiency.

### DETAILED DESCRIPTION OF THE INVENTION

[0019] In the attached sequence listing:

[0020] SEQ ID NO:1-193 are nucleotide sequences of the coding strand of DNA for “genes” used in the recombinant DNA imparting an enhanced trait in plant cells, i.e. each represents a coding sequence for a protein;

[0021] SEQ ID NO:194-386 are amino acid sequences of the cognate protein of the “genes” with nucleotide coding sequence 1-193;

[0022] SEQ ID NO: 387-12580 are amino acid sequences of homologous proteins;

[0023] SEQ ID NO: 12581-12601 are nucleotide sequences of the elements in base plasmid vectors

[0024] SEQ ID NO: 12602 is a consensus amino acid sequence.

[0025] SEQ ID NO: 12603 is a nucleotide sequence of a base plasmid vector useful for corn transformation; and

[0026] SEQ ID NO: 12604 is a nucleotide sequence of a base plasmid vector useful for soybean transformation.

[0027] SEQ ID NO: 12605 is a nucleotide sequence of a base plasmid vector useful for cotton transformation.

[0028] SEQ ID NO: 12606 is the nucleotide sequence of plasmid PMON17730.

[0029] SEQ ID NO: 12607 is the nucleotide sequence of PHE0010424_PMON17730.

[0030] As used herein, a “transgenic plant” means a plant whose genome has been altered by the incorporation of exogenous DNA, e.g., by transformation as described herein. The term “transgenic plant” is used to refer to the plant produced from an original transformation event, or progeny from later generations or crosses of a plant so transformed, so long as the progeny contains the exogenous genetic material in its genome. “Exogenous DNA” means DNA, e.g., recombinant DNA, originating from or constructed outside of the plant including natural or artificial DNA derived from the host “transformed” organism of a different organism.

[0031] As used herein, “recombinant DNA” means DNA which has been a genetically engineered or constructed outside of a cell, including DNA containing naturally occurring DNA or cDNA, or synthetic DNA.

[0032] As used herein, a “functional portion” of DNA is that part which comprises an encoding region for a protein segment that is sufficient to provide the desired enhanced agronomic trait in plants transformed with the DNA activity. Where expression of protein is desired, a functional portion will generally comprise the entire coding region for the protein, although certain deletions, truncations, rearrangements and the like of the protein may also maintain, or in some cases improve, the desired activity. One skilled in the art is aware of methods to screen for such desired modifications and such functional portion of the protein is considered within the scope of the present invention.

[0033] As used herein, “consensus sequence” means an artificial, amino acid sequence of conserved parts of the proteins encoded by homologous genes, e.g., as determined by a CLUSTALW alignment of amino acid sequence of homolog proteins.

[0034] As used herein, “homolog” means a protein in a group of proteins that perform the same biological function, e.g., provide an enhanced agronomic trait in transgenic plants of this invention. Homologs are expressed by homologous genes which are genes that encode proteins with the same or similar biological function. Homologous genes may be generated by the event of speciation (see ortholog) or by the event of genetic duplication (see paralog). Orthologs refer to a set of homologous genes in different species that evolved from a common ancestral gene by specification. Normally, orthologs retain the same function in the course of evolution; and paralogs refer to a set of homologous genes in the same species that have diverged from each other as a consequence of genetic duplication. Thus, homologous genes can be from the same or a different organism. Homologous DNA includes naturally occurring and synthetic variants. For instance, degeneracy of the genetic code provides the possibility to substitute at least one base of the protein encoding sequence of a gene with a different base without causing the amino acid sequence of the polypeptide produced from the gene to be changed. Hence, a polynucleotide useful in the present invention may have any base sequence that has been changed from SEQ ID NO:1 through SEQ ID NO: 193 by substitution in accordance with degeneracy of the genetic code. Homologs are proteins which, when optimally aligned, has at least 60% identity (say at least 70% or 80% or 90% identity) over the full length of a protein identified herein, or a higher percent identity especially over a shorter functional part of the protein, e.g., 70% to 80 or 90% amino acid identity over a window of comparison comprising a functional part of the protein imparting the enhanced agronomic trait. Homologs include proteins with an amino acid sequence that has at least 90% identity to a consensus amino acid sequence of proteins and homologs disclosed herein.

[0035] Homologs can be identified by comparison of amino acid sequence, e.g., manually or by using known homology-based search algorithms such as those commonly known and referred to as BLAST, FASTA, and Smith-Waterman. A local sequence alignment program, e.g., BLAST, can be used to search a database of sequences to find similar sequences, and the summary Expectation value (E-value) used to measure the sequence base similarity. As a protein hit with the best E-value for a particular organism may not necessarily be an ortholog or the only ortholog, a reciprocal query is used in the present invention to filter hit sequences with significant E-values for ortholog identification. The reciprocal query entails search of the significant hits against a database of amino acid sequences from the base organism that are similar to the sequence of the query protein. A hit is a likely ortholog, when the reciprocal query's best hit is the query protein itself or a protein encoded by a duplicated gene after speciation. A further aspect of the invention comprises functional homolog proteins which differ in one or more amino acids from those of disclosed protein as the result of conservative amino acid substitutions, e.g., substitutions are among: acidic (negatively charged) amino acids such as aspartic acid and glutamic acid; basic (positively charged) amino acids such as arginine, histidine, and lysine; neutral polar amino acids such as glycine, serine, threonine, cysteine, tyrosine, asparagine, and glutamine; neutral nonpolar (hydrophobic) amino acids such as alanine, leucine, isoleucine, valine, proline, phenylalanine, tryptophan, and methionine; amino acids having aliphatic side chains such as glycine, alanine, valine, leucine, and isoleucine; amino acids having aliphatic-hydroxyl side chains such as serine and threonine; amino acids having amide-containing side chains such as asparagine and glutamine; amino acids having aromatic side chains such as phenylalanine, tyrosine, and tryptophan; amino acids having basic side chains such as lysine, arginine, and histidine; amino acids having sulfur-containing side chains such as cysteine and methionine; naturally conservative amino acids such as valine-leucine, valine-isoleucine, phenylalanine-tyrosine, lysine-arginine, alanine-valine, aspartic acid-glutamic acid, and asparagine-glutamine. A further aspect of the homologs encoded by DNA useful in the transgenic plants of the invention are those proteins which differ from a disclosed protein as the result of deletion or insertion of one or more amino acids in a native sequence.

[0036] As used herein, “transcription factor gene” refers to a gene that encodes a protein that binds to regulatory regions and is involved in control gene expression. Therefore, as used herein, a target gene refers to a gene whose expression is controlled by a transcription factor gene.

[0037] As used herein, “percent identity” means the extent to which two optimally aligned DNA or protein segments are invariant throughout a window of alignment of components, e.g., nucleotide sequence or amino acid sequence. An “identity fraction” for aligned segments of a test sequence and a reference sequence is the number of identical components which are shared by sequences of the two aligned segments divided by the total number of sequence components in the reference segment over a window of alignment which is the smaller of the full test sequence or the full reference sequence. “Percent identity” (“% identity”) is the identity fraction times 100.

[0038] As used herein “Pfam” refers to a large collection of multiple sequence alignments and hidden Markov models covering many common protein families, e.g. Pfam version 19.0 (December 2005) contains alignments and models for 8183 protein families and is based on the Swissprot 47.0 and SP-TrEMBL 30.0 protein sequence databases. See S. R. Eddy, “Profile Hidden Markov Models”, Bioinformatics 14:755-763, 1998. Pfam is currently maintained and updated by a Pfam Consortium. The alignments represent some evolutionary conserved structure that has implications for the protein's function. Profile hidden Markov models (profile HMMs) built from the Pfam alignments are useful for automatically recognizing that a new protein belongs to an existing protein family even if the homology by alignment appears to be low. Once one DNA is identified as encoding a protein which imparts an enhanced trait when expressed in transgenic plants, other DNA encoding proteins in the same protein family are identified by querying the amino acid sequence of protein encoded by candidate DNA against the Hidden Markov Model which characterizes the Pfam domain using HMMER software, a current version of which is provided in the appended computer listing. Candidate proteins meeting the gathering cutoff for the alignment of a particular Pfam are in the protein family and have cognate DNA that is useful in constructing recombinant DNA for the use in the plant cells of this invention. Hidden Markov Model databases for use with HMMER software in identifying DNA expressing protein in a common Pfam for recombinant DNA in the plant cells of this invention are also included in the appended computer listing. The HMMER software and Pfam databases are version 19.0 and were used to identify known domains in the proteins corresponding to amino acid sequence of SEQ ID NO: 194 through SEQ ID NO: 386. All DNA encoding proteins that have scores higher than the gathering cutoff disclosed in Table 11 by Pfam analysis disclosed herein can be used in recombinant DNA of the plant cells of this invention, e.g. for selecting transgenic plants having enhanced agronomic traits. The relevant Pfams for use in this invention, as more specifically disclosed below, are FAD_binding_{—}4, MtN3_slv, Homeobox, FAD_binding_{—}6, RWP-RK, PMEI, FAD_binding_{—}7, RRM_{—}1, Transaldolase, RNA_pol_L, WD40, U-box, Cyclin_N, Skp1, Redoxin, DZC, PBP, TPP_enzyme_M, CBFD_NFYB_HMF, TPP_enzyme_N, PFK, Caleosin, Iso_dh, Ribosomal_L18p, Metallophos, zf-A20, Ras, BBE, NAF, PLDc, DUF1242, Pkinase, C2, p450, Pyridoxal_deC, FBD, UPF0005, HEAT_PBS, GST_N, PEP-utilizers, Alpha-amylase, Amino_oxidase, SRF-TF, Phi_{—}1, Malic_M, Tryp_alpha_amyl, GSHPx, Miro, HSF_DNA-bind, DNA_photolyase, Sina, CTP_transf_{—}2, Abhydrolase_{—}3, Chal_sti_synt_C, ACP_syn_III_C, ADH_zinc_N, CSD, Globin, GATase_{—}2, Amidohydro_{—}1, HLH, HALZ, Amidohydro_{—}3, Lactamase_B, HSP20, DAO, DUF296, AT_hook, AWPM-19, Dimerisation, Suc_Fer-like, Methyltransf_{—}2, Aminotran_{—}3, PHD, MMR_HSR1, Aldo_ket_red, zf-AN1, malic, Fasciclin, UPF0057, DUF221, Pkinase_Tyr, DnaJ, Cofilin_ADF, Orn_Arg_deC_N, Skp1_POZ, Asn_synthase, K-box, LRR_{—}2, Ribosomal_L12, Ammonium_transp, Ribosomal_L14, KOW, DUF1336, DS, Aa_trans, CcmH, peroxidase, eIF-5a, Aldedh, PEP-utilizers_C, ADH_N, UIM, NAD_binding_{—}1, zf-C3HC4, Spermine_synth, AUX_IAA, LIM, Anti-silence, X8, Citrate_synt, 14-3-3, RMMBL, efhand, NPH3, CAF1, ICL, FAE1_CUT1_RppA, Orn_DAP_Arg_deC, PPDK_N, Myb_DNA-binding, AP2, F-box, and APS_kinase

[0039] As used herein, “promoter” means regulatory DNA for initializing transcription. A “plant promoter” is a promoter capable of initiating transcription in plant cells whether or not its origin is a plant cell, e.g., is it well known that viral promoters are functional in plants. Thus, plant promoters include promoter DNA obtained from plants, plant viruses, and bacteria such as Agrobacterium and Rhizobium bacteria. Examples of promoters under developmental control include promoters that preferentially initiate transcription in certain tissues, such as leaves, roots, or seeds. Such promoters are referred to as “tissue preferred”. Promoters which initiate transcription only in certain tissues are referred to as “tissue specific”. A “cell type” specific promoter primarily drives expression in certain cell types in one or more organs, for example, vascular cells in roots or leaves. An “inducible” or “repressible” promoter is a promoter which is under environmental control. Examples of environmental conditions that may effect transcription by inducible promoters include anaerobic conditions, or certain chemicals, or the presence of light. Tissue specific, tissue preferred, cell type specific, and inducible promoters constitute the class of “non-constitutive” promoters. A “constitutive” promoter is a promoter which is active under most conditions.

[0040] As used herein, “operably linked” means the association of two or more DNA fragments in a DNA construct so that the function of one, e.g., protein-encoding DNA, is affected by the other, e.g., a promoter.

[0041] As used herein, “expression” means the process that includes transcription of DNA to produce RNA and translation of the cognate protein encoded by the DNA and RNA.

[0042] As used herein, a “control plant” means a plant that does not contain the recombinant DNA that confers an enhanced agronomic trait. A control plant is used to compare against a transgenic plant, to identify an enhanced agronomic trait in the transgenic plant. A suitable control plant may be a non-transgenic plant of the parental line used to generate a transgenic plant. A control plant may in some cases be a transgenic plant line that comprises an empty vector or marker gene, but does not contain the recombinant DNA.

[0043] As used herein, an “agronomic trait” means a characteristic of a plant, which includes, but are not limited to, plant morphology, physiology, growth and development, yield, nutritional enhancement, disease or pest resistance, or environmental or chemical tolerance. In the plants of this invention the expression of identified recombinant DNA confers an agronomically important trait, e.g., increased yield. An “enhanced agronomic trait” refers to a measurable improvement in an agronomic trait including, but not limited to, yield increase, including increased yield under non-stress conditions and increased yield under environmental stress conditions. Stress conditions may include, for example, drought, shade, fungal disease, viral disease, bacterial disease, insect infestation, nematode infestation, cold temperature exposure, heat exposure, osmotic stress, reduced nitrogen nutrient availability, reduced phosphorus nutrient availability and high plant density. “Yield” can be affected by many properties including without limitation, plant height, pod number, pod position on the plant, number of internodes, incidence of pod shatter, grain size, efficiency of nodulation and nitrogen fixation, efficiency of nutrient assimilation, resistance to biotic and abiotic stress, carbon assimilation, plant architecture, resistance to lodging, percent seed germination, seedling vigor, and juvenile traits. Yield can also affected by efficiency of germination (including germination in stressed conditions), growth rate (including growth rate in stressed conditions), ear number, seed number per ear, seed size, composition of seed (starch, oil, protein) and characteristics of seed fill.

[0044] Increased yield of a transgenic plant of the present invention can be measured in a number of ways, including test weight, seed number per plant, seed weight, seed number per unit area (i.e. seeds, or weight of seeds, per acre), bushels per acre, tones per acre, tons per acre, kilo per hectare. For example, maize yield may be measured as production of shelled corn kernels per unit of production area, e.g., in bushels per acre or metric tons per hectare, often reported on a moisture adjusted basis, e.g., at 15.5% moisture. Increased yield may result from enhanced utilization of key biochemical compounds, such as nitrogen, phosphorous and carbohydrate, or from improved responses to environmental stresses, such as cold, heat, drought, salt, and attack by pests or pathogens. Recombinant DNA used in this invention can also be used to provide plants having enhanced growth and development, and ultimately increased yield, as the result of modified expression of plant growth regulators or modification of cell cycle or photosynthesis pathways.

[0045] Also of interest is the generation of transgenic plants that demonstrate enhanced yield with respect to a seed component that may or may not correspond to an increase in overall plant yield. Such properties include enhancements in seed oil, seed molecules such as tocopherol, protein and starch, or oil particular oil components as may be manifest by an alteration in the ratios of seed components.

[0046] A subset of the nucleic molecules of this invention includes fragments of the disclosed recombinant DNA consisting of oligonucleotides of at least 15, preferably at least 16 or 17, more preferably at least 18 or 19, and even more preferably at least 20 or more, consecutive nucleotides. Such oligonucleotides are fragments of the larger molecules having a sequence selected from the group consisting of SEQ ID NO:1 through SEQ ID NO:193, and find use, for example as probes and primers for detection of the polynucleotides of the present invention.

[0047] In some embodiments of the invention a constitutively active mutant is constructed to achieve the desired effect. SEQ ID NO: 3-6 encodes only the kinase domain of a calcium dependent protein kinase (CDPK). CDPK1 has a domain structure similar to other calcium-dependant protein kinase in which the protein kinase domain is separated from four efhand domains by 42 amino acid “spacer” region. Calcium-dependent protein kinases are thought to be activated by a calcium-induced conformational change that results in movement of an autoinhibitory domain away form the protein kinase active site (Yokokura et al., 1995). Thus, constitutively active proteins can be made by over expressing the protein kinase domain alone.

[0048] In other embodiments of the invention a chimeric gene is constructed between homologous genes from different species to obtain a protein with certain characteristics superior to either native protein, e.g., enhanced stability and favorable enzymatic kinetics. Exemplary chimeric DNA molecules provided by the present invention are set forth as SEQ ID NO: 1 and 2 that encode a Arabidopsis-Corn chimeric pyruvate orthophosphate dikinase (PPDK).

[0049] In yet other embodiments of the invention, a codon optimized gene is synthesized to achieve a desirable expression level. Synthetic DNA molecules can be designed by a variety of methods, such as, methods known in the art that are based upon substituting the codon(s) of a first polynucleotide to create an equivalent, or even an improved, second-generation artificial polynucleotide, where this new artificial polynucleotide is useful for enhanced expression in transgenic plants. The design aspect often employs a codon usage table. The table is produced by compiling the frequency of occurrence of codons in a collection of coding sequences isolated from a plant, plant type, family or genus. Other design aspects include reducing the occurrence of polyadenylation signals, intron splice sites, or long AT or GC stretches of sequence (U.S. Pat. No. 5,500,365). Full length coding sequences or fragments thereof can be made of artificial DNA using methods known to those skilled in the art. Such exemplary synthetic DNA molecules provided by the present invention are set forth as SEQ ID NO: 38.

[0050] DNA constructs are assembled using methods well known to persons of ordinary skill in the art and typically comprise a promoter operably linked to DNA, the expression of which provides the enhanced agronomic trait. Other construct components may include additional regulatory elements, such as 5′ introns for enhancing transcription, 3′ untranslated regions (such as polyadenylation signals and sites), DNA for transit or signal peptides.

[0051] In accordance with the current invention, constitutive promoters are active under most environmental conditions and states of development or cell differentiation. These promoters are likely to provide expression of the polynucleotide sequence at many stages of plant development and in a majority of tissues. A variety of constitutive promoters are known in the art. Examples of constitutive promoters that are active in plant cells include but are not limited to the nopaline synthase (NOS) promoters; the cauliflower mosaic virus (CaMV) 19S and 35S promoters (U.S. Pat. No. 5,858,642); the figwort mosaic virus promoter (P-FMV, U.S. Pat. No. 6,051,753); actin promoters, such as the rice actin promoter (P-Os.Act1, U.S. Pat. No. 5,641,876).

[0052] Furthermore, the promoters may be altered to contain one or more “enhancer sequences” to assist in elevating gene expression. Such enhancers are known in the art. By including an enhancer sequence with such constructs, the expression of the selected protein may be enhanced. These enhancers often are found 5′ to the start of transcription in a promoter that functions in eukaryotic cells, but can often be inserted in the forward or reverse orientation 5′ or 3′ to the coding sequence. In some instances, these 5′ enhancing elements are introns. Deemed to be particularly useful as enhancers are the 5′ introns of the rice actin 1 (see U.S. Pat. No. 5,641,876), rice actin 2 genes and the maize heat shock protein 70 gene intron (U.S. Pat. No. 5,593,874). Examples of other enhancers that can be used in accordance with the invention include elements from the CaMV 35S promoter, octopine synthase genes, the maize alcohol dehydrogenase gene, the maize shrunken 1 gene and promoters from non-plant eukaryotes.

[0053] Tissue-specific promoters cause transcription or enhanced transcription of a polynucleotide sequence in specific cells or tissues at specific times during plant development, such as in vegetative or reproductive tissues. Examples of tissue-specific promoters under developmental control include promoters that initiate transcription primarily in certain tissues, such as vegetative tissues, e.g., roots, leaves or stems, or reproductive tissues, such as fruit, ovules, seeds, pollen, pistils, flowers, or any embryonic tissue, or any combination thereof. Reproductive tissue specific promoters may be, e.g., ovule-specific, embryo-specific, endosperm-specific, integument-specific, pollen-specific, petal-specific, sepal-specific, or some combination thereof. Tissue specific promoter(s) will also include promoters that can cause transcription, or enhanced transcription in a desired plant tissue at a desired plant developmental stage. An example of such a promoter includes, but is not limited to, a seedling or an early seedling specific promoter. One skilled in the art will recognize that a tissue-specific promoter may drive expression of operably linked polynucleotide molecules in tissues other than the target tissue. Thus, as used herein, a tissue-specific promoter is one that drives expression preferentially not only in the target tissue, but may also lead to some expression in other tissues as well.

[0054] In one embodiment of this invention, preferential expression in plant green tissues is desired. Promoters of interest for such uses include those from genes such as maize aldolase gene FDA (U.S. patent application publication No. 20040216189), aldolase and pyruvate orthophosphate dikinase (PPDK) (Taniguchi et al. (2000) Plant Cell Physiol. 41(1):42-48).

[0055] In another embodiment of this invention, preferential expression in plant root tissue is desired. An exemplary promoter of interest for such uses is derived from Corn Nicotianamine Synthase gene (U.S. patent application publication No. 20030131377).

[0056] In yet another embodiment of this invention, preferential expression in plant phloem tissue is desired. An exemplary promoter of interest for such use is the rice tungro bacilliform virus (RTBV) promoter (U.S. Pat. No. 5,824,857).

[0057] In practicing this invention, an inducible promoter may also be used to ectopically express the structural gene in the recombinant DNA construct. The inducible promoter may cause conditional expression of a polynucleotide sequence under the influence of changing environmental conditions or developmental conditions. For example, such promoters may cause expression of the polynucleotide sequence at certain temperatures or temperature ranges, or in specific stage(s) of plant development such as in early germination or late maturation stage(s) of a plant. Examples of inducible promoters include, but are not limited to, the light-inducible promoter from the small subunit of ribulose-1,5-bis-phosphate carboxylase (ssRUBISCO) (Fischhoff et al. (1992) Plant Mol. Biol. 20:81-93); the drought-inducible promoter of maize (Busk et al., Plant J. 11:1285-1295, 1997), the cold, drought, and high salt inducible promoter from potato (Kirch, Plant Mol. Biol. 33:897-909, 1997), and many cold inducible promoters known in the art; for example rd29a and cor15a promoters from Arabidopsis (Genbank ID: D13044 and U01377), blt101 and blt4.8 from barley (Genbank ID: AJ310994 and U63993), wcs120 from wheat (Genbank ID:AF031235), mlip15 from corn (Genbank ID: D26563) and bn115 from Brassica (Genbank ID: U01377).

[0058] In some aspects of the invention, sufficient expression in plant seed tissues is desired to effect improvements in seed composition. Exemplary promoters for use for seed composition modification include promoters from seed genes such as napin (U.S. Pat. No. 5,420,034), maize L3 oleosin (U.S. Pat. No. 6,433,252), zein Z27 (Russell et al. (1997) Transgenic Res. 6(2): 157-166), glutelin1 (Russell (1997) supra), peroxiredoxin antioxidant (Per1) (Stacy et al. (1996) Plant Mol. Biol. 31(6):1205-1216), and globulin 1 (Belanger et al (1991) Genetics 129:863-872).

[0059] Recombinant DNA constructs prepared in accordance with the invention will also generally include a 3′ element that typically contains a polyadenylation signal and site. Well-known 3′ elements include those from Agrobacterium tumefaciens genes such as nos 3′, tml 3′, tmr 3′, tms 3′, ocs 3′, tr7 3′, e.g., disclosed in U.S. Pat. No. 6,090,627, incorporated herein by reference; 3′ elements from plant genes such as wheat (Triticum aesevitum) heat shock protein 17 (Hsp173′), a wheat ubiquitin gene, a wheat fructose-1,6-biphosphatase gene, a rice glutelin gene a rice lactate dehydrogenase gene and a rice beta-tubulin gene, all of which are disclosed in U.S. published patent application 2002/0192813 A1, incorporated herein by reference; and the pea (Pisum sativum) ribulose biphosphate carboxylase gene (rbs 3′), and 3′ elements from the genes within the host plant.

[0060] Constructs and vectors may also include a transit peptide for targeting of a gene target to a plant organelle, particularly to a chloroplast, leucoplast or other plastid organelle. For descriptions of the use of chloroplast transit peptides see U.S. Pat. No. 5,188,642 and U.S. Pat. No. 5,728,925, incorporated herein by reference. For description of the transit peptide region of an Arabidopsis EPSPS gene useful in the present invention, see Klee, H. J. et al., (MGG (1987) 210:437-442).

[0061] The recombinant DNA construct may include other elements. For example, the construct may contain DNA segments that provide replication function and antibiotic selection in bacterial cells. For example, the construct may contain an E. coli origin of replication such as ori322 or a broad host range origin of replication such as oriV, oriRi or oriColE.

[0062] The construct may also comprise a selectable marker such as an Ec-ntpII-Tn5 that encodes a neomycin phosphotransferase II gene obtained from Tn5 conferring resistance to a neomycin and kanamysin, Spc/Str that encodes for Tn7 aminoglycoside adenyltransferase (aadA) conferring resistance to spectinomycin or streptomycin, or a gentamicin (Gm, Gent) or one of many known selectable marker gene.

[0063] The vector or construct may also include a screenable marker and other elements as appropriate for selection of plant or bacterial cells having DNA constructs of the invention. DNA constructs are designed with suitable selectable markers that can confer antibiotic or herbicide tolerance to the cell. The antibiotic tolerance polynucleotide sequences include, but are not limited to, polynucleotide sequences encoding for proteins involved in tolerance to kanamycin, neomycin, hygromycin, and other antibiotics known in the art. An antibiotic tolerance gene in such a vector may be replaced by herbicide tolerance gene encoding for 5-enolpyruvylshikimate-3-phosphate synthase (EPSPS, described in U.S. Pat. Nos. 5,627,061, and 5,633,435; Padgette et al., Herbicide Resistant Crops, Lewis Publishers, 53-85, 1996; and in Penaloza-Vazquez, et al., Plant Cell Reports 14:482-487, 1995) and aroA (U.S. Pat. No. 5,094,945) for glyphosate tolerance, bromoxynil nitrilase (Bxn) for Bromoxynil tolerance (U.S. Pat. No. 4,810,648), phytoene desaturase (crtI (Misawa et al., Plant J. 4:833-840, 1993; and Misawa et al., Plant J. 6:481-489, 1994) for tolerance to norflurazon, acetohydroxyacid synthase (AHAS, Sathasiivan et al., Nucl. Acids Res. 18:2188-2193, 1990). Herbicides for which transgenic plant tolerance has been demonstrated and for which the method of the present invention can be applied include, but are not limited to: glyphosate, sulfonylureas, imidazolinones, bromoxynil, delapon, cyclohezanedione, protoporphyrionogen oxidase inhibitors, and isoxaslutole herbicides.

[0064] Other examples of selectable markers, screenable markers and other elements are well known in the art and may be readily used in the present invention. Those skilled in the art should refer to the following for details (for selectable markers, see Potrykus et al., Mol. Gen. Genet. 199:183-188, 1985; Hinchee et al., Bio. Techno. 6:915-922, 1988; Stalker et al., J. Biol. Chem. 263:6310-6314, 1988; European Patent Application 154,204; Thillet et al., J. Biol. Chem. 263:12500-12508, 1988; for screenable markers see, Jefferson, Plant Mol. Biol, Rep. 5: 387-405, 1987; Jefferson et al., EMBO J. 6: 3901-3907, 1987; Sutcliffe et al., Proc. Natl. Acad. Sci. U.S.A. 75: 3737-3741, 1978; Ow et al., Science 234: 856-859, 1986; Ikatu et al., Bio. Technol. 8: 241-242, 1990; and for other elements see, European Patent Application Publication Number 0218571; Koziel et al., Plant Mol. Biol. 32: 393-405; 1996).

[0065] The plants of this invention can be further enhanced with stacked traits, e.g., a crop having an enhanced agronomic trait resulting from expression of DNA disclosed herein, in combination with herbicide, disease, and/or pest resistance traits. The recombinant DNA is provided in plant cells derived from corn lines that maintain resistance to a virus such as the Mal de Rio Cuarto virus or a fungus such as the Puccina sorghi fungus or both, which are common plant diseases in Argentina. For example, genes of the current invention can be stacked with other traits of agronomic interest, such as a trait providing herbicide resistance, or insect resistance, such as using a gene from Bacillus thuringiensis to provide resistance against lepidopteran, coleopteran, homopteran, hemiopteran, and other insects. Herbicides for which transgenic plant tolerance has been demonstrated and the method of the present invention can be applied include, but are not limited to, glyphosate, dicamba, glufosinate, sulfonylurea, bromoxynil and norflurazon herbicides. Polynucleotide molecules encoding proteins involved in herbicide tolerance are well-known in the art and include, but are not limited to, a polynucleotide molecule encoding 5-enolpyruvylshikimate-3-phosphate synthase (EPSPS) disclosed in U.S. Pat. Nos. 5,094,945; 5,627,061; 5,633,435 and 6,040,497 for imparting glyphosate tolerance; polynucleotide molecules encoding a glyphosate oxidoreductase (GOX) disclosed in U.S. Pat. No. 5,463,175 and a glyphosate-N-acetyl transferase (GAT) disclosed in U.S. Patent Application publication 2003/0083480 A1 also for imparting glyphosate tolerance; dicamba monooxygenase disclosed in U.S. Patent Application publication 2003/0135879 A1 for imparting dicamba tolerance; a polynucleotide molecule encoding bromoxynil nitrilase (Bxn) disclosed in U.S. Pat. No. 4,810,648 for imparting bromoxynil tolerance; a polynucleotide molecule encoding phytoene desaturase (crtI) described in Misawa et al, (1993) Plant J. 4:833-840 and Misawa et al, (1994) Plant J. 6:481-489 for norflurazon tolerance; a polynucleotide molecule encoding acetohydroxyacid synthase (AHAS, aka ALS) described in Sathasiivan et al. (1990) Nucl. Acids Res. 18:2188-2193 for imparting tolerance to sulfonylurea herbicides; polynucleotide molecules known as bar genes disclosed in DeBlock, et al. (1987) EMBO J. 6:2513-2519 for imparting glufosinate and bialaphos tolerance; polynucleotide molecules disclosed in U.S. Patent Application Publication 2003/010609 A1 for imparting N-amino methyl phosphonic acid tolerance; polynucleotide molecules disclosed in U.S. Pat. No. 6,107,549 for imparting pyridine herbicide resistance; molecules and methods for imparting tolerance to multiple herbicides such as glyphosate, atrazine, ALS inhibitors, isoxoflutole and glufosinate herbicides are disclosed in U.S. Pat. No. 6,376,754 and U.S. Patent Application Publication 2002/0112260, all of said U.S. patents and patent application publications are incorporated herein by reference. Molecules and methods for imparting insect/nematode/virus resistance is disclosed in U.S. Pat. Nos. 5,250,515; 5,880,275; 6,506,599; 5,986,175 and U.S. Patent Application Publication 2003/0150017 A1, all of which are incorporated herein by reference.

[0066] In particular embodiments, the inventors contemplate the use of antibodies, either monoclonal or polyclonal which bind to the proteins disclosed herein. Means for preparing and characterizing antibodies are well known in the art (See, e.g., Antibodies: A Laboratory Manual, Cold Spring Harbor Laboratory, 1988; incorporated herein by reference). The methods for generating monoclonal antibodies (mAbs) generally begin along the same lines as those for preparing polyclonal antibodies. Briefly, a polyclonal antibody is prepared by immunizing an animal with an immunogenic composition in accordance with the present invention and collecting antisera from that immunized animal. A wide range of animal species can be used for the production of antisera. Typically the animal used for production of anti-antisera is a rabbit, a mouse, a rat, a hamster, a guinea pig or a goat. Because of the relatively large blood volume of rabbits, a rabbit is a preferred choice for production of polyclonal antibodies.

[0067] As is well known in the art, a given composition may vary in its immunogenicity. It is often necessary therefore to boost the host immune system, as may be achieved by coupling a peptide or polypeptide immunogen to a carrier. Exemplary and preferred carriers are keyhole limpet hemocyanin (KLH) and bovine serum albumin (BSA). Other albumins such as ovalbumin, mouse serum albumin or rabbit serum albumin can also be used as carriers. Means for conjugating a polypeptide to a carrier protein are well known in the art and include using glutaraldehyde, m-maleimidobencoyl-N-hydroxysuccinimide ester, carbodiimide and bis-biazotized benzidine.

[0068] As is also well known in the art, the immunogenicity of a particular immunogen composition can be enhanced by the use of non-specific stimulators of the immune response, known as adjuvants. Exemplary and preferred adjuvants include complete Freund's adjuvant (a non-specific stimulator of the immune response containing killed Mycobacterium tuberculosis), incomplete Freund's adjuvants and aluminum hydroxide adjuvant.

[0069] The amount of immunogen composition used in the production of polyclonal antibodies varies upon the nature of the immunogen as well as the animal used for immunization. A variety of routes can be used to administer the immunogen (subcutaneous, intramuscular, intradermal, intravenous and intraperitoneal). The production of polyclonal antibodies may be monitored by sampling blood of the immunized animal at various points following immunization. A second, booster, injection may also be given. The process of boosting and tittering is repeated until a suitable titer is achieved. When a desired level of immunogenicity is obtained, the immunized animal can be bled and the serum isolated and stored, and/or the animal can be used to generate mAbs.

[0070] mAbs may be readily prepared through use of well-known techniques, such as those exemplified in U.S. Pat. No. 4,196,265, incorporated herein by reference. Typically, this technique involves immunizing a suitable animal with a selected immunogen composition, e.g., a purified or partially purified antifungal protein, polypeptide or peptide. The immunizing composition is administered in a manner effective to stimulate antibody producing cells. Rodents such as mice and rats are preferred animals, however, the use of rabbit, sheep, or frog cells is also possible. The use of rats may provide certain advantages (Goding, 1986, pp. 60-61), but mice are preferred, with the BALB/c mouse being most preferred as this is most routinely used and generally gives a higher percentage of stable fusions.

[0071] Following immunization, somatic cells with the potential for producing antibodies, specifically B lymphocytes (B cells), are selected for use in the mAb generating protocol. These cells may be obtained from biopsied spleens, tonsils or lymph nodes, or from a peripheral blood sample. Spleen cells and peripheral blood cells are preferred, the former because they are a rich source of antibody-producing cells that are in the dividing plasmablast stage, and the latter because peripheral blood is easily accessible. Often, a panel of animals will have been immunized and the spleen of animal with the highest antibody titer will be removed and the spleen lymphocytes obtained by homogenizing the spleen with a syringe. Typically, a spleen from an immunized mouse contains approximately 5×10⁷ to 2×10⁸ lymphocytes.

[0072] The antibody-producing B lymphocytes from the immunized animal are then fused with cells of an immortal myeloma cell, generally one of the same species as the animal that was immunized. Myeloma cell lines suited for use in hybridoma-producing fusion procedures preferably are non-antibody-producing, have high fusion efficiency, and enzyme deficiencies that render them incapable of growing in certain selective media which support the growth of only the desired fused cells (hybridomas).

[0073] Any one of a number of myeloma cells may be used, as are known to those of skill in the art (Goding, 1986, pp. 65-66; Campbell, 1984, pp. 75-83). For example, where the immunized animal is a mouse, one may use P3-X63/Ag8, X63-Ag8.653, NS1/1.Ag 4 1, Sp210-Ag14, FO, NSO/U, MPC-11, MPC11-X45-GTG 1.7 and S194/5XXO Bul; for rats, one may use R210.RCY3, Y3-Ag 1.2.3, IR983F and 4B210; and U-266, GM1500-GRG2, LICR-LON-HMy2 and UC729-6 are all useful in connection with human cell fusions.

[0074] One preferred murine myeloma cell is the NS-1 myeloma cell line (also termed P3-NS-1-Ag-4-1), which is readily available from the NIGMS Human Genetic Mutant Cell Repository by requesting cell line repository number GM3573. Another mouse myeloma cell line that may be used is the 8-azaguanine-resistant mouse murine myeloma SP2/0 non-producer cell line.

[0075] Methods for generating hybrids of antibody-producing spleen or lymph node cells and myeloma cells usually comprise mixing somatic cells with myeloma cells in a 2:1 ratio, though the ratio may vary from about 20:1 to about 1:1, respectively, in the presence of an agent or agents (chemical or electrical) that promote the fusion of cell membranes. Fusion methods using Spend virus have been described (Kohler and Milstein, 1975; 1976), and those using polyethylene glycol (PEG), such as 37% (v/v) PEG, (Gefter et al., 1977). The use of electrically induced fusion methods is also appropriate (Goding, 1986, pp. 71-74).

[0076] Fusion procedures usually produce viable hybrids at low frequencies, about 1×10⁻⁶ to 1×10⁻⁸. However, this does not pose a problem, as the viable, fused hybrids are differentiated from the parental, unfused cells (particularly the unfused myeloma cells that would normally continue to divide indefinitely) by culturing in a selective medium. The selective medium is generally one that contains an agent that blocks the de novo synthesis of nucleotides in the tissue culture media. Exemplary and preferred agents are aminopterin, methotrexate, and azaserine. Aminopterin and methotrexate block de novo synthesis of both purines and pyrimidines, whereas azasenne blocks only purine synthesis. Where aminopterin or methotrexate is used, the media is supplemented with hypoxanthine and thymidine as a source of nucleotides (HAT medium). Where azaserine is used, the media is supplemented with hypoxanthine.

[0077] The preferred selection medium is HAT. Only cells capable of operating nucleotide salvage pathways are able to survive in HAT medium. The myeloma cells are defective in key enzymes of the salvage pathway, e.g., hypoxanthine phosphoribosyl transferase (HPRT), and they cannot survive. The B-cells can operate this pathway, but they have a limited life span in culture and generally die within about two weeks. Therefore, the only cells that can survive in the selective media are those hybrids formed from myeloma and B-cells.

[0078] This culturing provides a population of hybridomas from which specific hybridomas are selected. Typically, selection of hybridomas is performed by culturing the cells by single-clone dilution in microtiter plates, followed by testing the individual clonal supernatants (after about two to three weeks) for the desired reactivity. The assay should be sensitive, simple and rapid, such as radioimmunoassays, enzyme immunoassays, cytotoxicity assays, plaque assays, dot immunobinding assays, and the like.

[0079] The selected hybridomas would then be serially diluted and cloned into individual antibody-producing cell lines, which clones can then be propagated indefinitely to provide mAbs. The cell lines may be exploited for mAb production in two basic ways. A sample of the hybridoma can be injected (often into the peritoneal cavity) into a histocompatible animal of the type that was used to provide the somatic and myeloma cells for the original fusion. The injected animal develops tumors secreting the specific monoclonal antibody produced by the fused cell hybrid. The body fluids of the animal, such as serum or ascites fluid, can then be tapped to provide mAbs in high concentration. The individual cell lines could also be cultured in vitro, where the mAbs are naturally secreted into the culture medium from which they can be readily obtained in high concentrations. mAbs produced by either means may be further purified, if desired, using filtration, centrifugation and various chromatographic methods such as HPLC or affinity chromatography.

### Transformation Method

[0080] Numerous methods for transforming plant cells with recombinant DNA are known in the art and may be used in the present invention. Two commonly used methods for plant transformation are Agrobacterium-mediated transformation and microprojectile bombardment. Microprojectile bombardment methods are illustrated in U.S. Pat. Nos. 5,015,580 (soybean); 5,550,318 (corn); 5,538,880 (corn); 5,914,451 (soybean); 6,160,208 (corn); 6,399,861 (corn) and 6,153,812 (wheat) and Agrobacterium-mediated transformation is described in U.S. Pat. Nos. 5,159,135 (cotton); 5,824,877 (soybean); 5,591,616 (corn); and 6,384,301 (soybean), and in US Patent Application Publication 2004/0244075, all of which are incorporated herein by reference. For Agrobacterium tumefaciens based plant transformation system, additional elements present on transformation constructs will include T-DNA left and right border sequences to facilitate incorporation of the recombinant polynucleotide into the plant genome.

[0081] In general it is useful to introduce recombinant DNA randomly, i.e. at a non-specific location, in the genome of a target plant line. In special cases it may be useful to target recombinant DNA insertion in order to achieve site-specific integration, e.g., to replace an existing gene in the genome, to use an existing promoter in the plant genome, or to insert a recombinant polynucleotide at a predetermined site known to be active for gene expression. Several site specific recombination systems exist which are known to function implants include cre-lox as disclosed in U.S. Pat. No. 4,959,317 and FLP-FRT as disclosed in U.S. Pat. No. 5,527,695, both incorporated herein by reference.

[0082] Transformation methods of this invention are preferably practiced in tissue culture on media and in a controlled environment. “Media” refers to the numerous nutrient mixtures that are used to grow cells in vitro, that is, outside of the intact living organism. Recipient cell targets include, but are not limited to, meristem cells, callus, immature embryos and gametic cells such as microspores, pollen, sperm and egg cells. It is contemplated that any cell from which a fertile plant may be regenerated is useful as a recipient cell. Callus may be initiated from tissue sources including, but not limited to, immature embryos, seedling apical meristems, microspores and the like. Cells capable of proliferating as callus are also recipient cells for genetic transformation. Practical transformation methods and materials for making transgenic plants of this invention, e.g., various media and recipient target cells, transformation of immature embryos and subsequent regeneration of fertile transgenic plants are disclosed in U.S. Pat. Nos. 6,194,636 and 6,232,526, which are incorporated herein by reference.

[0083] The seeds of transgenic plants can be harvested from fertile transgenic plants and be used to grow progeny generations of transformed plants of this invention including hybrid plants line for screening of plants having an enhanced agronomic trait. In addition to direct transformation of a plant with a recombinant DNA, transgenic plants can be prepared by crossing a first plant having a recombinant DNA with a second plant lacking the DNA. For example, recombinant DNA can be introduced into first plant line that is amenable to transformation to produce a transgenic plant which can be crossed with a second plant line to introgress the recombinant DNA into the second plant line. A transgenic plant with recombinant DNA providing an enhanced agronomic trait, e.g., enhanced yield, can be crossed with transgenic plant line having other recombinant DNA that confers another trait, e.g., herbicide resistance or pest resistance, to produce progeny plants having recombinant DNA that confers both traits. Typically, in such breeding for combining traits the transgenic plant donating the additional trait is a male line and the transgenic plant carrying the base traits is the female line. The progeny of this cross will segregate such that some of the plants will carry the DNA for both parental traits and some will carry DNA for one parental trait; such plants can be identified by markers associated with parental recombinant DNA Progeny plants carrying DNA for both parental traits can be crossed back into the female parent line multiple times, e.g., usually 6 to 8 generations, to produce a progeny plant with substantially the same genotype as one original transgenic parental line but for the recombinant DNA of the other transgenic parental line.

[0084] In the practice of transformation DNA is typically introduced into only a small percentage of target cells in any one transformation experiment. Marker genes are used to provide an efficient system for identification of those cells that are stably transformed by receiving and integrating a transgenic DNA construct into their genomes. Preferred marker genes provide selective markers which confer resistance to a selective agent, such as an antibiotic or herbicide. Any of the herbicides to which plants of this invention may be resistant are useful agents for selective markers. Potentially transformed cells are exposed to the selective agent. In the population of surviving cells will be those cells where, generally, the resistance-conferring gene is integrated and expressed at sufficient levels to permit cell survival. Cells may be tested further to confirm stable integration of the exogenous DNA. Commonly used selective marker genes include those conferring resistance to antibiotics such as kanamycin and paromomycin (nptII), hygromycin B (aph IV) and gentamycin (aac3 and aacC4) or resistance to herbicides such as glufosinate (bar or pat) and glyphosate (aroA or EPSPS). Examples of such selectable are illustrated in U.S. Pat. Nos. 5,550,318; 5,633,435; 5,780,708 and 6,118,047, all of which are incorporated herein by reference. Screenable markers which provide an ability to visually identify transformants can also be employed, e.g., a gene expressing a colored or fluorescent protein such as a luciferase or green fluorescent protein (GFP) or a gene expressing a beta-glucuronidase or uidA gene (GUS) for which various chromogenic substrates are known.

[0085] Cells that survive exposure to the selective agent, or cells that have been scored positive in a screening assay, may be cultured in regeneration media and allowed to mature into plants. Developing plantlets can be transferred to plant growth mix, and hardened off, e.g., in an environmentally controlled chamber at about 85% relative humidity, 600 ppm CO₂, and 25-250 microeinsteins m⁻²s⁻¹ of light, prior to transfer to a greenhouse or growth chamber for maturation. Plants are regenerated from about 6 weeks to 10 months after a transformant is identified, depending on the initial tissue. Plants may be pollinated using conventional plant breeding methods known to those of skill in the art and seed produced, e.g., self-pollination is commonly used with transgenic corn. The regenerated transformed plant or its progeny seed or plants can be tested for expression of the recombinant DNA and screened for the presence of enhanced agronomic trait.

### Transgenic Plants and Seeds

[0086] Transgenic plant seed provided by this invention are grown to generate transgenic plants having an enhanced trait as compared to a control plant. Such seed for plants with enhanced agronomic trait is identified by screening transformed plants or progeny seed for enhanced trait. For efficiency a screening program is designed to evaluate multiple transgenic plants (events) comprising the recombinant DNA, e.g., multiple plants from 2 to 20 or more transgenic events.

[0087] Transgenic plants grown from transgenic seed provided herein demonstrate enhanced agronomic traits that contribute to increased yield or other trait that provides increased plant value, including, for example, enhanced seed quality. Of particular interest are plants having enhanced yield resulting from enhanced plant growth and development, stress tolerance, enhanced seed development, higher light response, enhanced flower development, or enhanced carbon and/or nitrogen metabolism.

TABLE 1

| NUC | PEP | | | annotation | | | |
|---|---|---|---|---|---|---|---|
| SEQ | SEQ | Base | | e- | | | |
| ID NO | ID NO | vector | GENE ID | value | % identity | identifier | description |
| 1 | 194 | 1 | PHE0003351_PMON81242 | 0 | 98 | 168586 | gb\|AAA33498.1\|pyruvate, orthophosphate |
| | | | | | | | dikinase |
| 2 | 195 | 7 | PHE0003351_PMON83625 | 0 | 98 | 168586 | gb\|AAA33498.1\|pyruvate, orthophosphate |
| | | | | | | | dikinase |
| 3 | 196 | 1 | PHE0000207_PMON77878 | 1.00E−144 | 96 | 34907990 | ref\|NP_915342.1\|putative |
| | | | | | | | calcium-dependent protein |
| | | | | | | | kinase [Oryza sativa |
| | | | | | | | (japonica cultivar-group)] |
| 4 | 197 | 1 | PHE0000208_PMON77879 | 1.00E−143 | 94 | 50919297 | ref\|XP_470045.1\|putative |
| | | | | | | | calmodulin-domain protein |
| | | | | | | | kinase [Oryza sativa |
| | | | | | | | (japonica cultivar-group)] |
| 5 | 198 | 1 | PHE0000209_PMON77891 | 1.00E−135 | 89 | 53850561 | gb\|AAU95457.1\|At5g12180 |
| | | | | | | | [Arabidopsis thaliana] |
| | | | | | | | dbj\|BAB10036.1\|calcium- |
| | | | | | | | dependent protein kinase |
| 6 | 199 | 1 | PHE0000210_PMON77880 | 1.00E−137 | 89 | 26452430 | dbj\|BAC43300.1\|putative |
| | | | | | | | calcium-dependent protein |
| | | | | | | | kinase [Arabidopsis |
| | | | | | | | thaliana] |
| 7 | 200 | 8 | PHE0001329_PMON92878 | 0 | 100 | 34903780 | dbj\|BAB92151.1\|putative |
| | | | | | | | CBL-interacting protein |
| | | | | | | | kinase 2 [Oryza sativa |
| | | | | | | | (japonica |
| 8 | 201 | 1 | PHE0001425_PMON79162 | 1.00E−154 | 100 | 51979679 | ref\|XP_507586.1\|PREDICTED |
| | | | | | | | P0524F03.33 gene |
| | | | | | | | product [Oryza sativa |
| | | | | | | | (japonica cultivar-group)] |
| | | | | | | | ref\|XP_482612.1\|putative |
| | | | | | | | CCR4-NOT transcription |
| | | | | | | | complex, subunit 7 |
| 9 | 202 | 8 | PHE0001573_PMON92870 | 0 | 78 | 984262 | emb\|CAA58052.1\|asparragine |
| | | | | | | | synthetase [Zea mays] |
| 10 | 203 | 12 | PHE0001664_PMON99280 | 0 | 100 | 34906358 | sp\|Q9LDE6\|CKX1_ORYS |
| | | | | | | | A Probable cytokinin |
| | | | | | | | dehydrogenase precursor |
| | | | | | | | (Cytokinin oxidase) (CKO) |
| 11 | 204 | 1 | PHE0001674_PMON79194 | 5.00E−12 | 50 | 15223390 | ref\|NP_171645.1\|myb |
| | | | | | | | family transcription factor |
| | | | | | | | [Arabidopsis thaliana] |
| 12 | 205 | 10 | PHE0002026_PMON96489 | 0 | 87 | 32488298 | emb\|CAE03364.1\|OSJNBb0065L13.7 |
| | | | | | | | [Oryza sativa |
| | | | | | | | (japonica cultivar-group)] |
| 13 | 206 | 8 | PHE0002108_PMON92821 | 2.00E−31 | 100 | 10176234 | dbj\|BAB07329.1\|cold-shock |
| | | | | | | | protein [Bacillus halodurans |
| | | | | | | | C-125] |
| 14 | 207 | 8 | PHE0002109_PMON93856 | 6.00E−33 | 100 | 41324401 | emb\|CAF18741.1\|COLD- |
| | | | | | | | SHOCK PROTEIN CSPA |
| | | | | | | | [Corynebacterium |
| | | | | | | | glutamicum ATCC 13032] |
| 15 | 208 | 8 | PHE0002508_PMON92607 | 2.00E−79 | 72 | 50509850 | dbj\|BAD32022.1\|putative |
| | | | | | | | transcription factor [Oryza |
| | | | | | | | sativa |
| 16 | 209 | 1 | PHE0002650_PMON81832 | 1.00E−132 | 100 | 9964296 | gb\|AAG09919.1\|MADS |
| | | | | | | | box protein 2 [Zea mays] |
| 17 | 210 | 2 | PHE0002989_PMON95630 | 1.00E−117 | 100 | 7271044 | emb\|CAB80652.1\|small |
| | | | | | | | GTP-binding protein-like |
| | | | | | | | [Arabidopsis thaliana] |
| 18 | 211 | 6 | PHE0003290_PMON95107 | 4.00E−29 | 34 | 7269078 | emb\|CAB79187.1\|hypothetical |
| | | | | | | | protein [Arabidopsis |
| | | | | | | | thaliana] |
| 19 | 212 | 6 | PHE0003300_PMON95106 | 7.00E−18 | 54 | 50908933 | ref\|XP_465955.1\|putative |
| | | | | | | | nodulin 3 [Oryza sativa |
| | | | | | | | (japonica cultivar-group)] |
| 20 | 213 | 6 | PHE0003303_PMON95080 | 2.00E−96 | 69 | 38347194 | emb\|CAD37109.2\|OSJNBa0024J22.22 |
| | | | | | | | [Oryza sativa |
| | | | | | | | (japonica cultivar-group)] |
| 21 | 214 | 8 | PHE0003389_PMON94682 | 0 | 65 | 52076827 | dbj\|BAD45770.1\|putative |
| | | | | | | | Cyt-P450 monooxygenase |
| | | | | | | | [Oryza sativa (japonica |
| | | | | | | | cultivar-group)] |
| 22 | 215 | 8 | PHE0003614_PMON95111 | 0 | 94 | 32309578 | gb\|AAP79441.1\|glutamate |
| | | | | | | | decarboxylase [Oryza sativa |
| | | | | | | | (japonica cultivar-group)] |
| 23 | 216 | 8 | PHE0003684_PMON92807 | 1.00E−72 | 68 | 34906004 | dbj\|BAB63676.1\|induced |
| | | | | | | | protein MgI1 [Oryza sativa |
| | | | | | | | (japonica cultivar-group)] |
| 24 | 217 | 9 | PHE0003684_PMON93378 | 1.00E−72 | 68 | 34906004 | dbj\|BAB63676.1\|induced |
| | | | | | | | protein MgI1 [Oryza sativa |
| | | | | | | | (japonica cultivar-group)] |
| 25 | 218 | 8 | PHE0003853_PMON92602 | 1.00E−179 | 98 | 62320210 | ref\|NP_195478.2\|cyclin |
| | | | | | | | family protein [Arabidopsis |
| | | | | | | | thaliana] gb\|AAS49095.1\| |
| | | | | | | | At4g37630 [Arabidopsis |
| | | | | | | | thaliana] |
| 26 | 219 | 11 | PHE0003903_PMON98271 | 0 | 99 | 19851522 | gb\|AAL99744.1\|pyruvate |
| | | | | | | | decarboxylase [Zea mays] |
| 27 | 220 | 11 | PHE0003905_PMON99283 | 0 | 92 | 11995457 | gb\|AAG43027.1\|aldehyde |
| | | | | | | | dehydrogenase [Oryza |
| | | | | | | | sativa] |
| 28 | 221 | 11 | PHE0003907_PMON98066 | 5.00E−87 | 86 | 50906015 | ref\|XP_464496.1\|ribosomal |
| | | | | | | | protein L12-like protein |
| | | | | | | | [Oryza sativa (japonica |
| | | | | | | | cultivar-group)] |
| 29 | 222 | 11 | PHE0003908_PMON98064 | 0 | 84 | 51535811 | dbj\|BAD37896.1\|ARG1- |
| | | | | | | | like protein [Oryza sativa |
| | | | | | | | (japonica cultivar-group)] |
| 30 | 223 | 6 | PHE0003960_PMON95079 | 1.00E−156 | 87 | 50905641 | ref\|XP_464309.1\|putative |
| | | | | | | | choline-phosphate |
| | | | | | | | cytidylyltransferase [Oryza |
| | | | | | | | sativa (japonica cultivar- |
| | | | | | | | group)] |
| 31 | 224 | 5 | PHE0003967_PMON95088 | 1.00E−102 | 83 | 55168334 | gb\|AAV44199.1\|dehydroascorbate |
| | | | | | | | reductase [Oryza |
| | | | | | | | sativa (japonica cultivar- |
| | | | | | | | group)] |
| 32 | 225 | 10 | PHE0003985_PMON96457 | 1.00E−30 | 58 | 55770043 | ref\|XP_550011.1\|hypothetical |
| | | | | | | | protein [Oryza sativa |
| | | | | | | | (japonica cultivar-group)] |
| 33 | 226 | 10 | PHE0003987_PMON96134 | 5.00E−41 | 74 | 50919885 | ref\|XP_470303.1\|hypothetical |
| | | | | | | | protein [Oryza sativa |
| | | | | | | | (japonica cultivar-group)] |
| 34 | 227 | 10 | PHE0004001_PMON96453 | 4.00E−22 | 66 | 51978970 | ref\|XP_507362.1\|PREDICTED |
| | | | | | | | OSJNBa0077F02.127 |
| | | | | | | | gene product [Oryza sativa |
| | | | | | | | (japonica cultivar-group)] |
| 35 | 228 | 8 | PHE0004023_PMON92446 | 1.00E−132 | 88 | 12651665 | gb\|AAA20093.2\|Alfin-1 |
| | | | | | | | [Medicago sativa] |
| | | | | | | | pir\|\|T09646 probable zinc |
| | | | | | | | finger protein - alfalfa |
| | | | | | | | (fragment) |
| 36 | 229 | 4 | PHE0004026_PMON93885 | 0 | 100 | 21592703 | gb\|AAM64652.1\|LAX1/ |
| | | | | | | | AUX1-like permease |
| | | | | | | | [Arabidopsis thaliana] |
| 37 | 230 | 4 | PHE0004027_PMON93860 | 0 | 100 | 7269873 | emb\|CAB79732.1\|cytokinin |
| | | | | | | | oxidase-like protein |
| | | | | | | | [Arabidopsis thaliana] |
| 38 | 231 | 15 | PHE0004028_PMON94697 | 0 | 100 | 216765 | dbj\|BAA14344.1\|sucrose |
| | | | | | | | phosphorylase |
| | | | | | | | [Leuconostoc |
| | | | | | | | mesenteroides] |
| 12607 | 231 | n/a | PHE0010424_PMON17730 | 0 | 100 | 216765 | dbj\|BAA14344.1\|sucrose |
| | | | | | | | phosphorylase |
| | | | | | | | [Leuconostoc |
| | | | | | | | mesenteroides] |
| 39 | 232 | 8 | PHE0004034_PMON92631 | 0 | 100 | 6520233 | dbj\|BAA87958.1\|CW14 |
| | | | | | | | [Arabidopsis thaliana] |
| 40 | 233 | 8 | PHE0004039_PMON92634 | 1.00E−178 | 65 | 26452061 | ref\|NP_191207.2\|myosin |
| | | | | | | | heavy chain-related |
| | | | | | | | [Arabidopsis thaliana] |
| 41 | 234 | 8 | PHE0004047_PMON92619 | 4.00E−79 | 74 | 62087121 | dbj\|BAD91881.1\|transcription |
| | | | | | | | factor lim1 [Eucalyptus |
| | | | | | | | camaldulensis] |
| 42 | 235 | 14 | PHE0004047_PMON93388 | 4.00E−79 | 74 | 62087121 | dbj\|BAD91881.1\|transcription |
| | | | | | | | factor lim1 [Eucalyptus |
| | | | | | | | camaldulensis] |
| 43 | 236 | 8 | PHE0004068_PMON93663 | 3.00E−94 | 100 | 15293293 | ref\|NP_563710.1\|AWPM- |
| | | | | | | | 19-like membrane family |
| | | | | | | | protein [Arabidopsis |
| | | | | | | | thaliana] |
| 44 | 237 | 8 | PHE0004071_PMON93311 | 1.00E−130 | 100 | 21358850 | ref\|NP_568751.1\| |
| | | | | | | | polyadenylate-binding |
| | | | | | | | protein, putative/PABP, |
| | | | | | | | putative [Arabidopsis |
| | | | | | | | thaliana] |
| 45 | 238 | 8 | PHE0004072_PMON93654 | 0 | 100 | 23297397 | ref\|NP_192188.2\|GTP- |
| | | | | | | | binding family protein |
| | | | | | | | [Arabidopsis thaliana] |
| 46 | 239 | 14 | PHE0004072_PMON93669 | 0 | 100 | 23297397 | ref\|NP_192188.2\|GTP- |
| | | | | | | | binding family protein |
| | | | | | | | [Arabidopsis thaliana] |
| 47 | 240 | 8 | PHE0004074_PMON94164 | 0 | 100 | 9759255 | ref\|NP_196133.3\| |
| | | | | | | | transcription elongation |
| | | | | | | | factor-related [Arabidopsis |
| | | | | | | | thaliana] |
| 48 | 241 | 8 | PHE0004075_PMON92851 | 1.00E−132 | 100 | 11994587 | ref\|NP_566493.1\|nodulin |
| | | | | | | | MtN3 family protein |
| | | | | | | | [Arabidopsis thaliana] |
| 49 | 242 | 8 | PHE0004080_PMON93321 | 1.00E−143 | 99 | 16173 | emb\|CAA42168.1\|L- |
| | | | | | | | ascorbate peroxidase |
| | | | | | | | [Arabidopsis thaliana] |
| 50 | 243 | 14 | PHE0004084_PMON95141 | 0 | 100 | 7267537 | emb\|CAB78019.1\|putative |
| | | | | | | | phi-1-like phosphate- |
| | | | | | | | induced protein |
| | | | | | | | [Arabidopsis thaliana] |
| | | | | | | | gb\|AAM18526.1\| cell cycle- |
| | | | | | | | related protein [Arabidopsis |
| | | | | | | | thaliana] |
| 51 | 244 | 8 | PHE0004093_PMON93332 | 0 | 100 | 12744973 | gb\|AAK06866.1\|putative |
| | | | | | | | ATPase [Arabidopsis |
| | | | | | | | thaliana] ref\|NP_173536.1\| |
| | | | | | | | O-methyltransferase, |
| | | | | | | | putative [Arabidopsis |
| | | | | | | | thaliana] |
| 52 | 245 | 14 | PHE0004093_PMON94155 | 0 | 100 | 12744973 | gb\|AAK06866.1\|putative |
| | | | | | | | ATPase [Arabidopsis |
| | | | | | | | thaliana] ref\|NP_173536.1\| |
| | | | | | | | O-methyltransferase, |
| | | | | | | | putative [Arabidopsis |
| | | | | | | | thaliana] |
| 53 | 246 | 8 | PHE0004139_PMON92898 | 2.00E−88 | 100 | 21554099 | ref\|NP_568761.1\| expressed |
| | | | | | | | protein [Arabidopsis |
| | | | | | | | thaliana] |
| 54 | 247 | 8 | PHE0004144_PMON93842 | 1.00E−78 | 100 | 21555039 | ref\|NP_565390.1\| actin- |
| | | | | | | | depolymerizing factor 5 |
| | | | | | | | (ADF5) [Arabidopsis |
| | | | | | | | thaliana] |
| 55 | 248 | 8 | PHE0004148_PMON92574 | 0 | 100 | 48768596 | ref\|ZP_00272945.1\|COG0538: |
| | | | | | | | Isocitrate |
| | | | | | | | dehydrogenases [Ralstonia |
| | | | | | | | metallidurans CH34] |
| 56 | 249 | 8 | PHE0004149_PMON92471 | 1.00E−148 | 99 | 31096331 | ref\|NP_441003.1\| |
| | | | | | | | phycocyanin alpha |
| | | | | | | | phycocyanobilin lyase; |
| | | | | | | | CpcE [Synechocystis sp. |
| | | | | | | | PCC 6803] |
| 57 | 250 | 14 | PHE0004149_PMON93899 | 1.00E−148 | 99 | 31096331 | ref\|NP_441003.1\| |
| | | | | | | | phycocyanin alpha |
| | | | | | | | phycocyanobilin lyase; |
| | | | | | | | CpcE [Synechocystis sp. |
| | | | | | | | PCC 6803] |
| 58 | 251 | 15 | PHE0004152_PMON93672 | 3.00E−85 | 60 | 8978267 | ref\|NP_199781.1\|DNA- |
| | | | | | | | binding protein-related |
| | | | | | | | [Arabidopsis thaliana] |
| 59 | 252 | 8 | PHE0004155_PMON92626 | 0 | 100 | 22136876 | ref\|NP_200010.1\|sorbitol |
| | | | | | | | dehydrogenase, putative/ |
| | | | | | | | L-iditol 2-dehydrogenase, |
| | | | | | | | putative [Arabidopsis |
| | | | | | | | thaliana] |
| 60 | 253 | 8 | PHE0004156_PMON92623 | 0 | 98 | 12322729 | ref\|NP_187478.1\| |
| | | | | | | | phototropic-responsive |
| | | | | | | | protein, putative |
| | | | | | | | [Arabidopsis thaliana] |
| 61 | 254 | 8 | PHE0004162_PMON92481 | 3.00E−77 | 57 | 7269806 | emb\|CAB79666.1\|phytochrome- |
| | | | | | | | associated protein |
| | | | | | | | PAP2 [Arabidopsis |
| | | | | | | | thaliana] |
| 62 | 255 | 8 | PHE0004164_PMON92465 | 4.00E−67 | 100 | 21537028 | ref\|NP_198423.1\|glycosyl |
| | | | | | | | hydrolase family protein 17 |
| | | | | | | | [Arabidopsis thaliana] |
| 63 | 256 | 8 | PHE0004166_PMON93801 | 6.00E−09 | 100 | 13374861 | emb\|CAC34495.1\|putative |
| | | | | | | | strictosidine synthase-like |
| | | | | | | | [Arabidopsis thaliana] |
| 64 | 257 | 8 | PHE0004167_PMON93333 | 1.00E−176 | 100 | 28827764 | ref\|NP_569050.1\| |
| | | | | | | | adenylylsulfate kinase, |
| | | | | | | | putative [Arabidopsis |
| | | | | | | | thaliana] |
| 65 | 258 | 8 | PHE0004168_PMON93855 | 0 | 100 | 18176302 | ref\|NP_199253.1\|FAD- |
| | | | | | | | binding domain-containing |
| | | | | | | | protein [Arabidopsis |
| | | | | | | | thaliana] |
| 66 | 259 | 8 | PHE0004169_PMON92568 | 0 | 100 | 5080826 | gb\|AAD39335.1\|Putative |
| | | | | | | | Aldo/keto reductase |
| | | | | | | | [Arabidopsis thaliana] |
| 67 | 260 | 8 | PHE0004184_PMON92565 | 0 | 100 | 7270846 | emb\|CAB80527.1\|multiubiquitin |
| | | | | | | | chain binding protein |
| | | | | | | | (MBP1) [Arabidopsis |
| | | | | | | | thaliana] |
| 68 | 261 | 8 | PHE0004185_PMON92802 | 0 | 100 | 28460683 | ref\|NP_182075.1\| |
| | | | | | | | cytochrome P450, putative |
| | | | | | | | [Arabidopsis thaliana] |
| 69 | 262 | 8 | PHE0004188_PMON92803 | 0 | 100 | 20465485 | ref\|NP_200218.1\|heat |
| | | | | | | | shock transcription factor |
| | | | | | | | family protein [Arabidopsis |
| | | | | | | | thaliana] |
| 70 | 263 | 8 | PHE0004190_PMON92801 | 1.00E−167 | 98 | 7267277 | ref\|NP_192426.1\|basic |
| | | | | | | | helix-loop-helix (bHLH) |
| | | | | | | | family protein [Arabidopsis |
| | | | | | | | thaliana] |
| 71 | 264 | 8 | PHE0004208_PMON92834 | 1.00E−83 | 55 | 21555865 | gb\|AAS09998.1\|MYB |
| | | | | | | | transcription factor |
| | | | | | | | [Arabidopsis thaliana] |
| 72 | 265 | 8 | PHE0004215_PMON92827 | 2.00E−55 | 65 | 7320708 | ref\|NP_195750.1\| |
| | | | | | | | phosphatidylethanolamine- |
| | | | | | | | binding family protein |
| | | | | | | | [Arabidopsis thaliana] |
| 73 | 266 | 8 | PHE0004223_PMON92840 | 0 | 100 | 6523058 | ref\|NP_190239.1\|fasciclin- |
| | | | | | | | like arabinogalactan family |
| | | | | | | | protein [Arabidopsis |
| | | | | | | | thaliana] |
| 74 | 267 | 8 | PHE0004225_PMON94167 | 0 | 99 | 1421730 | gb\|AAC49371.1\|RF2 |
| | | | | | | | gb\|AAG43988.1\|T |
| | | | | | | | cytoplasm male sterility |
| | | | | | | | restorer factor 2 [Zea mays] |
| 75 | 268 | 10 | PHE0004226_PMON95114 | 0 | 100 | 53793208 | dbj\|BAD54414.1\|aldehyde |
| | | | | | | | dehydrogenase ALDH2b |
| | | | | | | | [Oryza sativa (japonica |
| | | | | | | | cultivar-group)] |
| 76 | 269 | 8 | PHE0004227_PMON92605 | 5.00E−26 | 100 | 21314334 | gb\|AAM46894.1\|early |
| | | | | | | | drought induced protein |
| | | | | | | | [Oryza sativa (indica |
| | | | | | | | cultivar-group)] |
| 77 | 270 | 8 | PHE0004229_PMON92867 | 1.00E−24 | 100 | 6320482 | ref\|NP_010562.1\|Small |
| | | | | | | | plasma membrane protein |
| | | | | | | | related to a family of plant |
| | | | | | | | polypeptides that are |
| | | | | | | | overexpressed under high |
| | | | | | | | salt concentration or low |
| | | | | | | | temperature, not essential |
| | | | | | | | for viability, deletion causes |
| | | | | | | | hyperpolarization of the |
| | | | | | | | plasma membrane potential; |
| | | | | | | | Pmp3p [Saccharomyces |
| | | | | | | | cerevisiae] |
| 78 | 271 | 8 | PHE0004233_PMON92843 | 0 | 100 | 19310749 | ref\|NP_188922.1\|heat |
| | | | | | | | shock transcription factor |
| | | | | | | | family protein [Arabidopsis |
| | | | | | | | thaliana] |
| 79 | 272 | 13 | PHE0004237_PMON93673 | 9.00E−85 | 100 | 16338 | emb\|CAA45039.1\|heat |
| | | | | | | | shock protein 17.6-II |
| | | | | | | | [Arabidopsis thaliana] |
| 80 | 273 | 8 | PHE0004243_PMON92621 | 3.00E−72 | 82 | 30409461 | dbj\|BAC76332.1\|HAP3 |
| | | | | | | | [Oryza sativa (japonica |
| | | | | | | | cultivar-group)] |
| 81 | 274 | 8 | PHE0004244_PMON92858 | 1.00E−159 | 96 | 15321716 | gb\|AAK95562.1\|leafy |
| | | | | | | | cotyledon1 [Zea mays] |
| 82 | 275 | 8 | PHE0004245_PMON93813 | 1.00E−131 | 100 | 50509850 | dbj\|BAD32022.1\|putative |
| | | | | | | | transcription factor [Oryza |
| | | | | | | | sativa (japonica cultivar- |
| | | | | | | | group)] |
| 83 | 276 | 8 | PHE0004248_PMON94672 | 1.00E−98 | 100 | 34907184 | ref\|NP_914939.1\|putative |
| | | | | | | | CCAAT-binding |
| | | | | | | | transcription factor subunit |
| | | | | | | | A(CBF-A) [Oryza sativa |
| 84 | 277 | 8 | PHE0004249_PMON95137 | 1.00E−48 | 100 | 12642910 | ref\|NP_850005.1\|expressed |
| | | | | | | | protein [Arabidopsis |
| | | | | | | | thaliana] |
| 85 | 278 | 8 | PHE0004250_PMON92881 | 5.00E−78 | 100 | 30409463 | dbj\|BAC76333.1\|HAP3 |
| | | | | | | | [Oryza sativa (japonica |
| | | | | | | | cultivar-group)] |
| 86 | 279 | 8 | PHE0004252_PMON92606 | 1.00E−173 | 100 | 18481620 | gb\|AAL73485.1\|repressor |
| | | | | | | | protein [Oryza sativa] |
| 87 | 280 | 8 | PHE0004253_PMON92874 | 1.00E−143 | 100 | 18481626 | gb\|AAL73488.1\|repressor |
| | | | | | | | protein [Zea mays] |
| 88 | 281 | 14 | PHE0004258_PMON93385 | 0 | 100 | 1871189 | gb\|AAB63549.1\|putative |
| | | | | | | | protein kinase [Arabidopsis |
| | | | | | | | thaliana] |
| 89 | 282 | 8 | PHE0004258_PMON93806 | 0 | 100 | 1871189 | gb\|AAB63549.1\|putative |
| | | | | | | | protein kinase [Arabidopsis |
| | | | | | | | thaliana] |
| 90 | 283 | 14 | PHE0004259_PMON93384 | 0 | 100 | 9755654 | ref\|NP_197112.1\|expressed |
| | | | | | | | protein [Arabidopsis |
| | | | | | | | thaliana] |
| 91 | 284 | 8 | PHE0004260_PMON92854 | 1.00E−48 | 100 | 12642910 | ref\|NP_850005.1\|expressed |
| | | | | | | | protein [Arabidopsis |
| | | | | | | | thaliana] |
| 92 | 285 | 14 | PHE0004261_PMON93389 | 1.00E−170 | 100 | 7270230 | ref\|NP_195009.1\|protein |
| | | | | | | | kinase, putative |
| | | | | | | | [Arabidopsis thaliana] |
| 93 | 286 | 8 | PHE0004261_PMON93655 | 1.00E−170 | 100 | 7270230 | ref\|NP_195009.1\|protein |
| | | | | | | | kinase, putative |
| | | | | | | | [Arabidopsis thaliana] |
| 94 | 287 | 8 | PHE0004262_PMON92862 | 0 | 100 | 42570809 | ref\|NP_973478.1\|protein |
| | | | | | | | kinase, putative |
| | | | | | | | [Arabidopsis thaliana] |
| 95 | 288 | 14 | PHE0004262_PMON93360 | 0 | 100 | 42570809 | ref\|NP_973478.1\|protein |
| | | | | | | | kinase, putative |
| | | | | | | | [Arabidopsis thaliana] |
| 96 | 289 | 8 | PHE0004264_PMON92845 | 3.00E−95 | 100 | 21554624 | ref\|NP_201267.1\| |
| | | | | | | | invertase/pectin |
| | | | | | | | methylesterase inhibitor |
| | | | | | | | family protein [Arabidopsis |
| | | | | | | | thaliana] |
| 97 | 290 | 14 | PHE0004264_PMON93354 | 3.00E−95 | 100 | 21554624 | ref\|NP_201267.1\| |
| | | | | | | | invertase/pectin |
| | | | | | | | methylesterase inhibitor |
| | | | | | | | family protein [Arabidopsis |
| | | | | | | | thaliana] |
| 98 | 291 | 8 | PHE0004265_PMON92873 | 0 | 100 | 642305 | ref\|NP_013662.1\| |
| | | | | | | | Hypothetical ORF; |
| | | | | | | | Yml050wp [Saccharomyces |
| | | | | | | | cerevisiae] |
| 99 | 292 | 14 | PHE0004265_PMON93807 | 0 | 100 | 642305 | ref\|NP_013662.1\| |
| | | | | | | | Hypothetical ORF; |
| | | | | | | | Yml050wp [Saccharomyces |
| | | | | | | | cerevisiae] |
| 100 | 293 | 8 | PHE0004266_PMON92877 | 0 | 99 | 23506085 | ref\|NP_567548.1\|pseudo- |
| | | | | | | | response regulator 2 |
| | | | | | | | (APRR2) (TOC2) |
| | | | | | | | [Arabidopsis thaliana] |
| 101 | 294 | 8 | PHE0004284_PMON93857 | 0 | 99 | 18399375 | ref\|NP_566402.1\|U-box |
| | | | | | | | domain-containing protein |
| | | | | | | | [Arabidopsis thaliana] |
| 102 | 295 | 10 | PHE0004285_PMON95136 | 1.00E−161 | 96 | 37542675 | gb\|AAL47207.1\|HAP3-like |
| | | | | | | | transcriptional-activator |
| | | | | | | | [Oryza sativa (indica |
| | | | | | | | cultivar-group)] |
| 103 | 296 | 8 | PHE0004286_PMON93666 | 0 | 99 | 255220 | gb\|AAB23208.1\|isocitrate |
| | | | | | | | lyase, threo-D S-isocitrate |
| | | | | | | | glyoxylate-lyase, IL {EC |
| | | | | | | | 4.1.3.1} [Brassica napus, |
| | | | | | | | seedlings, Peptide, 576 aa] |
| 104 | 297 | 8 | PHE0004287_PMON93344 | 0 | 88 | 50937953 | ref\|XP_478504.1\|putative |
| | | | | | | | isocitrate lyase [Oryza |
| | | | | | | | sativa (japonica cultivar- |
| | | | | | | | group)] |
| 105 | 298 | 2 | PHE0004307_PMON94102 | 1.00E−105 | 62 | 38345397 | emb\|CAE03088.2\|OSJNBa0017B10.3 |
| | | | | | | | [Oryza sativa |
| | | | | | | | (japonica cultivar-group)] |
| 106 | 299 | 14 | PHE0004314_PMON93397 | 9.00E−52 | 54 | 55740645 | gb\|AAV63915.1\|hypothetical |
| | | | | | | | protein At4g03965 |
| | | | | | | | [Arabidopsis thaliana] |
| 107 | 300 | 8 | PHE0004321_PMON93811 | 1.00E−128 | 100 | 18655355 | sp\|O48646\|GPX4_ARATH |
| | | | | | | | Probable phospholipid |
| | | | | | | | hydroperoxide glutathione |
| | | | | | | | peroxidase, mitochondrial |
| | | | | | | | precursor (PHGPx) |
| | | | | | | | (AtGPX1) |
| 108 | 301 | 14 | PHE0004321_PMON93834 | 1.00E−128 | 100 | 18655355 | ref\|NP_192897.2\| |
| | | | | | | | glutathione peroxidase, |
| | | | | | | | putative [Arabidopsis |
| | | | | | | | thaliana] |
| 109 | 302 | 8 | PHE0004325_PMON93818 | 5.00E−78 | 89 | 50906887 | ref\|XP_464932.1\|cytochrome |
| | | | | | | | c biogenesis protein-like |
| | | | | | | | [Oryza sativa (japonica |
| | | | | | | | cultivar-group)] |
| 110 | 303 | 8 | PHE0004335_PMON93850 | 0 | 100 | 28393953 | gb\|AAO42384.1\|putative |
| | | | | | | | major intrinsic protein |
| | | | | | | | [Arabidopsis thaliana] |
| 111 | 304 | 8 | PHE0004336_PMON93858 | 1.00E−146 | 69 | 51964952 | ref\|XP_482812.1\|major |
| | | | | | | | intrinsic protein-like [Oryza |
| | | | | | | | sativa (japonica cultivar- |
| | | | | | | | group)] |
| 112 | 305 | 4 | PHE0004337_PMON93886 | 0 | 62 | 50943587 | ref\|XP_481321.1\|unknown |
| | | | | | | | protein [Oryza sativa |
| | | | | | | | (japonica cultivar-group)] |
| 113 | 306 | 8 | PHE0004348_PMON93810 | 1.00E−32 | 100 | 15644431 | ref\|NP_229483.1\|cold shock |
| | | | | | | | protein [Thermotoga |
| | | | | | | | maritima MSB8] |
| 114 | 307 | 8 | PHE0004349_PMON93812 | 8.00E−33 | 100 | 15644617 | ref\|NP_229670.1\|cold shock |
| | | | | | | | protein [Thermotoga |
| | | | | | | | maritima MSB8] |
| 115 | 308 | 8 | PHE0004350_PMON93826 | 3.00E−31 | 100 | 20808157 | ref\|NP_623328.1\|Cold |
| | | | | | | | shock proteins |
| | | | | | | | [Thermoanaerobacter |
| | | | | | | | tengcongensis MB4] |
| 116 | 309 | 8 | PHE0004351_PMON93821 | 7.00E−32 | 100 | 56419891 | ref\|YP_147209.1\|cold shock |
| | | | | | | | protein [Geobacillus |
| | | | | | | | kaustophilus HTA426] |
| 117 | 310 | 8 | PHE0004352_PMON93824 | 1.00E−27 | 88 | 49611845 | ref\|YP_050486.1\|cold |
| | | | | | | | shock protein [Erwinia |
| | | | | | | | carotovora subsp. |
| | | | | | | | atroseptica SCRI1043] |
| 118 | 311 | 8 | PHE0004383_PMON93816 | 1.00E−34 | 98 | 50899510 | ref\|XP_450543.1\|unknown |
| | | | | | | | protein [Oryza sativa |
| | | | | | | | (japonica cultivar-group)] |
| 119 | 312 | 8 | PHE0004393_PMON94192 | 8.00E−95 | 100 | 42572939 | ref\|NP_974566.1\|calcineurin |
| | | | | | | | B-like protein 1 (CBL1) |
| | | | | | | | [Arabidopsis thaliana] |
| 120 | 313 | 8 | PHE0004395_PMON94145 | 0 | 100 | 30690488 | ref\|NP_849501.1\|phospholipase |
| | | | | | | | D delta/PLD delta |
| | | | | | | | (PLDDELTA) [Arabidopsis |
| | | | | | | | thaliana] |
| 121 | 314 | 8 | PHE0004396_PMON94137 | 0 | 100 | 7270422 | emb\|CAB80188.1\|arginine |
| | | | | | | | decarboxylase SPE2 |
| | | | | | | | [Arabidopsis thaliana] |
| 122 | 315 | 8 | PHE0004417_PMON94190 | 1.00E−170 | 100 | 1230677 | gb\|AAC17191.1\| |
| | | | | | | | spermidine synthase |
| | | | | | | | [Saccharomyces cerevisiae] |
| 123 | 316 | 8 | PHE0004418_PMON94368 | 0 | 100 | 798930 | sp\|P50264\|FMS1_YEAST |
| | | | | | | | Polyamine oxidase FMS1 |
| | | | | | | | (Fenpropimorph resistance |
| | | | | | | | multicopy suppressor 1) |
| 124 | 317 | 8 | PHE0004419_PMON95100 | 0 | 66 | 21281139 | ref\|NP_567276.1\| |
| | | | | | | | amidohydrolase family |
| | | | | | | | protein [Arabidopsis |
| | | | | | | | thaliana] |
| 125 | 318 | 10 | PHE0004421_PMON95120 | 2.00E−53 | 78 | 33321848 | gb\|AAQ06658.1\|apetala2 |
| | | | | | | | domain-containing CBF1- |
| | | | | | | | like protein [Oryza sativa] |
| 126 | 319 | 10 | PHE0004422_PMON95123 | 3.00E−51 | 80 | 25991254 | gb\|AAN76804.1\|DREB-like |
| | | | | | | | protein [Zea mays] |
| 127 | 320 | 8 | PHE0004425_PMON94428 | 7.00E−37 | 98 | 11762134 | gb\|AAG40345.1\|AT5g17460 |
| | | | | | | | [Arabidopsis thaliana] |
| 128 | 321 | 8 | PHE0004431_PMON94398 | 1.00E−159 | 99 | 557818 | ref\|NP_012214.1\|Pho85p |
| | | | | | | | cyclin of the Pho80p |
| | | | | | | | subfamily, forms a |
| | | | | | | | functional kinase complex |
| | | | | | | | with Pho85p which |
| | | | | | | | phosphorylates Mmr1p and |
| | | | | | | | is regulated by Pho81p; |
| | | | | | | | involved in glycogen |
| | | | | | | | metabolism, expression is |
| | | | | | | | cell-cycle regulated; Pcl7p |
| | | | | | | | [Saccharomyces cerevisiae] |
| 129 | 322 | 8 | PHE0004432_PMON94112 | 0 | 100 | 15156338 | ref\|NP_354295.1\| |
| | | | | | | | hypothetical protein |
| | | | | | | | AGR_C_2368 |
| | | | | | | | [Agrobacterium |
| | | | | | | | tumefaciens str. C58] |
| 130 | 323 | 8 | PHE0004472_PMON94115 | 1.00E−128 | 100 | 16323494 | ref\|NP_187978.1\|seven in |
| | | | | | | | absentia (SINA) family |
| | | | | | | | protein [Arabidopsis |
| | | | | | | | thaliana] |
| 131 | 324 | 14 | PHE0004472_PMON94126 | 1.00E−128 | 100 | 16323494 | ref\|NP_187978.1\|seven in |
| | | | | | | | absentia (SINA) family |
| | | | | | | | protein [Arabidopsis |
| | | | | | | | thaliana] |
| 132 | 325 | 14 | PHE0004488_PMON95609 | 1.00E−123 | 100 | 21554344 | ref\|NP_198627.1\|ASF1- |
| | | | | | | | like anti-silencing family |
| | | | | | | | protein [Arabidopsis |
| | | | | | | | thaliana] |
| 133 | 326 | 14 | PHE0004491_PMON95628 | 3.00E−12 | 45 | 14916641 | dbj\|BAB19648.1\| |
| | | | | | | | preprophytosulfokine |
| | | | | | | | [Oryza sativa] |
| 134 | 327 | 14 | PHE0004492_PMON95614 | 0 | 100 | 22331730 | ref\|NP_190653.2\|phototropic- |
| | | | | | | | responsive NPH3 family |
| | | | | | | | protein [Arabidopsis |
| | | | | | | | thaliana] |
| 135 | 328 | 10 | PHE0004545_PMON95117 | 1.00E−106 | 100 | 28973235 | ref\|NP_173200.1\| |
| | | | | | | | ribosomal protein L14 |
| | | | | | | | family protein [Arabidopsis |
| | | | | | | | thaliana] |
| 136 | 329 | 8 | PHE0004574_PMON94433 | 0 | 100 | 16329404 | ref\|NP_440132.1\|transaldolase |
| | | | | | | | [Synechocystis sp. PCC |
| | | | | | | | 6803] |
| 137 | 330 | 14 | PHE0004606_PMON95627 | 0 | 100 | 130709 | pir\|\|S29317 phosphoprotein |
| | | | | | | | phosphatase (EC 3.1.3.16) 1 - |
| | | | | | | | maize gb\|AAA33545.1\| |
| | | | | | | | protein phosphatase-1 |
| 138 | 331 | 8 | PHE0004620_PMON94189 | 1.00E−101 | 57 | 56421275 | ref\|YP_148593.1\|6- |
| | | | | | | | phosphofructokinase |
| | | | | | | | (phosphofructokinase) |
| | | | | | | | (phosphohexokinase) |
| | | | | | | | [Geobacillus kaustophilus |
| | | | | | | | HTA426] |
| 139 | 332 | 14 | PHE0004620_PMON94442 | 1.00E−101 | 57 | 56421275 | ref\|YP_148593.1\|6- |
| | | | | | | | phosphofructokinase |
| | | | | | | | (phosphofructokinase) |
| | | | | | | | (phosphohexokinase) |
| | | | | | | | [Geobacillus kaustophilus |
| | | | | | | | HTA426] |
| 140 | 333 | 14 | PHE0004622_PMON95621 | 0 | 100 | 10177836 | ref\|NP_974942.1\|F-box |
| | | | | | | | family protein [Arabidopsis |
| | | | | | | | thaliana] |
| 141 | 334 | 8 | PHE0004626_PMON95101 | 0 | 88 | 50942161 | ref\|XP_480608.1\|putative |
| | | | | | | | gamma-aminobutyrate |
| | | | | | | | transaminase subunit |
| | | | | | | | precursor isozyme 3 [Oryza |
| | | | | | | | sativa (japonica cultivar- |
| | | | | | | | group)] |
| 142 | 335 | 8 | PHE0004630_PMON94367 | 0 | 100 | 7270516 | emb\|CAB80281.1\|NAD+ |
| | | | | | | | dependent isocitrate |
| | | | | | | | dehydrogenase-like protein |
| | | | | | | | [Arabidopsis thaliana] |
| 143 | 336 | 3 | PHE0004634_PMON94385 | 1.00E−102 | 100 | 61656127 | ref\|NP_176491.1\|AP2 |
| | | | | | | | domain-containing |
| | | | | | | | transcription factor, putative |
| | | | | | | | [Arabidopsis thaliana] |
| 144 | 337 | 2 | PHE0004640_PMON95066 | 0 | 73 | 34913436 | ref\|NP_918065.1\|putative |
| | | | | | | | fatty acid condensing |
| | | | | | | | enzyme CUT1 [Oryza |
| | | | | | | | sativa (japonica cultivar- |
| | | | | | | | group)] |
| 145 | 338 | 8 | PHE0004645_PMON94655 | 1.00E−136 | 100 | 18411867 | ref\|NP_565174.1\|14-3-3 |
| | | | | | | | protein GF14 pi (GRF13) |
| | | | | | | | [Arabidopsis thaliana] |
| 146 | 339 | 14 | PHE0004645_PMON94685 | 1.00E−136 | 100 | 18411867 | ref\|NP_565174.1\|14-3-3 |
| | | | | | | | protein GF14 pi (GRF13) |
| | | | | | | | [Arabidopsis thaliana] |
| 147 | 340 | 8 | PHE0004647_PMON94651 | 1.00E−117 | 100 | 21554066 | pir\|\|T02447 hypothetical |
| | | | | | | | protein At2g46000 |
| | | | | | | | Arabidopsis thaliana |
| 148 | 341 | 14 | PHE0004647_PMON94688 | 1.00E−117 | 100 | 21554066 | gb\|AAM63147.1\|unknown |
| | | | | | | | [Arabidopsis thaliana] |
| 149 | 342 | 14 | PHE0004650_PMON94686 | 1.00E−112 | 100 | 67633514 | gb\|AAY78681.1\|putative E3 |
| | | | | | | | ubiquitin ligase SCF |
| | | | | | | | complex subunit |
| | | | | | | | SKP1/ASK1 [Arabidopsis |
| | | | | | | | thaliana] |
| 150 | 343 | 8 | PHE0004652_PMON94657 | 1.00E−138 | 100 | 38603872 | dbj\|BAD43212.1\|putative |
| | | | | | | | glutamate/aspartate-binding |
| | | | | | | | peptide [Arabidopsis |
| | | | | | | | thaliana] |
| 151 | 344 | 14 | PHE0004652_PMON94687 | 1.00E−138 | 100 | 38603872 | dbj\|BAD43212.1\|putative |
| | | | | | | | glutamate/aspartate-binding |
| | | | | | | | peptide [Arabidopsis |
| | | | | | | | thaliana] |
| 152 | 345 | 8 | PHE0004687_PMON94669 | 7.00E−61 | 91 | 21592528 | ref\|NP_568396.1\|ring-box |
| | | | | | | | protein-related [Arabidopsis |
| | | | | | | | thaliana] |
| 153 | 346 | 10 | PHE0004689_PMON95131 | 0 | 100 | 7268004 | emb\|CAB78344.1\|serine/threonine- |
| | | | | | | | specific protein |
| | | | | | | | kinase MHK [Arabidopsis |
| | | | | | | | thaliana] |
| 154 | 347 | 10 | PHE0004691_PMON95129 | 0 | 100 | 51978966 | emb\|CAB61629.1\| |
| | | | | | | | spermidine synthase 1 |
| | | | | | | | [Oryza sativa] |
| 155 | 348 | 14 | PHE0004719_PMON94698 | 1.00E−147 | 100 | 28416631 | ref\|NP_564556.1\|zinc |
| | | | | | | | finger (C3HC4-type RING |
| | | | | | | | finger) family protein |
| | | | | | | | [Arabidopsis thaliana] |
| 156 | 349 | 8 | PHE0004719_PMON95089 | 1.00E−147 | 100 | 28416631 | ref\|NP_564556.1\|zinc |
| | | | | | | | finger (C3HC4-type RING |
| | | | | | | | finger) family protein |
| | | | | | | | [Arabidopsis thaliana] |
| 157 | 350 | 8 | PHE0004734_PMON94667 | 1.00E−87 | 100 | 5080771 | ref\|NP_172848.1\| |
| | | | | | | | eukaryotic translation |
| | | | | | | | initiation factor 5A-1/eIF- |
| | | | | | | | 5A 1 [Arabidopsis thaliana] |
| 158 | 351 | 10 | PHE0004735_PMON95116 | 9.00E−88 | 100 | 21592652 | ref\|NP_177100.1\| |
| | | | | | | | eukaryotic translation |
| | | | | | | | initiation factor 5A, putative/ |
| | | | | | | | eIF-5A, putative |
| | | | | | | | [Arabidopsis thaliana] |
| 159 | 352 | 8 | PHE0004739_PMON95110 | 1.00E−109 | 100 | 6562282 | emb\|CAB62652.1\|rac-like |
| | | | | | | | GTP binding protein |
| | | | | | | | Arac11 [Arabidopsis |
| | | | | | | | thaliana] |
| 160 | 353 | 8 | PHE0004753_PMON95105 | 0 | 100 | 6684442 | ref\|NP_178062.1\| |
| | | | | | | | succinate-semialdehyde |
| | | | | | | | dehydrogenase (SSADH1) |
| | | | | | | | [Arabidopsis thaliana] |
| 161 | 354 | 8 | PHE0004759_PMON95109 | 0 | 100 | 29824301 | ref\|NP_849582.1\|expressed |
| | | | | | | | protein [Arabidopsis |
| | | | | | | | thaliana] |
| 162 | 355 | 10 | PHE0004770_PMON95122 | 1.00E−32 | 92 | 51038072 | gb\|AAT93875.1\|unknown |
| | | | | | | | protein [Oryza sativa |
| | | | | | | | (japonica cultivar-group)] |
| 163 | 356 | 10 | PHE0004772_PMON95132 | 6.00E−36 | 33 | 9758946 | ref\|NP_200265.1\| |
| | | | | | | | expressed protein |
| | | | | | | | [Arabidopsis thaliana] |
| 164 | 357 | 10 | PHE0004774_PMON95147 | 6.00E−52 | 66 | 50909195 | ref\|XP_466086.1\|putative |
| | | | | | | | multiple stress-responsive |
| | | | | | | | zinc-finger protein [Oryza |
| | | | | | | | sativa (japonica cultivar- |
| | | | | | | | group)] |
| 165 | 358 | 10 | PHE0004777_PMON95118 | 2.00E−64 | 100 | 26452894 | ref\|NP_180514.1\|DNA- |
| | | | | | | | directed RNA polymerase |
| | | | | | | | I(A) and III(C) 14 kDa |
| | | | | | | | subunit (RPAC14) |
| | | | | | | | [Arabidopsis thaliana] |
| 166 | 359 | 14 | PHE0004785_PMON95057 | 1.00E−145 | 84 | 34484312 | sp\|Q6UNT2\|RL5_CUCSA |
| | | | | | | | 60S ribosomal protein L5 |
| 167 | 360 | 10 | PHE0004786_PMON95604 | 0 | 100 | 7267537 | ref\|NP_192634.1\| |
| | | | | | | | phosphate-responsive |
| | | | | | | | protein, putative (EXO) |
| | | | | | | | [Arabidopsis thaliana] |
| 168 | 361 | 8 | PHE0004788_PMON95092 | 0 | 84 | 31126776 | ref\|XP_506910.1\| |
| | | | | | | | PREDICTED |
| | | | | | | | OSJNBa0057G07.4 gene |
| | | | | | | | product [Oryza sativa |
| | | | | | | | (japonica cultivar-group)] |
| 169 | 362 | 10 | PHE0004799_PMON95602 | 0 | 99 | 9843858 | emb\|CAC03739.1\|flavin |
| | | | | | | | containing polyamine |
| | | | | | | | oxidase [Zea mays] |
| 170 | 363 | 10 | PHE0004841_PMON95636 | 0 | 100 | 50909767 | ref\|XP_466372.1\|cryptochrome |
| | | | | | | | 1a [Oryza sativa |
| | | | | | | | (japonica cultivar-group)] |
| 171 | 364 | 10 | PHE0004844_PMON95637 | 3.00E−53 | 100 | 62734659 | gb\|AAX96768.1\|expressed |
| | | | | | | | protein [Oryza sativa |
| | | | | | | | (japonica cultivar-group)] |
| 172 | 365 | 14 | PHE0004854_PMON95611 | 1.00E−163 | 100 | 21592743 | ref\|NP_199265.1\|ribose 5- |
| | | | | | | | phosphate isomerase-related |
| | | | | | | | [Arabidopsis thaliana] |
| 173 | 366 | 10 | PHE0004862_PMON95601 | 5.00E−56 | 100 | 34902924 | dbj\|BAB07982.1\|FPF1 |
| | | | | | | | protein-like [Oryza sativa |
| | | | | | | | (japonica cultivar-group)] |
| 174 | 367 | 10 | PHE0004888_PMON95603 | 0 | 100 | 32405610 | ref\|XP_323418.1\|hypothetical |
| | | | | | | | protein [Neurospora |
| | | | | | | | crassa] |
| 175 | 368 | n/a | At1g21790.1 | 1.00E−168 | 100 | 21593249 | ref\|NP_564152.1\|expressed |
| | | | | | | | protein [Arabidopsis |
| | | | | | | | thaliana] |
| 176 | 369 | n/a | ERD4 | 0 | 100 | 17104683 | ref\|NP_564354.1\|early- |
| | | | | | | | responsive to dehydration |
| | | | | | | | stress protein (ERD4) |
| | | | | | | | [Arabidopsis thaliana] |
| 177 | 370 | n/a | At1g78070.2 | 0 | 100 | 42572153 | ref\|NP_974167.1\|WD-40 |
| | | | | | | | repeat family protein |
| | | | | | | | [Arabidopsis thaliana] |
| 178 | 371 | n/a | At1g78070.1 | 1.00E−128 | 100 | 18411805 | ref\|NP_565168.1\|WD-40 |
| | | | | | | | repeat family protein |
| | | | | | | | [Arabidopsis thaliana] |
| 179 | 372 | n/a | At3g47340.1 | 0 | 100 | 5541701 | ref\|NP_190318.1\| |
| | | | | | | | asparagine synthetase 1 |
| | | | | | | | [glutamine-hydrolyzing]/ |
| | | | | | | | glutamine-dependent |
| | | | | | | | asparagine synthetase 1 |
| | | | | | | | (ASN1) [Arabidopsis |
| | | | | | | | thaliana] |
| 180 | 373 | n/a | At3g47340.3 | 0 | 100 | 30692853 | ref\|NP_850664.1\|asparagine |
| | | | | | | | synthetase 1 [glutamine- |
| | | | | | | | hydrolyzing]/glutamine- |
| | | | | | | | dependent asparagine |
| | | | | | | | synthetase 1 (ASN1) |
| | | | | | | | [Arabidopsis thaliana] |
| 181 | 374 | n/a | At3g47340.2 | 0 | 100 | 30692849 | ref\|NP_850663.1\|asparagine |
| | | | | | | | synthetase 1 [glutamine- |
| | | | | | | | hydrolyzing]/glutamine- |
| | | | | | | | dependent asparagine |
| | | | | | | | synthetase 1 (ASN1) |
| | | | | | | | [Arabidopsis thaliana] |
| 182 | 375 | n/a | At5g13170.1 | 1.00E−163 | 100 | 9955561 | ref\|NP_196821.1\|nodulin |
| | | | | | | | MtN3 family protein |
| | | | | | | | [Arabidopsis thaliana] |
| 183 | 376 | n/a | At2g19900.1 | 0 | 100 | 28059162 | ref\|NP_179580.1\|malate |
| | | | | | | | oxidoreductase, putative |
| | | | | | | | [Arabidopsis thaliana] |
| 184 | 377 | n/a | At5g09480.1 | 8.00E−80 | 100 | 9955535 | ref\|NP_196510.1\| |
| | | | | | | | hydroxyproline-rich |
| | | | | | | | glycoprotein family protein |
| | | | | | | | [Arabidopsis thaliana] |
| 185 | 378 | n/a | At5g09530.1 | 0 | 100 | 7671436 | ref\|NP_196515.1\| |
| | | | | | | | hydroxyproline-rich |
| | | | | | | | glycoprotein family protein |
| | | | | | | | [Arabidopsis thaliana] |
| 186 | 379 | n/a | At2g42790.1 | 0 | 100 | 21700853 | ref\|NP_181807.1\|citrate |
| | | | | | | | synthase, glyoxysomal, |
| | | | | | | | putative [Arabidopsis |
| | | | | | | | thaliana] |
| 187 | 380 | n/a | At3g56200.1 | 0 | 100 | 7572918 | ref\|NP_191179.1\|amino |
| | | | | | | | acid transporter family |
| | | | | | | | protein [Arabidopsis |
| | | | | | | | thaliana] |
| 188 | 381 | n/a | At5g01520.1 | 1.00E−141 | 100 | 7327811 | ref\|NP_195772.1\|zinc |
| | | | | | | | finger (C3HC4-type RING |
| | | | | | | | finger) family protein |
| | | | | | | | [Arabidopsis thaliana] |
| 189 | 382 | n/a | At5g01520.2 | 2.00E−97 | 100 | 7327811 | ref\|NP_195772.1\|zinc |
| | | | | | | | finger (C3HC4-type RING |
| | | | | | | | finger) family protein |
| | | | | | | | [Arabidopsis thaliana] |
| 190 | 383 | n/a | At5g66780.1 | 2.00E−66 | 100 | 9758128 | d ref\|NP_201479.1\| |
| | | | | | | | expressed protein |
| | | | | | | | [Arabidopsis thaliana] |
| 191 | 384 | n/a | At5g59320.1 | 1.00E−61 | 100 | 24417292 | ref\|NP_568905.1\|lipid |
| | | | | | | | transfer protein 3 (LTP3) |
| | | | | | | | [Arabidopsis thaliana] |
| 192 | 385 | n/a | AtHB7 | 1.00E−151 | 100 | 20259175 | gb\|AAM14303.1\|putative |
| | | | | | | | homeodomain transcription |
| | | | | | | | factor protein ATHB-7 |
| | | | | | | | [Arabidopsis thaliana] |
| 193 | 386 | n/a | RD20 | 1.00E−136 | 100 | 20465881 | ref\|NP_180896.1\|calcium- |
| | | | | | | | binding RD20 protein |
| | | | | | | | (RD20) [Arabidopsis |
| | | | | | | | thaliana] |

Table 1 provides a list of protein encoding DNA (“genes”) that are useful as recombinant DNA for production of transgenic plants with enhanced agronomic trait, the elements of Table 1 are described by reference to:
“NUC SEQ ID NO” which is a SEQ ID NO for a DNA sequence in the Sequence Listing.
“PEP SEQ ID NO” which is a SEQ ID NO for an amino acid sequence in the Sequence Listing.
GENE ID” which is an arbitrary name for the recombinant DNA.
“Base Vector” which is a reference to the identifying number in Table 5 of base vectors used for transformation of the recombinant DNA. Construction of plant transformation constructs is illustrated in Example 1.
“annotation” refers to a description of the top hit protein obtained from an amino acid sequence query of each PEP SEQ ID NO to GenBank database of the National Center for Biotechnology Information (NCBI). Identifier is the GenBank ID number for the informative BLAST hit with -FT.

### Screening Methods for Transgenic Plants with Enhanced Agronomic Trait

[0088] Many transgenic events which survive to fertile transgenic plants that produce seeds and progeny plants will not exhibit an enhanced agronomic trait. Screening is necessary to identify the transgenic plant of this invention. Transgenic plants having enhanced agronomic traits are identified from populations of plants transformed as described herein by evaluating the trait in a variety of assays to detect an enhanced agronomic trait. These assays also may take many forms, including but not limited to, analyses to detect changes in the chemical composition, biomass, physiological properties, morphology of the plant. Changes in chemical compositions such as nutritional composition of grain can be detected by analysis of the seed composition and content of protein, free amino acids, oil, free fatty acids, starch or tocopherols. Changes in biomass characteristics can be made on greenhouse or field grown plants and can include plant height, stem diameter, root and shoot dry weights; and, for corn plants, ear length and diameter. Changes in physiological properties can be identified by evaluating responses to stress conditions, e.g., assays using imposed stress conditions such as water deficit, nitrogen deficiency, cold growing conditions, pathogen or insect attack or light deficiency, or increased plant density. Changes in morphology can be measured by visual observation of tendency of a transformed plant with an enhanced agronomic trait to also appear to be a normal plant as compared to changes toward bushy, taller, thicker, narrower leaves, striped leaves, knotted trait, chlorosis, albino, anthocyanin production, or altered tassels, ears or roots. Other screening properties include days to pollen shed, days to silking, leaf extension rate, chlorophyll content, leaf temperature, stand, seedling vigor, internode length, plant height, leaf number, leaf area, tillering, brace roots, stay green, stalk lodging, root lodging, plant health, barreness/prolificacy, green snap, and pest resistance. In addition, phenotypic characteristics of harvested grain may be evaluated, including number of kernels per row on the ear, number of rows of kernels on the ear, kernel abortion, kernel weight, kernel size, kernel density and physical grain quality.

[0089] Although preferred seeds for transgenic plants with enhanced agronomic traits of this invention are corn and soybean plants, other seeds are for cotton, canola, wheat, sunflower, sorghum, alfalfa, barley, millet, rice, tobacco, fruit and vegetable crops, and turfgrass

### EXAMPLE

### Example 1

### Plant Expression Constructs

[0090] This example illustrates the construction of plasmids for transferring recombinant DNA into plant cells which can be regenerated into transgenic plants of this invention.

[0091] Primers for PCR amplification of protein coding nucleotides of recombinant DNA are designed at or near the start and stop codons of the coding sequence, in order to eliminate most of the 5′ and 3′ untranslated regions. Each recombinant DNA coding for a protein identified in Table 1 is amplified by PCR prior to insertion into the insertion site of one of the base vectors as referenced in Table 5.

[0092] A. Corn Transformation Constructs

[0093] With reference to Table 2 and FIG. 1, pMON82060 illustrates the elements of base vector 1 for corn transformation. Other base vectors for corn transformation were also constructed by replacing the gene of interest plant expression cassette elements of base vector 1, i.e. the promoter, leader, intron and terminator elements, with the elements listed in Table 5 to provide base vectors 2-12 for corn transformation. Each of the protein encoding DNA as identified in Table 1 is placed in the gene of interest plant expression cassette before the termination sequence in each of the base vector 1-12.

TABLE 2
pMON82060

| | | | Coordinates |
|---|---|---|---|
| | | | of SEQ ID |
| function | name | annotation | NO: 12603 |
| Agro | B-AGRtu.right border | Agro right border sequence, essential for | 5235-5591 |
| transformation | | transfer of T-DNA. | |
| Gene of | P-Os.Act1 | Promoter from the rice actin gene act1. | 5609-7009 |
| interest plant | L-Os.Act1 | Leader (first exon) from the rice actin 1 | |
| expression | | gene. | |
| cassette | I-Os.Act1 | First intron and flanking UTR exon | |
| | | sequences from the rice actin 1 gene | |
| | T-St.Pis4 | The 3′ non-translated region of the | 7084-8026 |
| | | potato proteinase inhibitor II gene which | |
| | | functions to direct polyadenylation of the | |
| | | mRNA | |
| Plant | P-CaMV.35S | CaMV 35S promoter | 8075-8398 |
| selectable | L-CaMV.35S | 5′ UTR from the 35S RNA of CaMV | |
| marker | CR-Ec.nptII-Tn5 | nptII selectable marker that confers | 8432-9226 |
| expression | | resistance to neomycin and kanamycin | |
| cassette | T-AGRtu.nos | A 3′ non-translated region of the | 9255-9507 |
| | | nopaline synthase gene of | |
| | | Agrobacterium tumefaciens Ti plasmid | |
| | | which functions to direct | |
| | | polyadenylation of the mRNA . . . | |
| Agro | B-AGRtu.left border | Agro left border sequence, essential for | 39-480 |
| transformation | | transfer of T-DNA. | |
| Maintenance | OR-Ec.oriV-RK2 | The vegetative origin of replication from | 567-963 |
| in E. coli | | plasmid RK2. | |
| | CR-Ec.rop | Coding region for repressor of primer | 2472-2663 |
| | | from the ColE1 plasmid. Expression of | |
| | | this gene product interferes with primer | |
| | | binding at the origin of replication, | |
| | | keeping plasmid copy number low. | |
| | OR-Ec.ori-ColE1 | The minimal origin of replication from | 3091-3679 |
| | | the E. coli plasmid ColE1. | |
| | P-Ec.aadA-SPC/STR | promoter for Tn7 adenylyltransferase | 4210-4251 |
| | | (AAD(3″)) | |
| | CR-Ec.aadA- | Coding region for Tn7 | 4252-5040 |
| | SPC/STR | adenylyltransferase (AAD(3″)) | |
| | | conferring spectinomycin and | |
| | | streptomycin resistance. | |
| | T-Ec.aadA-SPC/STR | 3′ UTR from the Tn7 adenylyltransferase | 5041-5098 |
| | | (AAD(3″)) gene of E. coli. | |

[0094] Elements of a corn transformation plasmid, pMON17730, for expressing a Leuconostoc mesenteroides sucrose phosphorylase are illustrated in Table 3. This construct was assembled using the technology known in the art.

TABLE 3
pMON17730

| | | | Coordinates of |
|---|---|---|---|
| function | name | annotation | SEQ ID NO: 12606 |
| Agro | B-AGRtu.right | Agro right border sequence, essential | 4862-5218 |
| transformation | border | for transfer of T-DNA. | |
| Gene of | P-Zm.Brittle2 | Promoter from thecorn brittle 2 gene | |
| interest plant | L-Zm.Brittle2 | 5′ untranslated region from the corn | |
| expression | | brittel 2 gene. | |
| cassette | L-Ta.Lhcb1 | wheat CAB leader | |
| | I-Os.Act1 | First intron and flanking UTR exon | 5276-6375 |
| | | sequences from the rice actin 1 gene | |
| | CR-Lm.sp11 | PHE0004028_PMON17730 SPL | 6385-7857 |
| | | coding region | |
| | T-Ta.Hsp17 | The 3′ non-translated region of the | 7870-8079 |
| | | wheat low molecular weight heat | |
| | | shock protein gene | |
| Plant | P-CaMV.35S | CaMV 35S promoter | 8226-8518 |
| selectable | CR-Ec.nptII- | nptII selectable marker that confers | 8583-9377 |
| marker | Tn5 | resistance to neomycin and | |
| expression | | kanamycin | |
| cassette | T-AGRtu.nos | A 3′ non-translated region of the | 9409-9661 |
| | | nopaline synthase gene of | |
| | | Agrobacterium tumefaciens Ti | |
| | | plasmid which functions to direct | |
| | | polyadenylation of the mRNA . . . | |
| Agro | B-AGRtu.left | Agro left border sequence, essential | 10003-10026 |
| transformation | border | for transfer of T-DNA. | |
| Maintenance | OR-Ec.oriV- | The vegetative origin of replication | 194-590 |
| in E. coli | RK2 | from plasmid RK2. | |
| | CR-Ec.rop | Coding region for repressor of | 2099-2290 |
| | | primer from the ColE1 plasmid. | |
| | | Expression of this gene product | |
| | | interferes with primer binding at the | |
| | | origin of replication, keeping | |
| | | plasmid copy number low. | |
| | OR-Ec.ori- | The minimal origin of replication | 2718-3306 |
| | ColE1 | from the E. coli plasmid ColE1. | |
| | P-Ec.aadA- | promoter for Tn7 | 3837-3878 |
| | SPC/STR | adenylyltransferase (AAD(3″)) | |
| | CR-Ec.aadA- | Coding region for Tn7 | 3879-4667 |
| | SPC/STR | adenylyltransferase (AAD(3″)) | |
| | | conferring spectinomycin and | |
| | | streptomycin resistance. | |
| | T-Ec.aadA- | 3′ UTR from the Tn7 | 4668-4725 |
| | SPC/STR | adenylyltransferase (AAD(3″)) gene | |
| | | of E. coli. | |

[0095] B. Soybean Transformation Constructs

[0096] Plasmids for use in transformation of soybean are also prepared. Elements of an exemplary common expression vector plasmid pMON82053 are shown in Table 4 and FIG. 2. Other base vectors for soybean transformation were also constructed by replacing the gene of interest plant expression cassette elements of base vector 13, i.e. the promoter, leader, intron and terminator elements, with the elements listed in Table 5 to provide base vectors 13-15 for soybean transformation. Each of the protein encoding DNA as identified in Table 1 is placed in the gene of interest plant expression cassette before the termination sequence in each of the base vector 13-15.

TABLE 4
pMON82053

| | | | Coordinates of SEQ ID |
|---|---|---|---|
| function | name | annotation | NO: 12604 |
| Agro | B-AGRtu.left border | Agro left border | 6144-6585 |
| transforamtion | | sequence, essential for | |
| | | transfer of T-DNA. | |
| Plant | P-At.Act7 | Promoter from the | 6624-7861 |
| selectable | | arabidopsis actin 7 gene | |
| marker | L-At.Act7 | 5′UTR of Arabidopsis | |
| expression | | Act7 gene | |
| cassette | I-At.Act7 | Intron from the | |
| | | Arabidopsis actin 7 gene | |
| | TS-At.ShkG-CTP2 | Transit peptide region of | 7864-8091 |
| | | Arabidopsis EPSPS | |
| | CR-AGRtu.aroA- | Synthetic CP4 coding | 8092-9459 |
| | CP4.nno_At | region with dicot | |
| | | preferred codon usage. | |
| | T-AGRtu.nos | A 3′ non-translated region | 9466-9718 |
| | | of the nopaline synthase | |
| | | gene of Agrobacterium | |
| | | tumefaciens Ti plasmid | |
| | | which functions to direct | |
| | | polyadenylation of the | |
| | | mRNA. | |
| Gene of | P-CaMV.35S-enh | Promoter for 35S RNA | 1-613 |
| interest | | from CaMV containing a | |
| expression | | duplication of the −90 to −350 | |
| cassette | | region. | |
| | T-Gb.E6-3b | 3′ untranslated region | 688-1002 |
| | | from the fiber protein E6 | |
| | | gene of sea-island cotton; | |
| Agro | B-AGRtu.right border | Agro right border | 1033-1389 |
| transformation | | sequence, essential for | |
| | | transfer of T-DNA. | |
| Maintenance | OR-Ec.oriV-RK2 | The vegetative origin of | 5661-6057 |
| in E. coli | | replication from plasmid | |
| | | RK2. | |
| | CR-Ec.rop | Coding region for | 3961-4152 |
| | | repressor of primer from | |
| | | the ColE1 plasmid. | |
| | | Expression of this gene | |
| | | product interferes with | |
| | | primer binding at the | |
| | | origin of replication, | |
| | | keeping plasmid copy | |
| | | number low. | |
| | OR-Ec.ori-ColE1 | The minimal origin of | 2945-3533 |
| | | replication from the E. coli | |
| | | plasmid ColE1. | |
| | P-Ec.aadA-SPC/STR | romoter for Tn7 | 2373-2414 |
| | | adenylyltransferase | |
| | | (AAD(3″)) | |
| | CR-Ec.aadA- | Coding region for Tn7 | 1584-2372 |
| | SPC/STR | adenylyltransferase | |
| | | (AAD(3″)) conferring | |
| | | spectinomycin and | |
| | | streptomycin resistance. | |
| | T-Ec.aadA-SPC/STR | 3′ UTR from the Tn7 | 1526-1583 |
| | | adenylyltransferase | |
| | | (AAD(3″)) gene of E. coli. | |

TABLE 5
Compositions of expression cassettes for gene of
interest in plant transformation base vectors

| | | SEQ | | SEQ | | SEQ | | SEQ |
|---|---|---|---|---|---|---|---|---|
| | | ID | | ID | | ID | | ID |
| | promoter | NO | leader | NO | intron | NO | terminator | NO |
| Base | | | | | | | | |
| vector | | | | | | | | |
| for corn | | | | | | | | |
| 1 | P-Os.Act1 | 12581 | L-Os.Act1 | 12592 | I-Os.Act1 | 12596 | T-St.Pis4 | 12598 |
| 2 | P-Hv.Per1 | 12582 | L-Hv.Per1 | 12593 | I-Zm.DnaK | 12597 | T-St.Pis4 | 12598 |
| 3 | P-Zm.RAB17 | 12591 | NONE | / | I-Zm.DnaK | 12597 | T-St.Pis4 | 12598 |
| 4 | P-Zm.NAS2 | 12584 | L-Zm.NAS2 | 12595 | I-Zm.DnaK | 12597 | T-St.Pis4 | 12598 |
| 5 | P-Zm.PPDK | 12585 | L-Zm.PPDK | 12588 | I-Zm.DnaK | 12597 | T-St.Pis4 | 12598 |
| 6 | P-Os.GT1 | 12586 | NONE | / | I-Zm.DnaK | 12597 | T-St.Pis4 | 12598 |
| 7 | P-Zm.PPDK | 12587 | L-Zm.PPDK | 12588 | I-Zm.DnaK | 12597 | T-St.Pis4 | 12600 |
| 8 | P-Os.Act1 | 12581 | L-Os.Act1 | 12592 | I-Os.Act1 | 12597 | T-St.Pis4 | 12598 |
| 9 | P-Zm.PPDK | 12587 | L-Zm.PPDK | 12588 | I-Zm.DnaK | 12597 | T-St.Pis4 | 12600 |
| 10 | P-Os.Act1 | 12581 | L-Os.Act1 | 12592 | I-Os.Act1 | 12596 | T-St.Pis4 | 12598 |
| 11 | P-Zm.SzeinC1 | 12589 | L- | 12601 | I-Zm.DnaK | 12597 | T-St.Pis4 | 12598 |
| | | | Zm.SzeinC1 | | | | | |
| 12 | P-Zm.NAS2 | 12584 | L-Zm.NAS2 | 12595 | I-Zm.DnaK | 12597 | T-St.Pis4 | 12598 |
| Base | | | | | | | | |
| vector | | | | | | | | |
| for | | | | | | | | |
| Soybean | | | | | | | | |
| 13 | P-CaMV.35S- | 12590 | NONE | / | NONE | / | T-Gb.E6 | 12599 |
| | enh | | | | | | | |
| 14 | P-CaMV.35S- | 12590 | NONE | / | NONE | / | T-Gb.E6 | 12599 |
| | enh | | | | | | | |
| 15 | P-Gm.Sphas 1 | 12583 | L- | 12594 | NONE | / | T-Gb.E6 | 12599 |
| | | | Gm.Sphas1 | | | | | |

DNA constructs with some recombinant DNA of interest, e.g., SEQ ID NO: 72, also contain a chloroplast transit peptide adjacent to the recombinant DNA.

[0097] C. Cotton Transformation Vector

[0098] Plasmids for use in transformation of cotton are also prepared. Elements of an exemplary common expression vector plasmid pMON99053 are shown in Table 6 below and FIG. 3. Primers for PCR amplification of protein coding nucleotides of recombinant DNA are designed at or near the start and stop codons of the coding sequence, in order to eliminate most of the 5′ and 3′ untranslated regions. Each recombinant DNA coding for a protein identified in Table 1 is amplified by PCR prior to insertion into the insertion site within the gene of interest expression cassette of pMON99053

TABLE 6

| | | | Coordinates of |
|---|---|---|---|
| | | | SEQ ID NO: |
| function | name | annotation | 12606 |
| Agro | B-AGRtu.right border | Agro right border sequence, | 11364-11720 |
| transforamtion | | essential for transfer of T-DNA. | |
| Gene of interest | Exp-CaMV.35S- | Enhanced version of the 35S RNA | 7794-8497 |
| expression | enh + ph.DnaK | promoter from CaMV plus the | |
| cassette | | petunia hsp70 5′ untranslated region | |
| | T-Ps.RbcS2-E9 | The 3′ non-translated region of the | 67-699 |
| | | pea RbcS2 gene which functions to | |
| | | direct polyadenylation of the mRNA. | |
| Plant selectable | Exp-CaMV.35S | Promoter from the rice actin 1 gene | 730-1053 |
| marker | CR-Ec.nptII-Tn5 | first exon of the rice actin 1 gene | 1087-1881 |
| expression | T-AGRtu.nos | A 3′ non-translated region of the | 1913-2165 |
| cassette | | nopaline synthase gene of | |
| | | Agrobacterium tumefaciens Ti | |
| | | plasmid which functions to direct | |
| | | polyadenylation of the mRNA. | |
| Agro | B-AGRtu.left border | Agro left border sequence, essential | 2211-2652 |
| transformation | | for transfer of T-DNA. | |
| Maintenance in | OR-Ec.oriV-RK2 | The vegetative origin of replication | 2739-3135 |
| E. coli | | from plasmid RK2. | |
| | CR-Ec.rop | Coding region for repressor of primer | 4644-4835 |
| | | from the ColE1 plasmid. Expression | |
| | | of this gene product interferes with | |
| | | primer binding at the origin of | |
| | | replication, keeping plasmid copy | |
| | | number low. | |
| | OR-Ec.ori-ColE1 | The minimal origin of replication | 5263-5851 |
| | | from the E. coli plasmid ColE1. | |
| | P-Ec.aadA-SPC/STR | romoter for Tn7 adenylyltransferase | 6382-6423 |
| | | (AAD(3″)) | |
| | CR-Ec.aadA-SPC/STR | Coding region for Tn7 | 6424-7212 |
| | | adenylyltransferase (AAD(3″)) | |
| | | conferring spectinomycin and | |
| | | streptomycin resistance. | |
| | T-Ec.aadA-SPC/STR | 3′ UTR from the Tn7 | 7213-7270 |
| | | adenylyltransferase (AAD(3″)) gene | |
| | | of E. coli. | |

### Example 2

### Corn Plant Transformation

[0099] This example illustrates the production and identification of transgenic corn cells in seed of transgenic corn plants having an enhanced agronomic trait, i.e. enhanced nitrogen use efficiency, increased yield, enhanced water use efficiency, enhanced tolerance to cold and/or improved seed compositions as compared to control plants. Transgenic corn cells are prepared with recombinant DNA expressing each of the protein encoding DNAs listed in Table 1 by Agrobacterium-mediated transformation using the corn transformation vectors 1-12 prepared as disclosed in Example 1. Corn transformation is effected using methods disclosed in U.S. Patent Application Publication 2004/0344075 A1 where corn embryos are inoculated and co-cultured with the Agrobacterium tumefaciens strain ABI and the corn transformation vector. To regenerate transgenic corn plants the transgenic callus resulting from transformation is placed on media to initiate shoot development in plantlets which are transferred to potting soil for initial growth in a growth chamber followed by a mist bench before transplanting to pots where plants are grown to maturity. The plants are self fertilized and seed is harvested for screening as seed, seedlings or progeny R2 plants or hybrids, e.g., for yield trials in the screens indicated above.

[0100] Many transgenic events which survive to fertile transgenic plants that produce seeds and progeny plants do not exhibit an enhanced agronomic trait. The transgenic plants and seeds having the transgenic cells of this invention which have recombinant DNA imparting the enhanced agronomic traits are identified by screening for nitrogen use efficiency, yield, water use efficiency, cold tolerance and improved seed composition.

### Example 3

### Soybean Plant Transformation

[0101] This example illustrates the production and identification of transgenic soybean cells in seed of transgenic soybean plants having an enhanced agronomic trait, i.e. enhanced nitrogen use efficiency, increased yield, enhanced water use efficiency, enhanced tolerance to cold and/or improved seed compositions as compared to control plants. Transgenic soybean cells are prepared with recombinant DNA expressing each of the protein encoding DNAs listed in Table 1 by Agrobacterium-mediated transformation using the soybean transformation vectors 13-15 prepared as disclosed in Example 1. Soybean transformation is effected using methods disclosed in U.S. Pat. No. 6,384,301 where soybean meristem explants are wounded then inoculated and co-cultured with the soybean transformation vector, then transferred to selection media for 6-8 weeks to allow selection and growth of transgenic shoots.

[0102] The transformation is repeated for each of the protein encoding DNAs identified in Table 1 in one of the base vectors 13-15.

[0103] Transgenic shoots producing roots are transferred to the greenhouse and potted in soil. Many transgenic events which survive to fertile transgenic plants that produce seeds and progeny plants do not exhibit an enhanced agronomic trait. The transgenic plants and seeds having the transgenic cells of this invention which have recombinant DNA imparting the enhanced agronomic traits are identified by screening for nitrogen use efficiency, yield, water use efficiency, cold tolerance and improved seed composition.

### Example 4

### Cotton Transgenic Plants with Enhanced Agronomic Traits

[0104] Cotton transformation is performed as generally described in WO0036911 and in U.S. Pat. No. 5,846,797. Transgenic cotton plants containing the recombinant DNA having a sequence of SEQ ID NO: 1 through SEQ ID NO: 193 are obtained by transforming with the cotton transformation vector identified in Example 1.

[0105] Progeny transgenic plants are selected from a population of transgenic cotton events under specified growing conditions and are compared with control cotton plants. Control cotton plants are substantially the same cotton genotype but without the recombinant DNA, for example, either a parental cotton plant of the same genotype that was not transformed with the identical recombinant DNA or a negative isoline of the transformed plant. Additionally, a commercial cotton cultivar adapted to the geographical region and cultivation conditions, i.e. cotton variety ST474, cotton variety FM 958, and cotton variety Siokra L-23, are used to compare the relative performance of the transgenic cotton plants containing the recombinant DNA. The specified culture conditions are growing a first set of transgenic and control plants under “wet” conditions, i.e. irrigated in the range of 85 to 100 percent of evapotranspiration to provide leaf water potential of −14 to −18 bars, and growing a second set of transgenic and control plants under “dry” conditions, i.e. irrigated in the range of 40 to 60 percent of evapotranspiration to provide a leaf water potential of −21 to −25 bars. Pest control, such as weed and insect control is applied equally to both wet and dry treatments as needed. Data gathered during the trial includes weather records throughout the growing season including detailed records of rainfall; soil characterization information; any herbicide or insecticide applications; any gross agronomic differences observed such as leaf morphology, branching habit, leaf color, time to flowering, and fruiting pattern; plant height at various points during the trial; stand density; node and fruit number including node above white flower and node above crack boll measurements; and visual wilt scoring. Cotton boll samples are taken and analyzed for lint fraction and fiber quality. The cotton is harvested at the normal harvest timeframe for the trial area. Enhanced water use efficiency is indicated by increased yield, improved relative water content, enhanced leaf water potential, increased biomass, enhanced leaf extension rates, and improved fiber parameters.

[0106] Cotton plants with the transgenic cells by this invention are identified from among the transgenic cotton plants by agronomic trait screening as having increased yield and enhanced water use efficiency.

### Example 5

### Homolog Identification

[0107] This example illustrates the identification of homologs of proteins encoded by the DNA identified in Table 1 which is used to provide transgenic seed and plants having enhanced agronomic traits. From the sequence of the homologs, homologous DNA sequence can be identified for preparing additional transgenic seeds and plants of this invention with enhanced agronomic traits.

[0108] An “All Protein Database” was constructed of known protein sequences using a proprietary sequence database and the National Center for Biotechnology Information (NCBI) non-redundant amino acid database (nr.aa). For each organism from which a polynucleotide sequence provided herein was obtained, an “Organism Protein Database” was constructed of known protein sequences of the organism; it is a subset of the All Protein Database based on the NCBI taxonomy ID for the organism.

[0109] The All Protein Database was queried using amino acid sequences provided herein as SEQ ID NO: 194 through SEQ ID NO: 386 using NCBI “blastp” program with E-value cutoff of 1e-8. Up to 1000 top hits were kept, and separated by organism names. For each organism other than that of the query sequence, a list was kept for hits from the query organism itself with a more significant E-value than the best hit of the organism. The list contains likely duplicated genes of the polynucleotides provided herein, and is referred to as the Core List. Another list was kept for all the hits from each organism, sorted by E-value, and referred to as the Hit List.

[0110] The Organism Protein Database was queried using polypeptide sequences provided herein as SEQ ID NO: 194 through SEQ ID NO: 386 using NCBI “blastp” program with E-value cutoff of 1e-4. Up to 1000 top hits were kept. A BLAST searchable database was constructed based on these hits, and is referred to as “SubDB”. SubDB was queried with each sequence in the Hit List using NCBI “blastp” program with E-value cutoff of 1e-8. The hit with the best E-value was compared with the Core List from the corresponding organism. The hit is deemed a likely ortholog if it belongs to the Core List, otherwise it is deemed not a likely ortholog and there is no further search of sequences in the Hit List for the same organism. Homologs from a large number of distinct organisms were identified and are reported by amino acid sequences of SEQ ID NO: 387 through SEQ ID NO: 12580. These relationships of proteins of SEQ ID NO: 194 through 386 and homologs of SEQ ID NO: 387 through 12580 is identified in Table 7. The source organism for each homolog is found in the Sequence Listing.

TABLE 7

| | |
|---|---|
| SEQ ID NO: | homolog SEQ ID NOs |

| | | | | | | | | | | | | | |
|---|---|---|---|---|---|---|---|---|---|---|---|---|---|
| 196: | 3549 | 1976 | 8970 | 12287 | 11799 | 758 | 6083 | 9821 | 8256 | 7610 | 7869 | 4091 | |
| | 1111 | 1113 | 8630 | 7054 | 10917 | 3094 | 6712 | 9080 | 2702 | 2718 | 1130 | 1131 | |
| | 5382 | 6582 | 559 | 2169 | 1134 | 1132 | 1139 | 2295 | 11615 | 8090 | 2133 | 5063 | |
| | 5000 | 10336 | 12279 | 3828 | 7214 | 1485 | 2156 | 2232 | 2229 | 2242 | 2209 | 2203 | |
| | 2177 | 2207 | 2160 | 2151 | 11166 | 3220 | | | | | | | |
| 197: | 3549 | 1976 | 4850 | 8970 | 12287 | 11799 | 758 | 6083 | 9821 | 4946 | 11935 | 8256 | |
| | 7610 | 7869 | 1841 | 9456 | 4091 | 1113 | 1111 | 8630 | 7054 | 7880 | 6876 | 6237 | |
| | 6712 | 9080 | 2702 | 2718 | 1130 | 1131 | 5382 | 6582 | 559 | 2169 | 1134 | 1132 | |
| | 1139 | 2295 | 11615 | 8090 | 5063 | 5000 | 10336 | 12279 | 3828 | 7214 | 1485 | 2156 | |
| | 2232 | 2229 | 2242 | 2209 | 2203 | 2207 | 2177 | 2160 | 2151 | 7622 | 1377 | 6970 | |
| | 6143 | | | | | | | | | | | | |
| 198: | 3549 | 1976 | 2210 | 6154 | 1028 | 1769 | 758 | 12325 | 9821 | 2973 | 4946 | 11935 | |
| | 8256 | 7610 | 5387 | 5384 | 5361 | 10434 | 8983 | 5051 | 4091 | 2766 | 6248 | 1113 | |
| | 1111 | 8630 | 9080 | 2702 | 2718 | 1131 | 1130 | 5382 | 7052 | 6582 | 1134 | 1132 | |
| | 1139 | 11615 | 2295 | 8090 | 6572 | 4803 | 1970 | 8113 | 3883 | 9565 | 1707 | 517 | |
| | 12372 | 11514 | 5441 | 5421 | 3828 | 7214 | 1485 | 1097 | | | | | |
| 199: | 3549 | 4850 | 2210 | 8970 | 12287 | 2360 | 11500 | 11799 | 6912 | 1028 | 6154 | 758 | |
| | 5783 | 6083 | 9552 | 12325 | 9821 | 2973 | 4946 | 8256 | 7610 | 5387 | 5361 | 5384 | |
| | 5300 | 10434 | 8983 | 5051 | 1111 | 1113 | 8630 | 9080 | 2702 | 2718 | 1130 | 1131 | |
| | 5382 | 7052 | 6582 | 559 | 2169 | 1134 | 1132 | 1139 | 8090 | 6572 | 11350 | 7138 | |
| | 1730 | 10762 | 11345 | 527 | 8679 | 5063 | 5000 | 2879 | 517 | 7986 | 12372 | 11514 | |
| | 10336 | 6955 | 12279 | 5441 | 5421 | 3828 | 7214 | 1485 | 2229 | 2207 | 2242 | 2232 | |
| | 2209 | 2203 | 2156 | 2160 | 2151 | 5328 | 8248 | | | | | | |
| 200: | 11500 | 5617 | 8150 | 3321 | 2181 | 4364 | 1769 | 1028 | 5122 | 11328 | 6042 | 2711 | |
| | 1760 | 4874 | 4098 | 1914 | 11853 | 7334 | 6504 | 10624 | 2638 | 11705 | 7913 | 12171 | |
| | 12198 | 10430 | 12189 | 12219 | 10404 | 10432 | 10408 | 6957 | 8282 | 6184 | 11935 | 580 | |
| | 10470 | 1940 | 11039 | 8629 | 1096 | 742 | 12505 | 5801 | 11671 | 4006 | 12473 | 6778 | |
| | 2607 | 10849 | 6279 | 7500 | 2657 | 5584 | 8059 | 2622 | 2043 | 3269 | 10363 | 6186 | |
| | 9631 | 9243 | 11098 | 1168 | 6690 | 8584 | 10577 | 687 | 2977 | 9804 | 9337 | 6306 | |
| | 9118 | 4356 | 10225 | 9740 | 6652 | 5251 | 12514 | 7463 | 706 | 3048 | 3780 | 1925 | |
| | 11765 | 9803 | 10824 | 3004 | 5275 | 8642 | 1664 | 12173 | 4049 | 2031 | 11681 | 8980 | |
| | 2339 | 9172 | 11955 | 10576 | 9333 | 10482 | 813 | 5656 | 4628 | 10843 | 2352 | 5484 | |
| | 2856 | 4313 | 2877 | 1633 | 11143 | 6066 | 7722 | 7746 | 10941 | 11741 | 2941 | 2745 | |
| | 11364 | 7638 | 7884 | 1328 | 5606 | 6580 | 11262 | 7483 | 8156 | 412 | 453 | 7288 | |
| | 6842 | 1286 | 7896 | 9734 | 6570 | 10595 | 8863 | 1246 | 7112 | 12464 | 1373 | 3779 | |
| | 2705 | 5044 | 4017 | 5712 | 4619 | 3539 | 1029 | 1610 | 5976 | 4964 | 11724 | 9037 | |
| | 8989 | 1126 | 4073 | 395 | 10344 | 5428 | 4845 | 1611 | 10484 | 4496 | 3517 | 3418 | |
| | 10294 | 2427 | 3442 | 9747 | 5534 | 9571 | 1125 | 9720 | 9319 | 12346 | 3417 | 1588 | |
| | 2779 | 4611 | 5312 | 10179 | 6867 | 3049 | 3051 | 9900 | 1265 | 9463 | 4576 | 764 | |
| | 6024 | 432 | 8921 | 11379 | 2141 | 1755 | 9498 | 7395 | 8179 | 7462 | 7279 | 8729 | |
| | 9676 | 11351 | 1758 | 10907 | 4995 | 1205 | 608 | 12100 | 8331 | 8341 | 10326 | 6852 | |
| | 11947 | 6597 | 2475 | 6407 | 8077 | 10788 | 11815 | 5269 | 489 | 9317 | 5574 | 11240 | |
| | 11821 | 11485 | 2868 | 9753 | 676 | 11223 | 1924 | 8045 | 1689 | 12035 | 11980 | 5906 | |
| | 7805 | 6728 | 5177 | 1711 | 1715 | 5050 | 1601 | 11242 | 1010 | 11286 | 7814 | 7152 | |
| | 3730 | 5888 | 615 | 11078 | 9681 | 2883 | 8522 | 8210 | 4450 | 11632 | 7573 | 6031 | |
| | 2713 | 3861 | 9480 | 5307 | 7874 | 2048 | 5136 | 8625 | 2168 | 4580 | 10634 | 5772 | |
| | 5082 | 8731 | 2678 | 9311 | 10561 | 7803 | 4408 | 6227 | 12026 | 11234 | 7247 | 5578 | |
| | 9683 | 3999 | 2953 | 2193 | 3370 | 11542 | 10711 | 6403 | 4207 | 11251 | 8447 | 6805 | |
| | 727 | 951 | 737 | 9090 | 1828 | 1928 | 2277 | 986 | 739 7044 | 10025 | 7409 | | |
| | 9449 | 944 | 8427 | 10911 | 3965 | 1299 | 5294 | 6332 | 5145 | 9418 | 6150 | 9008 | |
| | 1004 | 3831 | 5157 | 6968 | 11922 | 7392 | 9855 | 5061 | 5448 | 6857 | 2354 | 2879 | |
| | 620 | 7986 | 10208 | 4520 | 9003 | 8015 | 525 | 8013 | 11884 | 10726 | 12493 | 9260 | |
| | 8508 | 5693 | 1450 | 4258 | | | | | | | | | |
| 201: | 7470 | 10842 | 5790 | 6772 | 1530 | 9966 | 9973 | 10368 | 655 | 4677 | 4157 | 1015 | |
| | 9967 | 9732 | 1621 | 1702 | 2553 | 11599 | 9342 | 3724 | 6613 | 4462 | 2681 | 4577 | |
| | 3827 | 8039 | 2557 | 8538 | 9605 | 12321 | 3228 | 2139 | 9255 | 11428 | 3022 | 5404 | |
| | 9564 | 12166 | 8047 | 11255 | 11888 | 1492 | 5870 | 4250 | 5541 | 2481 | 8585 | 5674 | |
| | 2062 | 2021 | 6718 | 2810 | 4015 | 12306 | 8941 | 3135 | 7850 | 7009 | 4247 | 5760 | |
| | 643 | 2512 | 2422 | 8709 | 5661 | 2437 | 11487 | 8706 | 3703 | 6811 | 5006 | 6000 | |
| | 2290 | 11973 | 8426 | 2912 | 6498 | 10642 | 8257 | 5362 | 1189 | 996 | 1740 | 10904 | |
| | 5778 | 4372 | 12095 | 1616 | 9708 | 1598 | 4525 | 7513 | 1934 | 10939 | 9044 | 7273 | |
| | 6105 | 6950 | 12122 | 5936 | 2802 | 3711 | 8640 | 6644 | 9842 | 6994 | 2587 | 7510 | |
| | 8609 | 1877 | 5408 | 8009 | 9943 | 8475 | 4333 | 8476 | 2651 | 5379 | 11144 | | |
| 202: | 7477 | 1676 | 4448 | 2400 | 6045 | 6940 | 8526 | 9923 | 11995 | 8913 | 10513 | 634 | |
| | 7969 | 11746 | 6446 | 4371 | 1018 | 4026 | 10874 | 11604 | 5505 | 9219 | 4140 | 11205 | |
| | 12025 | 3605 | 1669 | 1987 | 2822 | 2279 | 10124 | 11930 | 4546 | 3504 | 1950 | 7696 | |
| | 1604 | 4492 | 710 | 11737 | 3171 | 8574 | 11646 | 9030 | 765 | | | | |
| 203: | 9581 | 1789 | 9205 | 10127 | 507 | 7859 | 5085 | 10794 | 2201 | 5072 | 1384 | 7541 | |
| | 12225 | 5253 | 4000 | 8561 | 1469 | 3834 | 12504 | 9837 | 7137 | 4670 | 9143 | 1972 | |
| | 230 | 11807 | 7457 | 3867 | 12503 | 9644 | 10286 | 686 | 3416 | 8708 | 913 | 9391 | |
| | 9343 | 1949 | 971 | 11938 | 12315 | 7511 | 9076 | 8346 | 3455 | 1790 | 6685 | 11054 | |
| | 10989 | 4775 | 9544 | 2197 | 3225 | 1198 | 7996 | 9715 | 6751 | 11217 | 3189 | 10361 | |
| | 3589 | 2768 | 4753 | 393 | 7426 | 9423 | 2744 | 1339 | 10139 | 2332 | 8771 | 3079 | |
| | 4312 | 7098 | 11256 | 1681 | 642 | 411 | 5179 | 11964 | 5793 | 8376 | 2386 | 9500 | |
| | 2401 | 5669 | 10501 | 1939 | 11311 | 4977 | 7401 | 8266 | 12472 | 480 | 10947 | 12116 | |
| | 539 | 7591 | 1020 | 1493 | 9017 | 2513 | 3100 | 4405 | 5679 | 3373 | 3795 | 10805 | |
| | 11445 | 10653 | 5898 | 5556 | 12139 | 12448 | 8448 | 5245 | 12533 | 10039 | 1324 | 2498 | |
| | 9955 | 6104 | 5516 | | | | | | | | | | |
| 204: | 3474 | 7088 | 4085 | 10331 | 6972 | 7065 | 2023 | 10909 | 5915 | 5913 | 6491 | 5970 | |
| | 6936 | 5920 | 5919 | 5966 | 5944 | 5738 | 5968 | 6663 | 1233 | 5947 | 2258 | 10694 | |
| | 9592 | 4692 | 12344 | 11227 | 6753 | 8618 | | | | | | | |
| 205: | 9144 | 6127 | 6445 | 4401 | 3645 | 9756 | 5274 | 8302 | 1548 | 9875 | 9979 | 1922 | |
| | 1941 | 9100 | 7274 | 12121 | 11051 | 11528 | 9523 | 7830 | 3543 | 6760 | 1979 | 3997 | |
| | 9779 | 9635 | 4955 | 1818 | 946 | 5201 | 12580 | 8270 | 10531 | 415 | 4910 | 1802 | |
| | 2256 | 2979 | 7899 | 3139 | 3777 | 10332 | 10536 | 4842 | 8280 | 9000 | 1327 | 10950 | |
| | 8576 | 513 | 4263 | 6884 | 8684 | 3877 | 7243 | 7262 | 6420 | 1424 | 2680 | 10546 | |
| | 9965 | 11711 | 6656 | 1164 | 1160 | 5248 | 4812 | 11605 | 3598 | 8386 | 12446 | 3922 | |
| | 10305 | 467 | 5963 | 9481 | 1998 | 4655 | 4064 | 446 | 6112 | 6111 | 4689 | 3743 | |
| | 449 | 1123 | 11231 | 1143 | 42456 | 471 | 11629 | 6249 | 2152 | 2171 | 6494 | 8636 | |
| | 11953 | 5487 | 7844 | 6164 | 11566 | 1495 | 4623 | 6920 | 3447 | 3181 | 3153 | 1081 | |
| | 11890 | 3476 | 1127 | 1195 | 1192 | 12349 | 3600 | 11090 | 5377 | 8022 | 7160 | 11091 | |
| | 10643 | 7586 | 12247 | 6202 | 6217 | 4617 | 2237 | 2380 | 6219 | 1756 | 7456 | 925 | |
| | 3237 | | | | | | | | | | | | |
| 206: | 5804 | 12016 | 10678 | 10712 | 10735 | 7448 | 9024 | 10738 | 10708 | 12014 | 10638 | 7423 | |
| | 7421 | 7417 | 309 | 10586 | 10603 | 10589 | 10584 | 7444 | 10644 | 7446 | 5047 | 10645 | |
| | 10646 | 12280 | 207 | 9710 | 2096 | 11839 | 9709 | 1612 | 8993 | 10037 | 6780 | 11613 | |
| | 9034 | 306 | 307 | 2004 | 11103 | 8166 | 6931 | 7311 | 6922 | 8933 | 10494 | 3783 | |
| | 308 | 11857 | 12034 | 3781 | 916 | 6666 | 9745 | 9140 | 6285 | 12449 | 10356 | 9452 | |
| | 4275 | 12246 | 9728 | 9405 | 2987 | 7223 | 2067 | 3934 | 8138 | 11430 | 9052 | 12318 | |
| | 6252 | 410 | 2407 | 6792 | 3564 | 2073 | 4786 | 11326 | 9877 | 3397 | 310 | 11058 | |
| | 9105 | 8474 | 12047 | 6860 | 7715 | 860 | 8446 | 4050 | 6973 | 6725 | 9408 | 4088 | |
| | 3842 | 1902 | 4332 | 2342 | 1701 | 10402 | 11870 | 4672 | 3986 | 10725 | 12181 | 1973 | |
| | 3950 | 9992 | 4578 | 10224 | 862 | 7045 | 11785 | 4789 | 5465 | 8088 | 3553 | 10189 | |
| | 9964 | 2793 | 6677 | 10001 | 3375 | 4200 | 10391 | 1361 | 1234 | 10741 | 10641 | 10683 | |
| | 11712 | 10743 | 10575 | 10581 | 4747 | | | | | | | | |
| 207: | 12016 | 7448 | 12014 | 7423 | 309 | 5047 | 9710 | 2096 | 11839 | 1612 | 8993 | 10037 | |
| | 6780 | 9034 | 307 | 306 | 2004 | 6931 | 6922 | 8933 | 10494 | 308 | 11857 | 3781 | |
| | 916 | 9745 | 6666 | 9140 | 6285 | 12449 | 9452 | 8035 | 10356 | 11492 | 12021 | 4443 | |
| | 10064 | 8344 | 2067 | 3934 | 4275 | 8138 | 12246 | 9405 | 2987 | 9728 | 11430 | 9052 | |
| | 12318 | 6252 | 7223 | 410 | 6792 | 3564 | 2073 | 4786 | 9877 | 3397 | 310 | 11058 | |
| | 8474 | 9105 | 11870 | 12047 | 4672 | 3986 | 6860 | 7715 | 860 | 2342 | 8446 | 1701 | |
| | 4050 | 10402 | 6973 | 9408 | 4088 | 3842 | 4332 | 6725 | 1902 | 10725 | 12181 | 6779 | |
| | 1973 | 2823 | 9849 | 10154 | 862 | 7045 | 11785 | 4789 | 5465 | 10224 | 8088 | 4578 | |
| | 10189 | 3553 | 2793 | 6677 | 10001 | 3375 | 4200 | 10391 | 3950 | 9992 | 1361 | 1468 | |
| | 9964 | 7410 | 2176 | 10741 | 11712 | 10743 | 10575 | 10581 | 206 | | | | |
| 208: | 8564 | 10720 | 7580 | 12251 | 9922 | 5975 | 8617 | 4257 | 645 | 3210 | 4615 | 8228 | |
| | 747 | 1408 | 10412 | 3357 | 4397 | 7547 | 10137 | 3018 | 7289 | 11413 | 1687 | 2058 | |
| | 4738 | 1274 | 12252 | 8769 | 6626 | 4708 | 2751 | 1442 | 2843 | 10230 | 6198 | 10814 | |
| | 2304 | 9207 | | | | | | | | | | | |
| 209: | 9386 | 8213 | 8184 | 6094 | 8240 | 8242 | 8209 | 8211 | 5327 | 9254 | 10652 | 9428 | |
| | 11965 | 11812 | 11814 | 9275 | 9274 | 6208 | 8173 | 7971 | 9276 | 9278 | 9280 | 9297 | |
| | 9253 | 8100 | 9330 | 9303 | 9305 | 4986 | 4730 | 10770 | 11755 | 3994 | 5070 | 7569 | |
| | 5734 | 3989 | 3985 | 9531 | 9214 | 9429 | 9365 | 11108 | 6372 | 5373 | 2117 | 3351 | |
| | 12521 | 4075 | 1896 | 3535 | 10982 | 4340 | 2371 | 858 | 3813 | 10602 | 5493 | 5548 | |
| | 10627 | 5552 | 2460 | 4278 | 1787 | 3297 | 2964 | 2965 | 2962 | 3630 | 9434 | 3625 | |
| | 4592 | 10087 | 8272 | 3870 | 4415 | 8484 | 5940 | 10629 | 10623 | 10636 | 10174 | 10667 | |
| | 5553 | 10670 | 10671 | 2562 | 2568 | 8456 | 5226 | 5200 | 11493 | 7169 | 9374 | 7962 | |
| | 11722 | 5462 | 2866 | 10150 | 10170 | 10153 | 4425 | 1856 | 4727 | 9772 | 6514 | 2550 | |
| | 9367 | 4482 | 9458 | 9455 | 2869 | 2162 | 9300 | 9302 | 10632 | 3616 | | | |
| 210: | 2857 | 3612 | 6601 | 1183 | 1181 | 1182 | 6604 | 1159 | 10118 | 10806 | 11819 | 11745 | |
| | 6639 | 11715 | 7049 | 10888 | 10024 | 7122 | 8076 | 8876 | 8903 | 1266 | 10535 | 624 | |
| | 7532 | 4011 | 5266 | 6168 | 6326 | 11178 | 2641 | 2461 | 6646 | 8758 | 7990 | 9318 | |
| | 8505 | 7393 | 2727 | 6008 | 3940 | 9115 | 5137 | 9096 | 1148 | 1363 | 10193 | 9377 | |
| | 9250 | 5445 | 11200 | 11273 | 11276 | | | | | | | | |
| 211: | 11176 | 8570 | 11245 | 10274 | 6081 | 7181 | 6450 | 4624 | 9320 6129 | 984 | 7196 | | |
| | 7388 | 2804 | 542 | 11805 | | | | | | | | | |
| 212: | 23933 | 4071 | 1789 8124 | 2340 | 3714 | 1395 | 1433 | 12303 | 375 | 2814 | 6364 | | |
| | 9438 | 3292 | 12390 | 2984 | 6746 | 9695 | 675 | 2101 | 3618 | 12081 | 6128 | 1892 | |
| | 3448 | 9864 | 6152 | 2844 | 7381 | 4291 | 4973 | 5447 | 10140 | 11877 | 8566 | 7624 | |
| | 6472 | 10665 | 2089 | 9925 | 938 | 8536 | 6156 | 10608 | 11433 | 5967 | 1511 | 11974 | |
| | 12573 | 4734 | 11501 | 5076 | 12428 | 8275 | 2769 | 4402 | 11854 | | | | |
| 213: | 4784 | 5997 | 2399 | 6338 | 3933 | 4092 | 10151 | 2740 | 10610 | | | | |
| 214: | 10855 | 2954 | 6766 | 2958 | 8910 | 12101 | 6783 | 3620 | 7658 | 7785 | 3180 | 9266 | |
| | 9246 | 9247 | 1792 | 8649 | 5777 | 10173 | 10178 | 3461 | 9046 | 5810 | 5806 | 1226 | |
| | 3287 | 12557 | 8375 | 12235 | 8403 | 8384 | 7414 | 5429 | 4396 | 6501 | 8433 | 7094 | |
| | 8413 | 7920 | 5588 | 9853 | 6890 | 6483 | 9273 | 9841 | 683 | 9313 | 6871 | 6899 | |
| | 6877 | 2491 | 4890 | 9129 | 5744 | 9572 | 11085 | 12037 | 11048 | 12113 | 613 | 9424 | |
| | 6574 | 12066 | 7504 | 5863 | 8409 | 4273 | 10572 | 5923 | 1895 | 1893 | 9040 | 3665 | |
| | 5481 | 7755 | 8408 | 924 | 1454 | 12140 | 8378 | 5510 | 5509 | 5513 | 3124 | 3103 | |
| | 11911 | 4141 | 2082 | 2247 | 4630 | 8299 | 6667 | 702 | 8975 | 6801 | 745 | 741 | |
| | 779 | 770 | 772 | 744 | 771 | 11549 | 719 | 7117 | 5565 | 11875 | | | |
| 215: | 11919 | 9154 | 5594 | 10308 | 2827 | 2830 | 3408 | 3403 | 2471 | 5367 | 1120 | 5371 | |
| | 5081 | 4880 | 10931 | 7367 | 6883 | 11808 | 6136 | 2549 | 11638 | 6868 | 8315 | 3118 | |
| | 10508 | 10877 | 650 | 5616 | 4115 | 3026 | 3028 | 9516 | 785 | 9083 | 7596 | 8108 | |
| | 4176 | 6525 | 5765 | 3802 | 1806 | 8081 | 7208 | 8893 | 12007 | 8654 | 9048 | 9072 | |
| | 8575 | 8423 | 6300 | 6409 | 4165 | 6095 | 9477 | 2485 | 10112 | 5117 | 2278 | 2281 | |
| | 2264 | 2284 | 6055 | 2348 | 4251 | 8187 | 10826 | 9660 | 9216 | 2777 | 4403 | 7239 | |
| | 2643 | 782 | 2262 | 8111 | 1799 | 781 | 2696 | 8265 | 821 | 6575 | 9029 | 6259 | |
| | 5907 | 2153 | 9132 | 1008 | 9697 | 11658 | 5996 | 6135 | 3512 | | | | |
| 216: | 1063 | 9995 | 9748 | 8083 | 4921 | 10081 | 2976 | 7153 | 8380 | 1072 | 2845 | 2124 | |
| | 5604 | 2742 | | | | | | | | | | | |
| 217: | 1063 | 9995 | 9748 | 8083 | 4921 | 10081 | 2976 | 7153 | 8380 | 1072 | 2845 | 2124 | |
| | 5604 | 2742 | | | | | | | | | | | |
| 218: | 10265 | 3604 | 11692 | 2087 | 2100 | 2084 | 4972 | 8627 | 4940 | 10555 | 4941 | 652 | |
| | 1430 | 11778 | 7581 | 915 | 1478 | 8934 | 1244 | 9538 | 6106 | 9540 | 6923 | 5854 | |
| | 6892 | 9462 | 3486 | 10996 | 12018 | 9346 | 3284 | 6742 | 8247 | | | | |
| 219: | 5171 | 3451 | 10952 | 6452 | 5333 | 11383 | 12420 | 9816 | 9099 | 11249 | 528 | 11871 | |
| | 11060 | 8935 | 3521 | 3063 | 10253 | 9510 | 10954 | 6303 | 6941 | 523 | 904 | 5364 | |
| | 4534 | 1993 | 9623 | 3245 | 12506 | 8843 | 10612 | 7200 | 2319 | 7201 | 1746 | 9164 | |
| | 1043 | | | | | | | | | | | | |
| 220: | 6376 | 1316 | 5391 | 12526 | 7194 | 2996 | 3154 | 10569 | 11756 | 11824 | 3924 | 9004 | |
| | 5150 | 5993 | 10023 | 5309 | 10233 | 5582 | 9183 | 5649 | 2780 | 11917 | 6719 | 11145 | |
| | 10056 | 2516 | 1372 | 5622 | 7269 | 2665 | 1402 | 5885 | 7636 | 6193 | 3223 | 2719 | |
| | 6657 | 1867 | 7660 | 12334 | 9360 | 5492 | 2710 | 2076 | 8465 | 7571 | 11887 | 2033 | |
| | 8847 | 3260 | 10323 | 11018 | 7553 | 6905 | 5747 | 10773 | 5018 | 9023 | 9420 | 9484 | |
| | 9512 | 8291 | 2650 | 4553 | 2233 | 4983 | 7834 | 11916 | 8565 | 4123 | 1090 | 3981 | |
| | 610 | 2885 | 5427 | 3349 | 649 | 9974 | 10523 | 10337 | 5840 | 8815 | 6996 | 11041 | |
| | 1321 | 11532 | 11331 | 9757 | 6755 | 2327 | 2730 | 5199 | 5280 | 11943 | 3656 | 6297 | |
| | 4570 | 2983 | 6557 | 12145 | 2376 | 7618 | 6924 | 9049 | 10975 | 8678 | 12452 | 7263 | |
| | 2204 | 3741 | 7210 | 7502 | 4325 | 11408 | 1350 | 6089 | 2892 | 8054 | 8643 | 2501 | |
| | 1647 | 11693 | 6378 | 1729 | 6966 | 8734 | 9027 | 8827 | 5647 | 9075 | 7286 | 659 | |
| | 4113 | 6496 | 4454 | 11650 | 4378 | 2224 | 2687 | 1763 | 830 | 3255 | 5001 | 3830 | |
| | 6495 | 3121 | 1757 | 7740 | 8530 | 2770 | 1866 | 459 | 2049 | 4814 | 12517 | 2408 | |
| | 8583 | 6850 | 7550 | 5545 | 2042 | 3709 | 5474 | 11062 | 4761 | 10345 | 7778 | 1449 | |
| | 1562 | 8901 | 4943 | 10916 | 11403 | 6820 | 3167 | 1997 | 7484 | 9833 | 12022 | 8573 | |
| | 5100 | 5639 | 7158 | 8791 | 9723 | 4484 | 10282 | 1334 | 11312 | 11317 | 4294 | 9400 | |
| | 4982 | 7125 | 2655 | 10854 | 9131 | 992 | 5153 | 2528 | 12519 | 12187 | 6818 | 799 | |
| | 861 | 11120 | 11361 | 6634 | 12230 | 10852 | 8817 3105 | 9513 | 8235 | | | | |
| 221: | 6205 | 11358 | 3072 | 2888 | 2907 | 6203 | 2800 | 7221 | 4750 | 3627 | 12485 | 2816 | |
| | 10896 | 4463 | 3774 | 8273 | 5002 | 4122 | 8581 | 8364 | 3273 | 6044 | 6503 | 6451 | |
| | 6887 | 4226 | 5120 | 9987 | 679 | 12019 | 1695 | 939 | 9726 | 8964 | 2326 | 6178 | |
| | 6080 | 8551 12220 | 926 | 10271 | 3458 | 983 | 6773 | 5354 | 551 | 12326 | 1673 | | |
| | 10474 | 7111 | 503 | 3261 | 7427 | 7498 | 5710 | 9522 | 12089 | 8842 | 8147 | 8799 | |
| | 9369 | 2355 | 6063 | 3582 | 3537 | 3557 | 1618 | 2519 | 10121 | 9781 | 10031 | 1438 | |
| | 4529 | 11657 | 7069 | 3979 | 1260 | 8752 | 9515 | 1762 | 10093 | 875 | 12460 | 12052 | |
| | 9166 | 7493 12523 | 10742 | 10451 | 8622 | 8931 | 10210 | 7668 | 3177 | 3657 | 6276 | | |
| | 625 | 6423 | | | | | | | | | | | |
| 222: | 9766 | 2574 | 8653 | 12518 | 6881 | 10011 | 1281 | 4435 | 3555 | 696 | 5489 | 10478 | |
| | 6961 | 6001 | 1591 | 1453 | 10635 | 2267 | 6727 | 12366 | 4551 | 1889 | 1367 | 1388 | |
| | 9264 | 8099 | 5016 | 1033 | 4094 | 12546 | 7145 | 6511 | 1331 | 1524 | 3894 | 1943 | |
| | 8569 | 11313 | 5235 | | | | | | | | | | |
| 223: | 12210 | 2632 | 5689 | 5995 | 9108 | 6848 | 3162 | 5357 | 9825 | 6099 | 9769 | 11406 | |
| | 12011 | 4089 | 11037 | 2154 | 7634 2930 | 6937 | | | | | | | |
| 224: | 11851 | 9599 | 392 | 3514 | 5363 9918 | 7949 | 12550 | 981 | 8255 | 3499 | 2997 | | |
| | 9043 | 6076 | 2056 | 2922 | 11064 | 11131 | 9209 | 5316 | 10222 | 11118 | 1947 | 4743 | |
| 225: | 12336 | 2351 | 3767 | 1826 | | | | | | | | | |
| 226: | 9174 | 12242 | 516 | 9436 | 5692 | 6101 | 8462 | 9960 | 3910 | | | | |
| 227: | 882 | 7014 | 8781 | 8246 | 10705 | 2703 | 8520 | 6497 | 7900 | 6599 | 3575 | 3216 | |
| 228: | 2359 | 5356 | 6318 | 6123 | 588 | 7908 | 6312 | 4748 | 9929 | 6824 | 6509 | | |
| 229: | 9744 | 8168 | 1420 | 6853 | 7687 | 2503 | 7653 | 5252 | 787 | 6057 | 2759 | 8114 | |
| | 9054 | 8122 | 8127 | 4410 | 5238 | 4675 | 7892 | 11484 | 12365 | 11744 | 3437 | 6705 | |
| | 3241 | 11187 | | | | | | | | | | | |
| 230: | 9581 | 9205 | 10794 | 5085 | 2201 | 1384 | 4000 | 8605 | 4670 | 1972 | 10286 | 11576 | |
| | 686 | 913 | 2768 | 203 | 393 | 4753 | 1339 | 2332 | 8771 | 9423 | 7426 | 2744 | |
| | 3079 | 10139 | 4312 | 11256 | 7098 | 642 | 1681 | 411 | 11964 | 5179 | 1324 | 9955 | |
| | 6104 | 5516 | 9644 | 11807 | 7457 | | | | | | | | |
| 231: | 12356 | 4958 | 6943 | 8532 | 8516 | 9081 | 4754 | 8450 | 8451 | 10677 | 4939 | 12575 | |
| | 11787 | 7205 | 4213 | 972 | 3291 | 9604 | 11517 | 7192 | 10860 | 5598 | 12538 | 4035 | |
| | 11116 | 695 | 7007 | 479 | 4154 | 10733 | | | | | | | |
| 232: | 641 | 10835 | 7416 | 7705 | 8597 | 5506 | 5365 | 2998 | 4911 | 1710 | 4507 | 7519 | |
| | 1965 | | | | | | | | | | | | |
| 233: | 7211 | 12486 | 7508 | 11321 | 5086 | 11818 | 8707 | 9321 | 1682 | 4612 | 3885 | 10374 | |
| | 3698 | 2956 | 2709 | 2789 | 9060 | 3654 | 4690 | 9089 | 7726 | 3369 | 8385 | 2927 | |
| | 2192 | 5052 | 11202 | 11758 | 10190 | 5874 | 8038 | 8631 | 537 | 10655 | 4768 | 2120 | |
| | 3687 | 4281 | 11320 | 6521 | 4769 | 7545 | 7786 | 7407 | 12108 | 9206 | 12454 | 2147 | |
| | 7282 | 12432 | 3610 | 8128 | 5956 | 3069 | | | | | | | |
| 234: | 9373 | 9421 | 11561 | 11557 | 12294 | 10301 | 9284 | 6616 | 1308 | 6809 | 3915 | 11093 | |
| | 3919 | 11088 | 11597 | 11298 | 11592 | 6281 | 3917 | 11137 | 1726 | 11130 | 1230 | 3689 | |
| | 4740 | 3725 | 11047 | 2975 | 6172 | 1216 | 3544 | 4142 | 7375 | | 746 | 11962 | 6474 |
| | 12427 | | | | | | | | | | | | |
| 235: | 9373 | 9421 | 11561 | 11557 | 12294 | 10301 | 9284 | 6616 | 1308 | 6809 | 3915 | 11093 | |
| | 3919 | 11088 | 11597 | 11298 | 11592 | 6281 | 3917 | 11137 | 1726 | 11130 | 1230 | 3689 | |
| | 4740 | 3725 | 11047 | 2975 | 6172 | 1216 | 3544 | 4142 | 7375 | 746 | 11962 | 6474 | |
| | 12427 | | | | | | | | | | | | |
| 236: | 444 | 10758 | 1559 | 12502 | 889 | 9874 | 9788 | 7310 | 12020 | 6831 | 7980 | 10109 | |
| | 5949 | 6731 | 11689 | 7825 | 3697 | 1264 | 4393 | 548 | 2268 | 1773 | 3208 | 1147 | |
| | 4029 | 9056 | 1141 | 7469 | 5188 | 10443 | 7314 | 1452 | 1744 | 5383 | | | |
| 237: | 5650 | 5881 | 10697 | 3343 | 2506 | 6706 | 9195 | 3119 | 609 | 11113 | 12263 | 12264 | |
| | 9501 | 8410 | 8925 | 3221 | 7983 | 7956 | 933 | 2361 | 8269 | 9921 | 6336 | 10563 | |
| | 632 | 12541 | 10155 | 10751 | 9511 | 7976 | 6351 | 5482 | 10797 | 4571 | 1776 | 12112 | |
| | 7190 | 1900 | 9324 | 6339 | 7001 | 2317 | 9820 | 7015 | 6384 | 4917 | 11822 | 4227 | |
| | 11377 | 6229 | 10949 | 11498 | 1448 | 8172 | 10908 | 7776 | 6183 | | | | |
| 238: | 3651 | 11823 | 2950 | 1915 | 5176 | 4381 | 8742 | 6316 | 9780 | 3427 | 8319 | 899 | |
| | 4829 | 11372 | 12232 | 6415 | 3788 | 1658 | 9838 | 11020 | 8918 | 7485 | 10102 | 8428 | |
| | 1054 | 2552 | 11363 | 12489 | 9487 | 10566 | 9535 | 11344 | 4210 | 1739 | 5067 | 8368 | |
| | 9789 | 7897 | 2937 | 10388 | 8859 | 10675 | 3146 | 1783 | 2989 | 3471 | 4847 | 919 | |
| | 918 | 5832 | 1172 | 2121 | 5023 | 806 | 11459 | 12478 | 12285 | 11359 | 2683 | 11412 | |
| | 12180 | 11214 | 5716 | 7022 | 8289 | 6594 | 7858 | 11270 | 1848 | 12273 | 9776 | 6464 | |
| | 1578 | 4239 | 7235 | 5329 | 9074 | 3608 | 6048 | 1812 | 3310 | 7872 | 5540 | 8662 | |
| | 4796 | 790 | 2336 | 6532 | 8866 | 6741 | 7383 | 5683 | 4201 | 1638 | 1583 | 6819 | |
| | 11937 | 2788 | 11593 | 12298 | 6125 | 6977 | 1956 | 8141 | 7002 | 1569 | 11618 | 3937 | |
| | 5648 | 10925 | 10480 | 9137 | 6221 | 2366 | 6277 | 10503 | 5161 | 12302 | 5628 | 4791 | |
| 239: | 3651 | 11823 | 2950 | 1915 | 5176 | 4381 | 8742 | 6316 | 9780 | 3427 | 8319 | 899 | |
| | 4829 | 11372 | 12232 | 6415 | 3788 | 1658 | 9838 | 11020 | 8918 | 7485 | 10102 | 8428 | |
| | 1054 | 2552 | 11363 | 12489 | 9487 | 10566 | 9535 | 11344 | 4210 | 1739 | 5067 | 8368 | |
| | 9789 | 7897 | 2937 | 10388 | 8859 | 10675 | 3146 | 1783 | 2989 | 3471 | 4847 | 919 | |
| | 918 | 5832 | 1172 | 2121 | 5023 | 806 | 11459 | 12478 | 12285 | 11359 | 2683 | 11412 | |
| | 12180 | 11214 | 5716 | 7022 | 8289 | 6594 | 7858 | 11270 | 1848 | 12273 | 9776 | 6464 | |
| | 1578 | 4239 | 7235 | 5329 | 9074 | 3608 | 6048 | 1812 | 3310 | 7872 | 5540 | 8662 | |
| | 4796 | 790 | 2336 | 6532 | 8866 | 6741 | 7383 | 5683 | 4201 | 1638 | 1583 | 6819 | |
| | 11937 | 2788 | 11593 | 12298 | 6125 | 6977 | 1956 | 8141 | 7002 | 1569 | 11618 | 3937 | |
| | 5648 | 10925 | 10480 | 9137 | 6221 | 2366 | 6277 | 10503 | 5161 | 12302 | 5628 | 4791 | |
| 240: | 5298 | 3673 | 6171 | 5229 | 8230 | 6271 | 9427 | 1356 | 10882 | 11852 | 10687 | 6088 | |
| | 10076 | 9830 | 10597 | 6373 | 3987 | 10322 | | | | | | | |
| 241: | 2393 | 3407 | 11789 | 11391 | 11346 | 5568 | 689 | 9121 | 3768 | 6558 | 5447 | 1870 | |
| | 7849 | 2504 | 8733 | 10066 | 994 | 11743 | 980 | 4909 | 7933 | 8486 | 8369 | 5152 | |
| | 1705 | 6156 | 10608 | | | | | | | | | | |
| 242: | 3431 | 5395 | 4346 | 8330 | 8327 | 8702 | 7787 | 5265 | 8943 | 12561 | 4536 | 11625 | |
| | 4411 | 1035 | 11796 | 6078 | 2720 | 4449 | 10010 | 3057 | 9876 | 3536 | 5603 | 11727 | |
| | 5025 | 698 | 9899 | 6457 | 10804 | 3454 | 2741 | 11343 | 11668 | 12537 | 9198 | 9194 | |
| | 6906 | 11749 | 2886 | 4118 | 11050 | 3125 | 3104 | 8238 | 7647 | 11157 | 11552 | 5735 | |
| | 3190 | 1224 | 2010 | 10669 | 3186 | 12278 | 10534 | 9546 | 10088 | 3888 | 1521 | 10626 | |
| | 10413 | 11620 | 12324 | 1406 | 12498 | 3067 | 7386 | 6359 | 10120 | 6004 | 2803 | 9290 | |
| | 11141 | 854 | 2391 | 6032 | 10433 | 12371 | 11636 | 11795 | 6713 | 8567 | 10754 | 717 | |
| | 2465 | 9545 | 9886 | 6990 | 4012 | 8324 | 3742 | 1053 | 8586 | 8683 | 10073 | 12149 | |
| | 7481 | 2755 | 2646 | 6082 | 8956 | 4440 | 4579 | 4447 | 6886 | 4268 | 561 | 11512 | |
| | 3439 | 1568 | 8328 | 1091 | 7948 | 5861 | 726 | 582 | 11893 | 2118 | 12271 | 6845 | |
| | 6843 | 6847 | 2068 | 9119 | 2022 | 8587 | 12175 | 8754 | 6777 | 497 | 9325 | 6872 | |
| | 7531 | 11335 | 2928 | 9885 | 5358 | 1963 | 6109 | 7533 | 11337 | 11444 | 9889 | 6179 | |
| | 1632 | 6874 | 3342 | 12072 | 12199 | 11476 | 9892 | 6224 | 6254 | 5355 | 11338 | 7625 | |
| | 10426 | 10428 | 11395 | 1315 | 11066 | 11063 | 11076 | 5351 | 1440 | 11336 | 11316 | 3538 | |
| | 8749 | 9778 | 5154 | 9356 | 835 | 831 | 2589 | 8503 | 10727 | 2891 | 8958 | 11046 | |
| | 6790 | 9818 | 9094 | 9828 | 5374 | 8610 | 7368 | | | | | | |
| 244: | 9283 | 4282 | 1754 | 571 | 9388 | 10252 | 4060 | 4063 | 10254 | 9392 | 10256 | 10251 | |
| | 8049 | 10250 | 10237 | 10240 | 8942 | 10188 | 9163 | 9457 | 9412 | 4148 | 2795 | 2440 | |
| | 10370 | 3577 | 434 | 12383 | 7841 | 4935 | 4928 | 4931 | 4933 | 4908 | 701 | 7640 | |
| | 2602 | 8966 | 4824 | 5455 | 4822 | 4823 | 5454 | 9020 | 8692 | 9551 | 6293 | 8301 | |
| | 3456 | 1197 | 12421 | 3247 | 6475 | 7319 | 9389 | 569 | 6169 | 1497 | 1499 | 9460 | |
| | 2309 | 600 | 2172 | 2178 | 6997 | 2668 | 8309 | 2821 | 4458 | 2940 | 9832 | 5380 | |
| | 6918 | 732 | 9375 | 9376 | 9294 | 2109 | 12129 | 8117 | 12379 | 4965 | 10550 | 7218 | |
| | 12182 | 11653 | 9067 | 4197 | 9956 | 4905 | 3379 | 8543 | 5663 | 10834 | 8946 | 3814 | |
| | 4643 | 1788 | 6732 | 9857 | 4189 | 10740 | 6347 | 1240 | 5417 | 6399 | 1781 | 1782 | |
| | 3068 | 3398 | 10951 | 3402 | 4557 | 3406 | 1307 | 4161 | 11960 | 8337 | 8307 | 7812 | |
| | 2486 | 2510 | 1431 | 6430 | 894 | 5282 | 12422 | 6029 | 10938 | 10935 | 10936 | 2671 | |
| | 4260 | 10891 | 7914 | 5646 | 9237 | 11207 | 11111 | 4869 | 10685 | 6067 459612455 | | | |
| | 4572 | 7777 | 2072 | 1364 | 3840 | 4879 | 1193 | 7010 | 1667 | 2748 | 4809 1850 | | |
| | 8067 | 8922 | 9994 | 5724 | 12160 | 6849 | 3432 | 11503 | 11999 | 2619 | 11453 5074 | | |
| | 12050 | 3193 | 3298 | 5344 | 3303 | 3301 | 3300 | 3362 | 3283 | 3251 | 3211 9607 | | |
| | 3277 | 4512 | 10924 | 8703 | 8838 | 4726 | 6467 | 2527 | 962 | 5203 | 4589 9809 | | |
| | 9806 | 9805 | 9812 | 1242 | 312314 | 3674 | 3728 | 3676 | 4145 | 7690 | 4132 3000 | | |
| | 3002 | 2009 | 2415 | 3348 | 2543 | 1825 | 3368 | 1753 | 11838 | 6270 | 11163 4736 | | |
| | 11353 | 3911 | 10235 | 1023 | 29385 | 10283 | 10275 | 10280 | 10279 | 1285 | 1293 1279 | | |
| | 1312 | 1291 | 1089 | 2708 | 1407 | 10065 | 9873 | 12041 | 9138 | 11097 | 4104 | 405 | |
| | 10732 | 3843 | 10734 | 9232 | 1527 | 5586 | 4841 | | | | | | |
| 245: | 9283 | 4282 | 1754 | 571 | 9388 | 10252 | 4060 | 4063 | 10254 | 9392 | 1025610251 | | |
| | 8049 | 10250 | 10237 | 10240 | 8942 | 10188 | 9163 | 9457 | 9412 | 4148 | 2795 2440 | | |
| | 10370 | 3577 | 434 | 12383 | 7841 | 4935 | 4928 | 4931 | 4933 | 4908 | 701 | 7640 | |
| | 2602 | 8966 | 4824 | 5455 | 4822 | 4823 | 5454 | 9020 | 8692 | 9551 | 6293 | 8301 | |
| | 3456 | 1197 | 12421 | 3247 | 6475 | 7319 | 9389 | 569 | 6169 | 1497 | 1499 | 9460 | |
| | 2309 | 600 | 2172 | 2178 | 6997 | 2668 | 8309 | 2821 | 4458 | 2940 | 9832 | 5380 | |
| | 6918 | 732 | 9375 | 9376 | 9294 | 2109 | 12129 | 8117 | 12379 | 4965 | 10550 | 7218 | |
| | 12182 | 11653 | 9067 | 4197 | 9956 | 4905 | 3379 | 8543 | 5663 | 10834 | 8946 | 3814 | |
| | 4643 | 1788 | 6732 | 9857 | 4189 | 10740 | 6347 | 1240 | 5417 | 6399 | 1781 | 1782 | |
| | 3068 | 3398 | 10951 | 3402 | 4557 | 3406 | 1307 | 4161 | 11960 | 8337 | 8307 | 7812 | |
| | 2486 | 2510 | 1431 | 6430 | 894 | 5282 | 12422 | 6029 | 10938 | 10935 | 10936 | 2671 | |
| | 4260 | 10891 | 7914 | 5646 | 9237 | 11207 | 11111 | 4869 | 10685 | 6067 | 4596 | 12455 | |
| | 4572 | 7777 | 2072 | 1364 | 3840 | 4879 | 1193 | 7010 | 1667 | 2748 | 4809 | 1850 | |
| | 8067 | 8922 | 9994 | 5724 | 12160 | 6849 | 3432 | 11503 | 11999 | 2619 | 11453 | 5074 | |
| | 12050 | 3193 | 3298 | 5344 | 3303 | 3301 | 3300 | 3362 | 3283 | 3251 | 3211 | 9607 | |
| | 3277 | 4512 | 10924 | 8703 | 8838 | 4726 | 6467 | 2527 | 962 | 5203 | 4589 | 9809 | |
| | 9806 | 9805 | 9812 | 12423 | 12314 | 3674 | 3728 | 3676 | 4145 | 7690 | 4132 | 3000 | |
| | 3002 | 2009 | 2415 | 3348 | 2543 | 1825 | 3368 | 1753 | 11838 | 6270 | 11163 | 4736 | |
| | 11353 | 3911 | 10235 | 10232 | 9385 | 10283 | 10275 | 10280 | 10279 | 1285 | 1293 | 1279 | |
| | 1312 | 1291 | 1089 | 2708 | 1407 | 10065 | 9873 | 12041 | 9138 | 11097 | 4104 | 405 | |
| | 10732 | 3843 | 10734 | 9232 | 1527 | 5586 | 4841 | | | | | | |
| 246: | 6942 | 11388 | 3778 | 2672 | 12375 | 7074 | 1179 | 12458 | 1855 | 12015 | 9980 | 10716 | |
| | 10918 | 11770 | 10255 | 581 | 10006 | 4467 | 10169 | 7675 | 1250 | 5319 | 9827 | 496 | |
| | 1732 | 8778 | | | | | | | | | | | |
| 247: | 9530 | 12217 | 826 | 5267 | 2006 | 547 | 7365 | 1816 | 10509 | 6784 | 2509 | 7339 | |
| | 3841 | 5471 | 11850 | 11519 | 2806 | 7443 | 8018 | 11751 | 1529 | 4077 | 12088 | 6149 | |
| | 1489 | 868 | 7473 | 2466 | 614 | 1176 | 6038 | 2195 | 1557 | 8182 | 3984 | | |
| 248: | 2809 | 1347 | 5519 | 6353 | 8932 | 7422 | 7557 | 4683 | 11147 | 10637 | 9404 | 11768 | |
| | 910 | 8870 | 6324 | 5045 | 4945 | 9453 | 7164 | 4152 | 3322 | 10499 | 7328 | 8994 | |
| | 11460 | 9634 | 9064 | 9047 | 10906 | 11904 | 749 | 5014 | 9906 | 9939 | 9963 | 2364 | |
| | 6617 | 1635 | 4234 | 3462 | 12043 | 10075 | 3459 | 10489 | 8606 | 1999 | 4508 | 10028 | |
| | 5341 | 6180 | 9971 | 7215 | 3422 | 5091 | 9652 | 10601 | 8028 | 11427 | 6678 | 4365 | |
| | 7082 | 1022 | 3209 | 4357 | 9159 | 7321 | 12077 | 11967 | 680 | 7943 | 661 | 11246 | |
| | 10622 | 7676 | 818 | 3364 | 9160 | 6187 | 8531 | 4604 | 6381 | 4859 | 2298 | 10753 | |
| | 12368 | 9200 | 5155 | 2175 | 8058 | 11106 | 1639 | 5299 | 1905 | 1068 | 110937 | 1738 | |
| | 3580 | 7344 | 8320 | 8466 | 5687 | 5293 | 8844 | 5030 | 1572 | 1735 | 543 | 1105 | |
| | 562 | 3483 | 9147 | 12109 | 11282 | 7291 | 10666 | 11009 | 2523 | 12408 | 12128 | 12406 | |
| | 2535 | 10560 | 12212 | 10101 | 11610 | 5148 | 8687 | 5945 | 11651 | 12286 | 5942 | 12291 | |
| | 11624 | 11675 | 12078 | 4588 | 1480 | 1513 | 4665 | 759 | 5868 | 705 | 4662 | 1458 | |
| | 4585 | 4555 | 5193 | 754 | 756 | 5855 | 4641 | 4563 | 1455 | 761 | 5867 | 5859 | |
| | 5756 | 1520 | 4608 | 1437 | 5787 | 1459 | 671 | 1515 | 5784 | 5824 | 5864 | 5902 | |
| | 5791 | 678 | 5169 | 5797 | 5166 | 807 | 808 | 5897 | 5173 | 793 | 5839 | 5899 | |
| | 5761 | 700 | 5752 | 5748 | 848 | 845 | 792 | 786 | 815 | 673 | 853 | 1429 | |
| | 812 | 850 | 849 | 817 | 1432 | 5172 | 5009 | 5062 | 5040 | 4868 | 5060 5066 | | |
| | 5032 | 5034 | 5008 | 5092 | 9098 | 5069 | 5717 | 7327 | 3898 | 5904 | 8185 | 10968 | |
| | 12327 | 12382 | 12376 | 12380 | 12358 | 12355 | 4920 | 5826 | 4918 | 9879 | 6009 | 6638 | |
| | 4899 | 6614 | 6005 | 9882 | 9880 | 9915 | 6609 | 6007 | 9959 | 4923 | 9936 | 9912 | |
| | 5794 | 9935 | 9908 | 6637 | 9941 | 9962 | 9957 | 9970 | 6610 | 9996 | 9993 | 9991 | |
| | 9998 | 4974 | 5857 | 5931 | 5830 | 5865 | 5007 | 5903 | 5852 | 5833 | 5862 | 5202 | |
| | 5093 | 4978 | 5098 | 5096 | 4892 | 6002 | 5934 | 5788 | 5751 | 5785 | 5981 | 5985 | |
| | 5822 | 5958 | 5227 | 6671 | 6643 | 6645 | 6640 | 1393 | 12542 | 1691 | 10538 | 9575 | |
| | 2875 | 1909 | 6944 | 2273 | 7752 | 7749 | 7747 | 7774 | 7150 | 7754 | 7753 | 7720 | |
| | 7717 | 7154 | 7723 | 6454 | 9178 | 1910 | 9184 | 12431 | 11386 | 11005 | 3701 | 2612 | |
| | 991 | 4598 | 6761 | 458 | 1261 | 11303 | 11387 | 5560 | | | | | |
| 249: | 11466 | 10817 | 8971 | 4262 | 10839 | 329 | 8600 | 5335 | 896 | 791 | 1352 | 7322 | |
| | 10270 | 7741 | 9035 | 6714 | 10000 | 8201 | 3746 | 5174 | 4398 | 7207 | 587 | 4853 | |
| | 4851 | 2261 | 11405 | 10793 | 3440 | 3463 | 7505 | 1693 | 2532 | 2862 | 2859 | 5792 | |
| | 2825 | 11560 | 7637 | 7633 | 7614 | 2464 | 11222 | 1778 | 11268 | 11462 | 2158 | 10647 | |
| | 1146 | 7316 | 6100 | 12545 | 1698 | 4358 | 879 | 1727 | 12205 | 7170 | 6117 | 10722 | |
| | 12516 | 7294 | 12005 | 11165 | 1857 | 12042 | 6879 | 3473 | 4353 | 2798 | 10096 | 2424 | |
| | 7595 | 9288 | 3396 | 4644 | 7051 | 6749 | 4932 | 1417 | 11847 | 8676 | 2675 | 3149 | |
| | 4493 | 8041 | 2231 | 10890 | 2301 | 3232 | 3614 | 9139 | 3530 | 7139 | 7836 | 3718 | |
| | 12250 | 881 | 2373 | 4126 | 9707 | 5779 | 9630 | 2905 | 11956 | 10260 | 8176 | 8370 | |
| | 1834 | 1301 | 5330 | 2572 | 10162 | 3878 | 8872 | 7166 | 12030 | 9648 | 2689 | 10149 | |
| | 10973 | 9109 | 4471 | 11920 | 685 | 6584 | 10680 | 5472 | 5665 | 3253 | 2889 | 12470 | |
| | 8726 | 6034 | 6623 | 4199 | 4362 | 12405 | 6411 | 10429 | 12497 | 9570 | 1214 | 1030 | |
| | 617 | 829 | 10859 | 11229 | 1603 | 3932 | 5522 | 1255 | 12084 | 10987 | 900 | 11188 | |
| | 2018 | 616 | 10866 | 6138 | 1003 | 7084 | 10459 | 1656 | 9217 | 4190 | 10206 | 4395 | |
| | 2310 | 3027 | 3199 | 8196 | 12409 | 1333 | 1930 | 7140 | 8939 | 3081 | 5939 | 1360 | |
| | 6958 | 10063 | 5908 | 2324 | 5587 | 735 | 10365 | 8940 | 1173 | 7035 | 8162 | 10945 | |
| | 7665 | 8546 | 4249 | 8439 | 4095 | 10156 | 10177 | 10176 | 931 | 2377 | 8634 | 420 | |
| | 2894 | 3098 | 4069 | 5285 | 1311 | 9272 | 6242 | 7611 | 3944 | 3947 | 5722 | 5719 | |
| | 5695 | 5720 | 5753 | 5727 | 5731 | 12515 | 9999 | 6710 | 9394 | 9395 | 4022 | 4024 | |
| | 10165 | 3990 | 10801 | 3995 | 10163 | 1553 | 3993 | 11441 | 10846 | 11136 | 7843 | 10491 | |
| | 4725 | 11489 | 4723 | 10823 | 10498 | 10615 | 626 | 11339 | 10409 | 11480 | 1805 | 7639 | |
| | 10281 | 10034 | 8405 | 11038 | 3492 | 8645 | 5037 | 12001 | 5800 | 7175 | 4668 | 9467 | |
| | 3156 | 11075 | 2995 | 9347 | 7905 | 1423 | 7870 | 7748 | 2283 | 9865 | 11865 | 5561 | |
| | 8231 | 8097 | 6110 | 8686 | 7829 | 8871 | 5715 | 1804 | 5644 | 4423 | 2259 | 11914 | |
| | 11250 | 8485 | 9933 | 716 | 6323 | 6799 | 3509 | 12565 | 7764 | 5263 | 9011 | 6246 | |
| | 4504 | 2358 | 8877 | 2182 | 11148 | 10158 | 5262 | 5258 | 4660 | 3899 | 6021 | 10821 | |
| | 10978 | 1801 | 8831 | 1936 | 6826 | 9977 | 3546 | 5982 | 3472 | 8460 | 3460 | 12528 | |
| | 5242 | 8527 | 8657 | 8552 | 7744 | 6286 | 2066 | 9201 | 506 | 6016 | 5456 | 399 | |
| | 481 | 11107 | 9066 | 4390 | 6748 | 11573 | 5819 | 5182 | 9176 | 11244 | 8029 | 3399 | |
| | 7013 | 10161 | 10468 | 11469 | 5983 | 9301 | 5544 | 7268 | 5412 | 8121 | 3720 | 9353 | |
| | 2299 | 6358 | 3224 | 11486 | 2423 | 1330 | 12174 | 3550 | 4953 | 2783 | 11429 | 8828 | |
| | 8602 | 1300 | 9104 | 7287 | 8658 | 1986 | 5677 | 8336 | 12262 | 3449 | 4980 | 9514 | |
| | 7606 | 2388 | 11771 | 10820 | 1780 | 11551 | 2392 | 10995 | 9489 | 2737 | 8454 | 10493 | |
| | 975 | 1824 | 7713 | 12036 | 7172 | 8395 | 6062 | 4409 | 8222 | 5608 | 5031 | 12363 | |
| | 11455 | 2661 | 2189 | 5632 | 6561 | 3215 | 11858 | 2652 | 9866 | 8620 | 11816 | 2701 | |
| | 10674 | 5681 | 1663 | 11649 | 9706 | 12317 | 12525 | 2916 | 8590 | 7129 | 9310 | 11073 | |
| | 7694 | 1472 | 5767 | 7178 | 8963 | 4159 | 3109 | 8186 | 2200 | 5114 | 9659 | 6461 | |
| | 8688 | 6519 | 5873 | 668 | 11777 | 10392 | 4625 | 10853 | 6210 | 3001 | 4310 | 1966 | |
| | 1885 | 7538 | 5702 | 8513 | 9937 | 10901 | 11642 | 2005 | 4671 | 9435 | 3667 | 4480 | |
| | 5740 | 6785 | 4971 | 10956 | 5657 | 2890 | 7670 | 8813 | 6102 | 8483 | 8452 | 11464 | |
| | 10848 | 11438 | 10851 | 10769 | 10766 | 10764 | 10763 | 6869 | 8373 | 1564 | 5524 | 10079 | |
| | 11491 | 11440 | 10713 | 7635 | 7631 | 5372 | 5348 | 9233 | 9231 | 9221 | 9240 | 9235 | |
| | 9220 | 3029 | 10761 | 9983 | 814 | 7040 | 12560 | 7016 | 8158 | 8759 | 8762 | 8163 | |
| | 7037 | 7822 | 8767 | 7066 | 7061 | 10679 | 11467 | | | | | | |
| 250: | 11466 | 10817 | 8971 | 4262 | 10839 | 329 | 8600 | 5335 | 896 | 791 | 1352 | 7322 | |
| | 10270 | 7741 | 9035 | 6714 | 10000 | 8201 | 3746 | 5174 | 4398 | 7207 | 587 | 4853 | |
| | 4851 | 2261 | 11405 | 10793 | 3440 | 3463 | 7505 | 1693 | 2532 | 2862 | 2859 | 5792 | |
| | 2825 | 11560 | 7637 | 7633 | 7614 | 2464 | 11222 | 1778 | 11268 | 11462 | 2158 | 10647 | |
| | 1146 | 7316 | 6100 | 12545 | 1698 | 4358 | 879 | 1727 | 12205 | 7170 | 6117 | 10722 | |
| | 12516 | 7294 | 12005 | 11165 | 1857 | 12042 | 6879 | 3473 | 4353 | 2798 | 10096 | 2424 | |
| | 7595 | 9288 | 3396 | 4644 | 7051 | 6749 | 4932 | 1417 | 11847 | 8676 | 2675 | 3149 | |
| | 4493 | 8041 | 2231 | 10890 | 2301 | 3232 | 3614 | 9139 | 3530 | 7139 | 7836 | 3718 | |
| | 12250 | 881 | 2373 | 4126 | 9707 | 5779 | 9630 | 2905 | 11956 | 10260 | 8176 | 8370 | |
| | 1834 | 1301 | 5330 | 2572 | 10162 | 3878 | 8872 | 7166 | 12030 | 9648 | 2689 | 10149 | |
| | 10973 | 9109 | 4471 | 11920 | 685 | 6584 10680 | 5472 | 5665 | 3253 | 2889 | 12470 | | |
| | 8726 | 6034 | 6623 | 4199 | 4362 | 12405 | 6411 | 10429 | 12497 | 9570 | 1214 | 1030 | |
| | 617 | 829 | 10859 | 11229 | 1603 | 3932 | 5522 | 1255 | 12084 | 10987 | 9001 | 1188 | |
| | 2018 | 616 | 10866 | 6138 | 1003 | 7084 10459 | 1656 | 9217 | 4190 | 10206 | 4395 | | |
| | 2310 | 3027 | 3199 | 8196 | 12409 | 1333 | 1930 | 7140 | 8939 | 3081 | 5939 | 1360 | |
| | 6958 | 10063 | 5908 | 2324 | 5587 | 735 10365 | 8940 | 1173 | 7035 | 8162 | 10945 | | |
| | 7665 | 8546 | 4249 | 8439 | 4095 | 10156 10177 | 10176 | 931 | 2377 | 8634 | 420 | | |
| | 2894 | 3098 | 4069 | 5285 | 1311 | 9272 | 6242 | 7611 | 3944 | 3947 | 5722 | 5719 | |
| | 5695 | 5720 | 5753 | 5727 | 5731 | 12515 | 9999 | 6710 | 9394 | 9395 | 4022 | 4024 | |
| | 10165 | 3990 | 10801 | 3995 | 10163 | 1553 | 3993 | 11441 | 10846 | 11136 | 7843 | 10491 | |
| | 4725 | 11489 | 4723 | 10823 | 10498 | 10615 | 626 | 11339 | 10409 | 11480 | 1805 | 7639 | |
| | 10281 | 10034 | 8405 | 11038 | 3492 | 8645 | 5037 | 12001 | 5800 | 7175 | 4668 | 9467 | |
| | 3156 | 11075 | 2995 | 9347 | 7905 | 1423 | 7870 | 7748 | 2283 | 9865 | 11865 | 5561 | |
| | 8231 | 8097 | 6110 | 8686 | 7829 | 8871 | 5715 | 1804 | 5644 | 4423 | 2259 | 11914 | |
| | 11250 | 8485 | 9933 | 716 | 6323 | 6799 | 3509 | 12565 | 7764 | 5263 | 9011 | 6246 | |
| | 4504 | 2358 | 8877 | 2182 | 11148 | 10158 5262 | 5258 | 4660 | 3899 | 6021 | 10821 | | |
| | 10978 | 1801 | 8831 | 1936 | 6826 | 9977 | 3546 | 5982 | 3472 | 8460 | 3460 | 12528 | |
| | 5242 | 8527 | 8657 | 8552 | 7744 | 6286 | 2066 | 9201 | 506 | 6016 | 5456 | 399 | |
| | 481 | 11107 | 9066 | 4390 | 6748 | 11573 | 5819 | 5182 | 9176 | 11244 | 8029 | 3399 | |
| | 7013 | 10161 | 10468 | 11469 | 5983 | 9301 | 5544 | 7268 | 5412 | 8121 | 3720 | 9353 | |
| | 2299 | 6358 | 3224 | 11486 | 2423 | 1330 12174 | 3550 | 4953 | 2783 | 11429 | 8828 | | |
| | 8602 | 1300 | 9104 | 7287 | 8658 | 1986 | 5677 | 8336 | 12262 | 3449 | 4980 | 9514 | |
| | 7606 | 2388 | 11771 | 10820 | 1780 | 11551 | 2392 | 10995 | 9489 | 2737 | 8454 | 10493 | |
| | 975 | 1824 | 7713 | 12036 | 7172 | 8395 | 6062 | 4409 | 8222 | 5608 | 5031 | 12363 | |
| | 11455 | 2661 | 2189 | 5632 | 6561 | 3215 11858 | 2652 | 9866 | 8620 | 11816 | 2701 | | |
| | 10674 | 5681 | 1663 | 11649 | 9706 | 12317 12525 | 2916 | 8590 | 7129 | 9310 | 11073 | | |
| | 7694 | 1472 | 5767 | 7178 | 8963 | 4159 | 3109 | 8186 | 2200 | 5114 | 9659 | 6461 | |
| | 8688 | 6519 | 5873 | 668 | 11777 | 10392 4625 | 10853 | 6210 | 3001 | 4310 | 1966 | | |
| | 1885 | 7538 | 5702 | 8513 | 9937 | 10901 11642 | 2005 | 4671 | 9435 | 3667 | 4480 | | |
| | 5740 | 6785 | 4971 | 10956 | 5657 | 2890 | 7670 | 8813 | 6102 | 8483 | 8452 | 11464 | |
| | 10848 | 11438 | 10851 | 10769 | 10766 | 1076410763 | 6869 | 8373 | 1564 | 5524 | 10079 | | |
| | 11491 | 11440 | 10713 | 7635 | 7631 | 5372 | 5348 | 9233 | 9231 | 9221 | 9240 | 9235 | |
| | 9220 | 3029 | 10761 | 9983 | 814 | 7040 12560 | 7016 | 8158 | 8759 | 8762 | 8163 | | |
| | 7037 | 7822 | 8767 | 7066 | 7061 | 10679 11467 | | | | | | | |
| 251: | 7566 | 9095 | 9909 | 985 | 3712 | 4673 | 10400 | 6894 | 5106 | 4420 | 10664 | | |
| 252: | 1273 | 6354 | 10628 | 10067 | 5950 | 6721 | 684 | 10319 | 709 | 8095 | 11478 | 8177 | |
| | 9858 | 2059 | 488 | 468 | 466 | 443 | 6770 | 8271 | 8157 | 9002 | 4162 | 7370 | |
| | 1098 | 10796 | 8991 | 10090 | 3419 | 1137 | 3784 | 4900 | 1074 | 6158 | 9679 | 1086 | |
| | 7420 | 7419 | 11662 | 4061 | 7548 | 11926 | 460 | 10362 | 8812 | 6107 | 10946 | 6408 | |
| | 8006 | 2847 | 1989 | 3661 | 2787 | 1619 | 1169 | 7204 | 7238 | 10070 | 8193 | 12501 | |
| | 5485 | 1845 | 2794 | 7224 | 9406 | 3749 12378 | 7011 | 3438 | 11084 | 5896 | 11474 | | |
| | 11425 | 546 | 7789 | 4010 | 6448 | 7795 | 7357 | 11260 | 11210 | 8046 | 7430 | 5071 | |
| | 10524 | 9742 | 3252 | 900 | 610057 | 646 | 7991 | 5217 | 3450 | 5973 | 6730 | 3980 | |
| | 4722 | 10407 | 12354 | 911 | 10043 | 9379 | 9461 | 9509 | 6855 | 11475 | 4699 | 4707 | |
| | 3903 | 7938 | 9028 | 10396 | 7951 | 1494 | 6633 | 5811 | 1535 | 1538 | 1708 | 5130 | |
| | 11886 | 5347 | 10359 | 6327 | 7431 | 11504 | 7564 | 4929 | 6272 | 10295 | 1505 | 3845 | |
| | 4840 | 5433 | 8232 | 12488 | 4783 | 9665 | 667 | 1675 | 7251 | 12058 | 1860 | 10394 | |
| | 8850 | 8383 | 714 | 6900 | 2682 | 4992 | 12142 | 10423 | 878 | 6382 | 4981 | 6573 | |
| | 9261 | 426 | 2584 | 2775 | 2459 | 8550 | 6512 | 3410 | 10959 | 3484 | 8923 | 9711 | |
| | 619 | 9357 | 3314 | 7516 | 5046 | 10986 | 11915 | 4893 | 6348 | 6418 | 3650 | 5909 | |
| | 6647 | 12436 | 7700 | 1565 | 10495 | 10526 | 10511 | 10870 | 9093 | 4720 | 2493 | 9031 | |
| | 11617 | 9494 | 11310 | 11940 | 4618 | 11774 | 692 | 1411 | 9722 | 4468 | 12568 | 11407 | |
| | 7852 | 5755 | 8339 | 8261 | 1024 | 8260 | 11252 | 8668 | 12554 | 11172 | 2126 | 3350 | |
| | 8274 | 2633 | 2347 | 867 | 9039 | 11029 | 518 | 11209 | 8727 | 10724 | 3847 | 2316 | |
| | 1653 | 909 | 1651 | 2630 | 6035 | 567 | 11952 | 6533 | 2167 | 6980 | 2903 | 5645 | |
| | 2985 | 1419 | 2272 | 8096 | 2028 | 6291 | 11208 | 11025 | 11024 | 5181 | 7856 | 8183 | |
| | 7234 | 7750 | 3519 | 10320 | 10862 | 1964 | 3457 | 3453 | 5882 | 5849 | 8580 | 4942 | |
| | 3849 | 5260 | 6222 | 9848 | 5523 | 8905 | 11374 | 436 | 465 | 464 | 1140 | 11443 | |
| | 10042 | 3806 | 9553 | 10185 | 7826 | 10304 | 8012 | 5024 | 2583 | 2439 | 8659 | 11296 | |
| | 4457 | 3826 | 3825 | 2123 | 6153 | 2580 | 3823 | 11235 | 5180 | 1488 | 1490 | 5211 | |
| | 2474 | 1881 | 12311 | 1354 | 9614 | 7907 | 6374 | 3347 | 10926 | 1920 | 6334 | 5431 | |
| | 8595 | 7641 | 5799 | 11247 | 7348 | 12051 | 5914 | 3330 | 8845 | 6621 | 4241 | 11797 | |
| | 2199 | 12467 | 478 | 1427 | 11654 | 1136 | 8093 | 577 | 6132 | 2150 | 5407 | 11992 | |
| | 8519 | 5378 | 6745 | 2449 | 11259 | 1376 | 10055 | 7661 | 4076 | 8854 | 8603 | 10662 | |
| | 6195 | 12075 | 11323 | 11304 | 7916 | 8839 | 1138 | 7326 | 8295 | 12332 | 9482 | 11477 | |
| | 484 | 7028 | 7408 | 7379 | 5325 | 4461 | 9084 | 5254 | 12236 | 5518 | 9609 | 442 | |
| | 8120 | 4033 | 10357 | 514 | 6417 | 3763 | 2952 | 10085 | 1346 | 11907 | 10086 | 11849 | |
| | 11941 | 2826 | 10100 | 5164 | 4319 | 7506 | 2567 | 5959 | 2764 | 12070 | 2700 | 7978 | |
| | 3044 | 3064 | 1422 | 715 | 3359 | 9532 | 441 | 440 | 1862 | 740 | 718 | 8115 | |
| | 3061 | 534 | 3160 | 10696 | 10298 | | | | | | | | |
| 253: | 5927 | 3822 | 5709 | 5332 | 11543 | 10238 | 4587 | 4298 | | | | | |
| 254: | 3005 | 4566 | 3638 | 3636 | 4949 | 5593 | 4950 | 4952 | 6386 | 6624 | 4307 | 3140 | |
| | 6319 | 7213 | 7928 | 8481 | 10333 | 12107 | 5205 | 4749 | 1984 | 5730 | 3405 | 11861 | |
| | 3819 | 11697 | 3214 | 6534 | 9110 | 11404 | 7447 | 7451 | 2747 | | | | |
| 255: | 6851 | 10963 | 4533 | 8701 | 12352 | 4018 | | | | | | | |
| 256: | 1398 | | | | | | | | | | | | |
| 257: | 4311 | 9437 | 6301 | 9698 | 8305 | 4430 | 1916 | 3966 | 2446 | 8223 | 12071 | 7173 | |
| | 11279 | 2994 | 12463 | 6181 | 12347 | 6140 | 9285 | 6201 | 11237 | 4813 | 11876 | 1006 | |
| | 7131 | 9122 | 9924 | 9082 | 6064 | 8234 | 4545 | 11494 | 6466 | 1475 | 6806 | 9092 | |
| | 6515 | 10540 | 856 | 2077 | 6207 | 8044 | 6949 | 8542 | 10988 | 7589 | 12288 | 4280 | |
| | 9331 | 1713 | 1349 | 9061 | 4855 | 4694 | 10186 | 10818 | 12322 | 777 | 803 | 4460 | |
| | 8010 | 8775 | 12388 | 6586 | 9554 | 5768 | 4599 | 10157 | 570 | 5597 | 4451 | 607 | |
| | 1039 | 7554 | 2538 | 11891 | 3123 | 5515 | 536 | 4495 | 5739 | 3594 | 9870 | 4947 | |
| | 9673 | 4798 | 1280 | 4136 | 2322 | 11007 | 6288 4646 | 6933 | 1844 | | | | |
| 258: | 9859 | 12104 | 8809 | 8807 | 6357 | 6356 | 1789 | 10837 | 2642 | 3264 | 9441 | 8984 | |
| | 8089 | 4196 | 9932 | 3047 | 6863 | 7859 | 9791 | 10592 | 12563 | 993 | 9958 | 7654 | |
| | 4937 | 4540 | 8667 | 1650 | 1296 | 7541 | 6815 | 1649 | 1469 | 8561 | 3834 | 11908 | |
| | 12504 | 8493 | 9837 | 7137 | 7837 | 9143 | 3913 | 8926 | 669 | 602 | 397 | 11747 | |
| | 10928 | 3857 | 2947 | 3905 | 7688 | 6370 | 7161 | 1745 | 7945 | 2746 | 10541 | 4925 | |
| | 5430 | 5845 | 1383 | 1484 | 11461 | 7123 | 11294 | 2690 | 9638 | 7340 | 1898 | 10844 | |
| | 4970 | 7629 | 12350 | 6619 | 7029 | 654 | 4815 | 12384 | 9127 | 11340 | 2498 | 1184 | |
| | 3150 | 11558 | 12295 | | | | | | | | | | |
| 259: | 8388 | 3722 | 7698 | 3015 | 10098 | 10548 | 508 | 4289 | 7734 | 7728 | 8287 | 7796 | |
| | 7582 | 8616 | 10704 | 7030 | 4169 | 7702 | 7706 | 7760 | 5133 | 7788 | 7765 | 7767 | |
| | 9315 | 6998 | 6984 | 7008 | 7005 | 7058 | 7114 | 7092 | 7063 | 7091 | 7096 | 7067 | |
| | 7000 | 7012 | 10040 | 1961 | 1397 | 9439 | 8663 | 4664 | 8071 | 7086 | 6419 | 7987 | |
| | 12490 | 1679 | 1657 | 4331 | 1983 | 6707 | 3391 | 7497 | 7380 | 7845 | 7666 | 9658 | |
| | 7955 | 1477 | 11341 | 8188 | 12012 | 775 | 12065 | 8672 | 1245 | 4446 | 3055 | 11555 | |
| | 8112 | 886 | 8711 | 8285 | 8283 | 7104 | 1258 | 3726 | 5057 | 9344 | 1937 | 12566 | |
| | 8716 | 11643 | 5989 | 6696 | 2375 | 2637 | 11384 | 8563 | 3794 | 3791 | 3013 | 2235 | |
| | 893 | 12177 | 1467 | 895 | 8779 | 4771 | 6545 | 757 | 2136 | 2135 | 2138 | 10125 | |
| | 10542 | 4351 | 10760 | 8345 | 6952 | 3663 | 2436 | 10787 | 2205 | 4770 | 5789 | 1191 | |
| | 7588 | 4737 | 1645 | 3194 | 1643 | 5301 | 9568 | 4597 | 606 | 8738 | 8740 | 688 | |
| | 1447 | 11990 | 725 | 11030 | 7724 | 11012 | 7085 | 1201 | 4153 | 2707 | 1236 | 10243 | |
| | 3571 | 4602 | 2754 | 10867 | 4661 | 5479 | 11835 | 7842 | 6726 | 2808 | 5829 | 8796 | |
| | 4175 | 4871 | 6440 | 8878 | 2385 | 11553 | 3306 | 4444 | 1014 | 7794 | 8496 | 6687 | |
| | 4238 | 425 | 8393 | 5926 | 6037 | 11564 | 937 | 6397 | 11272 | 11274 | 6981 | 597 | |
| | 4128 | 8492 | 4235 | 4252 | 3066 | 1793 | 10958 | 11713 | 9976 | 10957 | 4236 | 8721 | |
| | 5036 | 6827 | 1967 | 3424 | 2431 | 10983 | 9952 | 5142 | 2900 | 8262 | 12459 | 2776 | |
| | 2253 | 12260 | 3016 | 5741 | 11451 | 1820 | 2515 | 3609 | 11133 | 2251 | 7893 | 12254 | |
| | 5141 | 12377 | 5004 | 12351 | 5115 | 1696 | 5979 | 3793 | 3263 | 11081 | 6921 | 2030 | |
| | 11957 | 4960 | 10571 | 7486 | 5011 | 8357 | 6335 | 10863 | 7264 | 10012 | 2344 | 7350 | |
| | 5370 | 1724 | 5528 | 8203 | 2297 | 10903 | 8202 | 6704 | 3288 | 3690 | 8804 | 5418 | |
| | 2130 | 1392 | 522 | 9793 | 1466 | 7038 | 12237 | 4120 | 8407 | 12161 | 3787 | 8131 | |
| | 6605 | 5883 | 1830 | 8928 | 10864 | 6480 | 7542 | 11726 | 3185 | 6635 | 3525 | 5209 | |
| | 5234 | 2592 | 5776 | 10562 | 11330 | 9613 | 11397 | 8358 | 9161 | 3218 | 9729 | 6444 | |
| | 7598 | 7957 | 4667 | 4732 | 3764 | 11232 | 7992 | 7758 | 7742 | 7792 | 8316 | 8321 | |
| | 8313 | 8318 | 8898 | 8314 | 8896 | 7036 | 7708 | 2838 | 2837 | 9204 | 9196 | 9165 | |
| | 9169 | 9167 | 3629 | 7679 | 12494 | 7034 | 7730 | 7736 | 7901 | 2749 | 5013 | 9348 | |
| | 10267 | 9407 | 4173 | 7059 | 7060 | 8764 | 5946 | 3386 | 3233 | 4464 | 7886 | 9574 | |
| | 5105 | 5163 | 3187 | 3949 | 10398 | 3963 | 6241 | 6243 | 5232 | 5231 | 723 | 4071 | |
| | 9692 | 10318 | 1592 | 1640 | 1593 | 6043 | 6028 | 2626 | 6027 | 8571 | 6486 | 6490 | |
| | 8490 | 9869 | 6434 | 3326 | 7917 | 4490 | 10856 | 2497 | 8664 | 3138 | 6108 | 12215 | |
| | 12152 | 5483 | 1775 | 5517 | 2378 | 8613 | 4639 | 6675 | 9175 | 3415 | 4345 | 7783 | |
| | 4417 | 11725 | 2331 | 636 | 5449 | 2434 | 6189 | 4360 | 4452 | 3601 | 1706 | 2313 | |
| | 5292 | 3390 | 5676 | 5698 | 6810 | 1021 | 1242 | 844 | 4121 | 6897 | 9485 | 11171 | |
| | 5444 | 6735 | 1209 | 10132 | 10389 | 3113 | 10103 | 11622 | 11619 | 5681 | 5315 | 8607 | |
| | 1700 | 11450 | 1379 | 6862 | 6993 | 9444 | 4352 | 6954 | 9727 | 10997 | 9454 | 9474 | |
| | 9450 | 9445 | 2470 | 8722 | 7620 | 12274 | 9335 | 7283 | 920 | 6069 | 9134 | 7032 | |
| | 8458 | 8960 | 7699 | 7097 | 4729 | 2280 | 4472 | 6660 | | | | | |
| 260: | 4214 | 10052 | 2812 | 5162 | 6750 | 9903 | 2712 | 3501 | 7527 | 5168 | 5346 | 10564 | |
| | 1609 | 10272 | 4848 | 8554 | 7685 | 7584 | 7875 | 4883 | 12569 | 2098 | 9005 | 8016 | |
| | 1217 | 4832 | 4511 | 10354 | 4039 | 4267 | 11757 | 666 | 4526 | 4827 | 12579 | 2173 | |
| | 8776 | 3900 | 2116 | 6377 | 3983 | 9759 | 955 | 5583 | 4721 | 3576 | 1498 | 8723 | |
| | 6768 | 8718 | 3644 | 2075 | 5987 | 7882 | 5225 | 3196 | 7716 | 495 | 6935 | 9761 | |
| | 3085 | 5953 | 9503 | 8755 | 5029 | 10373 | 10700 | 9192 | 7081 | 3865 | 7894 | | |
| 261: | 485 | 7151 | 1320 | 1290 | 451 | 4232 | 7155 | 450 | 2079 | 447 | 12101 | 9224 | |
| | 6447 | 8360 | 4519 | 6844 | 8050 | 1655 | 8361 | 5543 | 2398 | 10378 | 6673 | 9961 | |
| | 998 | 3436 | 9533 | 8649 | 10960 | 11580 | 9946 | 3430 | 6890 | 6483 | 7347 | 3268 | |
| | 5572 | 3753 | 7695 | 5744 | 8043 | 8832 | 7891 | 6441 | 3622 | 9579 | 3776 | 3752 | |
| | 3773 | 6487 | 10375 | 8408 | 7209 | 1630 | 9190 | 3033 | 7177 | 1534 | 5860 | 2083 | |
| | 8378 | 2654 | 5222 | 6744 | 2982 | 505 | 690 | 7195 | 6667 | 702 | 4348 | 5933 | |
| | 4349 | 12102 | 12119 | 10347 | 8591 | 12096 | 4828 | 10352 | 10351 | 6392 | 771 | 770 | |
| | 744 | 772 | 779 | 741 | 745 | 6274 | 719 | 4243 | 7117 | 5591 | 12243 | | |
| 262: | 8290 | 9642 | 1843 | 11732 | 12475 | 1766 | 8069 | 520 | 6505 | 2170 | 9021 | 10836 | |
| | 7854 | 11836 | 4028 | 3732 | | | | | | | | | |
| 263: | 11809 | 8254 | 6051 | 11522 | 760 | 6489 | 10701 | | | | | | |
| 264: | 8907 | 8133 | 10594 | 3921 | 5803 | 9945 | 10922 | 7645 | | | | | |
| 265: | 4066 | 1661 | 3518 | 11779 | 11827 | 2479 | 11987 | 1102 | 9997 | 4456 | 4994 | 1897 | |
| | 6649 | 6269 | 2684 | 3489 | 6608 | 10414 | 7293 | 502 | 967 | 6655 | 9887 | 2074 | |
| | 4887 | 2305 | 7607 | 1852 | 1582 | 11458 | 4253 | 11609 | 11608 | 7459 | 6103 | 1624 | |
| | 1305 | 10639 | 10069 | 4293 | 10871 | 3496 | 10261 | 7784 | 10568 | 6526 | 10840 | 3542 | |
| | 7396 | 12120 | 5547 | 7108 | 1586 | 6694 | 4687 | 8748 | 2430 | 2105 | 541 | 1325 | |
| | 2500 | 4205 | 9610 | 10752 | 2166 | 6371 | 10316 | 10321 | 4329 | 12333 | 5381 | 2921 | |
| | 811 | 12135 | 10383 | 1428 | 3930 | 10207 | 6670 | | | | | | |
| 266: | 2090 | 9566 | 9464 | 2088 | 2091 | 2106 | 10582 | 5288 | 7559 | 7950 | 2246 | 2729 | |
| | 2621 | 1225 | 611470 | 6622 | 780 | 7206 | 11763 | 3939 | 2108 | 9703 | 9655 | 9674 | |
| | 3145 | 9678 | | | | | | | | | | | |
| 267: | 2306 | 2969 | 1292 | 5197 | 12526 | 12222 | 2996 | 3154 | 11518 | 9179 | 3130 | 11756 | |
| | 11824 | 3924 | 9004 | 5150 | 1597 | 4858 | 5733 | 8995 | 10095 | 6969 | 5582 | 2383 | |
| | 9888 | 6686 | 5932 | 3811 | 12143 | 5699 | 9088 | 9087 | 8207 | 1596 | 9901 | 6137 | |
| | 1254 | 2780 | 4194 | 9091 | 8401 | 9488 | 1969 | 6581 | 1948 | 4979 | 8425 | 9465 | |
| | 789 | 7551 | 7265 | 10056 | 2516 | 11201 | 5622 | 7269 | 10981 | 10587 | 2719 | 6657 | |
| | 10054 | 9953 | 8025 | 2252 | 4474 | 5694 | 9696 | 10809 | 10346 | 3591 | 12540 | 2472 | |
| | 8500 | 7526 | 6542 | 8794 | 6428 | 3260 | 3853 | 834 | 11437 | 7553 | 2104 | 1174 | |
| | 4070 | 10284 | 11846 | 6905 | 3318 | 3112 | 7937 | 11417 | 1512 | 7587 | 8381 | 8471 | |
| | 6595 | 1879 | 5084 | 3895 | 4878 | 7737 | 7879 | 4626 | 4820 | 3745 | 8954 | 4765 | |
| | 734 | 7376 | 2762 | 4983 | 4164 | 11186 | 7226 | 9505 | 6206 | 2370 | 7873 | 7227 | |
| | 1335 | 2656 | 12316 | 9150 | 10736 | 5160 | 12224 | 3384 | 4212 | 1038 | 1090 | 7813 | |
| | 2000 | 11019 | 8633 | 9202 | 12547 | 610 | 1151 | 477 | 11842 | 4459 | 10523 | 846 | |
| | 6976 | 6177 | 3478 | 7601 | 7819 | 12396 | 3429 | 9472 | 1952 | 9073 | 6996 | 9361 | |
| | 9298 | 8548 | 3686 | 3959 | 8332 | 8435 | 11759 | 6603 | 3632 | 9256 | 7646 | 4433 | |
| | 10471 | 8992 | 2187 | 1321 | 8167 | 1369 | 12178 | 6756 | 431 | 11621 | 3129 | 9398 | |
| | 7887 | 6330 | 1777 | 4570 | 7576 | 5170 | 3648 | 2127 | 1482 | 4993 | 4083 | 1890 | |
| | 9636 | 10445 | 10415 | 2376 | 3523 | 6676 | 8678 | 6924 | 7263 | 9813 | 1641 | 8070 | |
| | 4031 | 1716 | 9502 | 8473 | 3741 | 4330 | 11966 | 7877 | 10022 | 12534 | 9351 | 5643 | |
| | 9443 | 9022 | 4325 | 11408 | 1742 | 9580 | 2032 | 2312 | 12130 | 6053 | 12465 | 5399 | |
| | 9807 | 2943 | 5566 | 5880 | 4392 | 1847 | 2346 | 4013 | 4682 | 6974 | 5503 | 1470 | |
| | 2501 | 1647 | 5895 | 11762 | 11022 | 7003 | 3169 | 11760 | 7954 | 3040 | 4710 | 3312 | |
| | 3856 | 11269 | 10512 | 8997 | 10381 | 1594 | 11874 | 3858 | 5763 | 2945 | 2389 | 1287 | |
| | 3666 | 12296 | 11449 | 6966 | 8724 | 3091 | 1104 | 1526 | 4106 | 2426 | 7312 | 5089 | |
| | 4558 | 1362 | 784 | 7286 | 6804 | 2692 | 9155 | 638 | 4087 | 7165 | 4778 | 6496 | |
| | 6596 | 11650 | 4378 | 2529 | 10338 | 3020 | 2704 | 2613 | 10136 | 2968 | 1289 | 2913 | |
| | 12208 | 12213 | 2687 | 1763 | 1605 | 3255 | 5001 | 10446 | 3830 | 622 | 4919 | 7514 | |
| | 6495 | 8862 | 3508 | 1757 | 6913 | 2770 | 456 | 6821 | 2248 | 6264 | 10756 | 7128 | |
| | 2597 | 11198 | 8880 | 1229 | 11102 | 2417 | 665 | 9103 | 6909 | 2972 | 4374 | 8782 | |
| | 12517 | 10310 | 9656 | 8637 | 959 | 10314 | 2408 | 8583 | 12484 | 5284 | 8004 | 7865 | |
| | 11095 | 5879 | 10104 | 8003 | 8292 | 6166 | 5477 | 12443 | 8881 | 7245 | 6369 | 4831 | |
| | 5113 | 2644 | 1519 | 7906 | 7797 | 6820 | 3167 | 8998 | 1997 | 268 | 10780 | 11194 | |
| | 2311 | 6443 | 12293 | 9910 | 9913 | 11253 | 2438 | 3383 | 11083 | 1199 | 5020 | 8646 | |
| | 5389 | 5140 | 825 | 4294 | 9400 | 9402 | 9536 | 4982 | 4149 | 8342 | 524 | 10019 | |
| | 6757 | 1894 | 7267 | 7062 | 6209 | 2655 | 10289 | 6225 | 423 | 6999 | 2829 | 4645 | |
| | 408 | 9131 | 10854 | 7186 | 9600 | 3389 | 3166 | 4041 | 9764 | 8477 | 11226 | 2528 | |
| | 12519 | 987 | 1542 | 11389 | 1514 | 6818 | 6026 | 4183 | 3426 | 9065 | 8073 | 7662 | |
| | 521 | 1525 | 6163 | 8690 | 2566 | 11120 | 6634 | 12230 | 3498 | 10852 | 11230 | 8317 | |
| | 9286 | 4782 | 2861 | 5592 | | | | | | | | | |
| 268: | 2306 | 2969 | 631 | 4857 | 1313 | 7109 | 1316 | 1358 | 6436 | 6376 | 1292 | 5197 | |
| | 12526 | 12222 | 2996 | 3154 | 7194 | 11518 | 9179 | 4127 | 11305 | 10569 | 10567 | 3130 | |
| | 11756 | 11824 | 3924 | 9004 | 5636 | 5150 | 1597 | 4858 | 3748 | 898 | 7330 | 7336 | |
| | 5733 | 1840 | 8995 | 10095 | 6969 | 10023 | 5215 | 5309 | 5582 | 10233 | 2383 | 9888 | |
| | 6686 | 5932 | 9183 | 3811 | 12143 | 5699 | 9088 | 9087 | 8207 | 1596 | 6137 | 9901 | |
| | 2799 | 8411 | 9354 | 6560 | 3176 | 10832 | 2488 | 9926 | 11193 | 11195 | 5123 | 1254 | |
| | 2780 | 4194 | 12044 | 1537 | 4188 | 9091 | 1969 | 8401 | 9488 | 6581 | 1948 | 4979 | |
| | 8425 | 9465 | 4172 | 1215 | 5187 | 11001 | 6054 | 396 | 6093 | 5210 | 11954 | 789 | |
| | 7551 | 7265 | 10056 | 2516 | 11201 | 1372 | 5622 | 7269 | 10981 | 1402 | 10587 | 10020 | |
| | 6657 | 11034 | 11032 | 10054 | 9953 | 8025 | 2252 | 4474 | 5694 | 9696 | 5691 | 10809 | |
| | 8977 | 10346 | 3591 | 9180 | 7391 | 7394 | 5492 | 12540 | 2472 | 2710 | 2686 | 2076 | |
| | 2660 | 8500 | 8465 | 7571 | 11887 | 416 | 7526 | 6542 | 8794 | 8847 | 6428 | 3260 | |
| | 3853 | 11018 | 10379 | 10323 | 834 | 11437 | 7553 | 4070 | 2104 | 1174 | 10284 | 11846 | |
| | 388 | 1135 | 9188 | 4081 | 504 | 11872 | 1116 | 6905 | 3318 | 3112 | 11306 | 7937 | |
| | 11417 | 7202 | 929 | 9811 | 7587 | 1512 | 8381 | 8471 | 6595 | 1879 | 5084 | 8348 | |
| | 9653 | 4878 | 3895 | 7737 | 7879 | 4820 | 4626 | 3745 | 8954 | 4765 | 5018 | 734 | |
| | 9023 | 11647 | 10134 | 7376 | 2762 | 4553 | 4983 | 4164 | 2233 | 11186 | 7226 | 9505 | |
| | 1463 | 8789 | 7834 | 2370 | 6206 | 4286 | 11883 | 2350 | 1779 | 7873 | 7227 | 1335 | |
| | 8565 | 2293 | 12316 | 2656 | 10736 | 9150 | 5160 | 4096 | 1749 | 1878 | 1023 | 10744 | |
| | 12224 | 3384 | 4212 | 4181 | 1038 | 968 | 5850 | 4844 | 1090 | 7813 | 2000 | 11019 | |
| | 8633 | 1077 | 11086 | 5295 | 3092 | 9202 | 12547 | 5178 | 1585 | 5771 | 2349 | 2911 | |
| | 610 | 1151 | 477 | 2885 | 651 | 9730 | 4897 | 9257 | 1434 | 10783 | 3065 | 3735 | |
| | 8911 | 3349 | 847 | 4678 | 4283 | 11842 | 2667 | 11788 | 10003 | 7487 | 5930 | 5684 | |
| | 11740 | 7691 | 6817 | 5962 | 1052 | 10745 | 439 | 4459 | 10523 | 846 | 6976 | 6177 | |
| | 3478 | 7601 | 7819 | 1952 | 12396 | 3429 | 9472 | 4315 | 10929 | 10731 | 1117 | 7823 | |
| | 12261 | 8415 | 9073 | 6996 | 9361 | 8548 | 9298 | 3686 | 10143 | 8957 | 3959 | 8332 | |
| | 8435 | 10657 | 2315 | 11759 | 6603 | 3632 | 9256 | 7646 | 4433 | 1683 | 10471 | 8992 | |
| | 2187 | 1321 | 8167 | 9757 | 1369 | 12178 | 6756 | 431 | 6755 | 7219 | 11621 | 3129 | |
| | 2327 | 9398 | 7887 | 6330 | 2730 | 1777 | 4570 | 11848 | 7576 | 5170 | 3715 | 5103 | |
| | 5411 | 11655 | 2924 | 10812 | 3648 | 2127 | 1482 | 4922 | 8103 | 12323 | 9555 | 9526 | |
| | 12027 | 4993 | 4083 | 1890 | 3046 | 4303 | 9846 | 12410 | 1069 | 9636 | 10445 | 10415 | |
| | 2376 | 3523 | 7618 | 6676 | 11793 | 8678 | 6924 | 9049 | 10975 | 7263 | 9813 | 1641 | |
| | 8070 | 4031 | 1716 | 3030 | 6543 | 10257 | 12281 | 9502 | 8473 | 5890 | 6492 | 3741 | |
| | 4330 | 11966 | 7877 | 10022 | 12534 | 5643 | 9351 | 6220 | 9022 | 9443 | 8593 | 9086 | |
| | 8252 | 3053 | 637 | 11399 | 3927 | 3956 | 6740 | 12074 | 3207 | 6653 | 4325 | 11408 | |
| | 1742 | 2842 | 4629 8906 | 5476 | 6247 | 2037 | 7968 | 12118 | 9580 | 2032 | 12130 | | |
| | 2312 | 6053 | 12465 5399 | 9807 | 3325 | 9881 | 11280 | 8190 | 3467 | 8160 | 8985 | | |
| | 6516 | 7967 | 3272 2943 | 5566 | 1284 | 389 | 5614 | 9307 | 5191 | 10111 | 6835 | | |
| | 3477 | 1982 | 527312440 | 2901 | 5880 | 1847 | 4392 | 2346 | 4013 | 11723 | 1891 | | |
| | 4191 | 7522 | 4412 9130 | 4218 | 4682 | 5503 | 6974 | 1470 | 4766 | 8026 | 1555 | | |
| | 3869 | 2323 | 8023 | 630 | 7300 | 3951 | 8763 | 8948 | 2501 | 1647 | 5895 | 11762 | |
| | 5216 | 7003 | 11022 | 3169 | 11760 | 7954 | 3040 | 10199 | 4710 | 11126 | 10147 | 8857 | |
| | 5621 | 5668 | 11780 | 11939 | 5425 | 3312 | 3856 | 11269 | 8997 | 10512 | 1594 | 11874 | |
| | 10381 | 3858 | 5763 | 2945 | 2389 | 1287 | 3666 | 11449 | 12296 | 2318 | 10463 | 1558 | |
| | 448 | 3760 | 11055 | 1343 | 7993 | 2443 | 10324 | 3916 | 5526 | 9528 | 10453 | 2276 | |
| | 7298 | 12136 | 11969 | 2482 | 6966 | 8724 | 3091 | 8734 | 8951 | 1104 | 1526 | 2426 | |
| | 4106 | 5647 | 2321 | 7312 | 5089 | 1362 | 4558 | 784 | 10556 | 7286 | 2692 | 6804 | |
| | 9155 | 10921 | 10659 | 638 | 659 | 4087 | 7165 | 4778 | 7233 | 6020 | 7284 | 10698 | |
| | 6496 | 6596 | 11650 | 4378 | 2529 | 10338 | 3020 | 2704 | 2613 | 10136 | 1375 | 1948 | |
| | 1712 | 2968 | 1289 | 2913 | 2224 | 11190 | 3021 | 1220 | 812213 | 2687 | 12495 | 1763 | |
| | 1605 | 3255 | 830 | 8955 | 5001 | 10446 | 3830 | 622 | 4919 | 6716 | 9314 | 7514 | |
| | 6495 | 8862 | 3508 | 8463 | 1757 | 6913 | 2770 | 456 | 459 | 4180 | 682 | 6264 | |
| | 10756 | 12248 | 2597 | 11198 | 7128 | 8880 | 1229 | 11102 | 2417 | 665 | 3855 | 10502 | |
| | 9103 | 6909 | 2972 | 4374 | 8782 | 12517 | 6215 | 10310 | 9656 | 8637 | 959 | 10314 | |
| | 6073 | 550 | 6945 | 9390 | 11644 | 3958 | 9252 | 2408 | 8583 | 12484 | 5284 | 9146 | |
| | 353 | 4888 | 8004 | 7865 | 6919 | 3790 | 3191 | 5474 | 11095 | 5879 | 8003 | 10104 | |
| | 9560 | 7254 | 3313 | 6166 | 8292 | 5477 | 12443 | 8881 | 7245 | 4818 | 6523 | 601 | |
| | 7467 | 5655 | 7904 | 2616 | 7385 | 11356 | 10441 | 4896 | 10757 | 5707 | 2099 | 10943 | |
| | 3339 | 10559 | 10300 | 6401 | 2699 | 12163 | 6765 | 7800 | 6015 | 796 | 9475 | 5508 | |
| | 1048 | 6449 | 4831 | 6369 | 5113 | 2644 | 1519 | 1551 | 1516 | 7906 | 3948 | 3970 | |
| | 1241 | 8048 | 7797 | 6820 | 3167 | 8998 | 1997 | 10780 | 11194 | 2311 | 6443 | 7250 | |
| | 5239 | 4290 | 8558 | 2604 | 1457 | 9596 | 9792 | 7405 | 4277 | 12381 | 5426 | 10573 | |
| | 11978 | 7424 | 2328 | 2813 | 8478 | 10887 | 10427 | 2478 | 267 | 4782 | 8317 | 9286 | |
| | 2861 | 5592 | 4717 | 1627 | 11355 | 4384 | 1626 | 12203 | 1628 | 1634 | 3012 | 5310 | |
| | 10932 | 1938 | 1631 | 9170 | 11150 | 9904 | 12196 | 5943 | 7142 | 474 | 9062 | 10827 | |
| | 2811 | 11127 | 11368 | 5339 | 9304 | 6956 | 10334 | 4001 | 6413 | 5342 | 7798 | 3896 | |
| | 11894 | 7780 | 6114 | 3142 | 5535 | 11149 | 6833 | 3647 | 4112 | 12293 | 9910 | 9913 | |
| | 11253 | 11312 | 2438 | 3383 | 11537 | 12138 | 2772 | 11083 | 1199 | 5020 | 10690 | 8646 | |
| | 5389 | 5140 | 825 | 8086 | 4294 | 9402 | 9400 | 9536 | 4982 | 4149 | 8342 | 524 | |
| | 10019 | 6757 | 1894 | 7267 | 7062 | 6209 | 2655 | 10289 | 6225 | 423 | 6999 | 2829 | |
| | 4645 | 408 | 6995 | 8495 | 12394 | 9131 | 10854 | 7186 | 9600 | 3389 | 3166 | 5667 | |
| | 7275 | 4542 | 6618 | 519 | 12086 | 1366 | 4041 | 9764 | 8477 | 7372 | 1002 | 9763 | |
| | 11446 | 11226 | 2528 | 12519 | 987 | 1542 | 11389 | 1514 | 6818 | 6026 | 4183 | 9065 | |
| | 3426 | 8073 | 7662 | 521 | 1525 | 6163 | 8690 | 2566 | 11120 | 6634 | 11361 | 9685 | |
| | 12230 | 3498 | 10852 | 11230 | 8817 | 11471 | 3901 | | | | | | |
| 269: | 10246 | 7020 | 10686 | 1680 | 2796 | 1248 | 4594 | 2505 | 2649 | 8814 | 4168 | 8374 | |
| | 6389 | 751 | 11074 | 5159 | 11572 | 9199 | 8170 | 11830 | 3320 | 1694 | 6988 | 4377 | |
| | 1158 | 2140 | 6808 | 1540 | 816 | 2611 | 2241 | 4706 | 12106 | 2495 | 7793 | 6342 | |
| | 12477 | 3412 | 7006 | 12049 | 10544 | 4477 | 12125 | 7475 | 4354 | 2846 | 7156 | 6363 | |
| | 2055 | 7558 | 5296 | 12398 | 1019 | 2781 | 7458 | 6926 | 7121 | 11829 | 3754 | 9602 | |
| | 3038 | 2174 | 11439 | 11516 | 8441 | 3201 | 538 | 4055 | 8783 | 11982 | 11239 | 4860 | |
| | 6050 | 7851 | 6664 | 4339 | 8596 | 1835 | 4062 | 8288 | 1678 | 5580 | 3810 | 8594 | |
| | 7041 | 6577 | 1960 | | | | | | | | | | |
| 270: | 4062 | 1835 | 12226 | | | | | | | | | | |
| 271: | 8290 | 9642 | 18431 | 1732 | 12475 | 1766 | 8069 | 520 | 1037 | 6505 | 5910 | 11968 | |
| | 2170 | 9735 | 9733 | 3296 | 9919 | 9736 | 6388 | 4211 | 10836 | 7854 | 6903 | 4895 | |
| | 4891 | 2824 | 11297 | 6396 | 5660 | 3159 | 4028 | 3732 | | | | | |
| 272: | 8063 | 5732 | 3188 | 12369 | 8106 | 5080 | 8559 | 5286 | 9212 | 6803 | 750 | 4584 | |
| | 1070 | 6395 | 12048 | 6368 | 4780 | 6720 | 3285 | 7270 | 5175 | 10059 | 3031 | 9890 | |
| | 4441 | 8785 | 8432 | 7543 | 8947 | 2382 | 9338 | 9916 | 2726 | 5706 | 4904 | 1112 | |
| | 8534 | 12046 | 5615 | 4488 | 804 | 3480 | 1954 | 12218 | 6267 | 11927 | 6258 | 8125 | |
| | 8126 | 5527 | 6214 | 11902 | 1822 | 1837 | 6240 | 7878 | 12091 | 8556 | 9969 | 9381 | |
| | 11837 | 7476 | 8665 | 452 | 3702 | 12328 | 10209 | 2368 | 7672 | 6087 | 4676 | 4229 | |
| | 7434 | 3076 | 10466 | 6404 | 841 | 4861 | 4575 | 2872 | 9917 | 8967 | 9749 | 12115 | |
| | 10692 | 5473 | 7256 | 1873 | 2198 | 1336 | 3931 | 5798 | 5808 | 8673 | 3377 | 510 | |
| | 3158 | 3925 | 8389 | 12141 | 9014 | 11932 | 3569 | 10651 | 2208 | 8990 | 3345 | 906 | |
| | 12209 | 1050 | 7346 | 9893 | 1587 | 3161 | 10825 | 3649 | 1918 | 6767 | 501 | 4795 | |
| | 10221 | 5149 | 6439 | 2784 | 10214 | 1584 | 3120 | 12202 | 5678 | 428 | 10578 | 7612 | |
| | 4274 | 6191 | 4074 | 6190 | 7590 | 10144 | 3043 | 5323 | 3640 | 5250 | 1128 | 8414 | |
| | 9490 | 9112 | 9758 | | | | | | | | | | |
| 273: | 8564 | 10720 | 7580 | 12251 | 9922 | 5975 | 9534 | 9393 | 11158 | 3613 | 2357 | 8444 | |
| | 2119 | 7602 | 3108 | 2579 | 8365 | 9547 | 11895 | 2245 | 12158 | 11802 | 1274 | 6626 | |
| | 8769 | 278 | 2843 | 10230 | 6198 10814 | 2304 | 9207 | 9542 | 6236 | 10051 | 10027 | | |
| 274: | 8564 | 10720 | 7580 | 12251 | 9922 | 9576 | 4259 | 7808 | 6453 | 6362 | 10533 | 12131 | |
| | 4838 | 10436 | 9019 | 7182 | 4738 | 7025 | 1326 | 7147 | 8769 | 6626 | 4708 | 11348 | |
| | 8116 | 2843 | 10230 | 6198 | 10814 | 2304 | 9207 | 9975 | | | | | |
| 275: | 8564 | 10720 | 7580 | 12251 | 9922 | 5975 | 8617 | 4257 | 645 | 295 | 9393 | 9534 | |
| | 11158 | 3613 | 6982 | 2357 | 9576 | 4259 | 7808 | 8296 | 3210 | 4615 | 747 | 8228 | |
| | 8444 | 6520 | 1408 | 1212 | 2119 12131 | 4397 | 10412 | 3357 | 10137 | 7547 | 3018 | | |
| | 7602 | 1687 | 7289 | 2579 | 11413 | 4889 | 3108 | 2245 | 2058 | 1274 | 1304 | 1326 | |
| | 12252 | 9409 | 6626 | 8769 | 4708 11442 | 5397 | 12002 | 8139 | 5642 | 11431 | 8792 | | |
| | 387 | 7509 | 208 | 2269 | 11533 | 6769 | 2676 | 1510 | 921 | 3668 | 8728 | 2843 | |
| | 10230 | 6198 | 10814 | 2304 | 9207 | | | | | | | | |
| 276: | 8564 | 10720 | 7580 | 12251 | 9922 | 5975 | 6953 | 3210 | 8228 | 4615 | 1408 | 747 | |
| | 8444 | 2119 | 6520 | 12131 | 1212 | 8085 | 4738 | 11349 | 8769 | 6626 | 4708 | 2149 | |
| | 6060 | 1642 | 2843 | 10230 | 6198 10814 | 2304 | 9207 | | | | | | |
| 278: | 8564 | 10720 | 7580 | 12251 | 9922 | 5975 | 8365 | 9547 | 11895 | 12158 | 4163 | 4240 | |
| | 4160 | 5925 | 3184 | 8350 | 7490 11199 | 6290 | 9672 | 12433 | 3775 | 6965 | 6236 | | |
| | 2843 | 10230 | 6198 | 10814 | 2304 | 9207 | | | | | | | |
| 279: | 11873 | 12447 | 2706 | 9271 | 8545 8588 | 8589 | 1577 | 1575 | 1576 | 1556 | 1574 | | |
| | 1554 | 12551 | 2725 | 3886 | 4500 | 6611 | 2287 | 8846 | 8469 | 10838 | 672 | 10223 | |
| | 7975 | 8434 | 3868 | 4882 | 10126 11563 | 3642 | 9352 | 11652 | 8174 | 11905 | 9191 | | |
| | 8406 | 4808 | 4695 | 731 | 743 11308 | 557 | 8768 | 8766 | 7331 | 8826 | 8798 | | |
| | 8805 | 8823 | 8802 | 8770 | 8810 | 7337 | 10227 | 12576 | 6424 | 8751 | 2625 | 2329 | |
| | 11117 | 5782 | 5613 | 12126 | 3234 11981 | 7912 | 4328 | 8756 | 10460 | 11394 | 11912 | | |
| | 11140 | 11794 | 5736 | 7997 | 8001 | 8833 | 8858 | 8229 | 11559 | 4865 | 2620 | 4139 | |
| | 10306 | 12509 | 7191 | 6463 | 3414 | 7888 | 9622 | 2636 | 10442 | 1509 | 8263 | 5935 | |
| | 4620 | 8920 | 7281 | 9781 | 2244 | 8303 | 4679 | 10588 | 12456 | 8675 | 1462 | 10865 | |
| | 2027 | 9686 | 1337 | 7315 | 2477 | 4322 | 2786 | 12487 | 3434 | 8685 | 1110 | 10015 | |
| | 12292 | 1614 | 10953 | 5654 | 1401 | 5132 | 4731 | 4059 | 10385 | 8101 | 1092 | 2544 | |
| | 3727 | 8068 | 9657 | 11690 | 9843 | 902 | 11114 | 11508 | 9248 | 5844 | 4093 | 4193 | |
| | 7973 | 7272 | 9752 | 3395 | 7480 | 12062 | 7735 | 7260 | 5272 | 5194 | 2631 | 1302 | |
| | 11584 | 6056 | 11710 | 6971 | 11324 | 10325 | 2534 | 3684 | 9590 | 5816 | 1644 | 7616 | |
| | 5600 | 5596 | 8889 | 8884 | 7853 | 7024 | 1648 | 8367 | 5246 | 4913 | 12176 | 704 | |
| | 10123 | 9378 | 1836 | 11691 | 1654 | 9950 | 2628 | 11218 | 5390 | 4684 | 8860 | 5562 | |
| | 4654 | 5424 | 4056 | 4054 | 4649 | 5575 | 5573 | 4685 | 4681 | 794 | 1741 | 10798 | |
| | 10795 | 10815 | 3025 | | | | | | | | | | |
| 280: | 8944 | 10309 | 11523 | 5409 | 9218 | 5496 | 3060 | 12127 | 10717 | 1563 | 11079 | 5075 | |
| | 5446 | 7162 | 6394 | 475 | 2895 | 11855 | | | | | | | |
| 281: | 8713 | 1390 | 12290 | 11594 | 6366 | 5219 | 9822 | 472 | 990 | 1864 | 5322 | 3734 | |
| | 5671 | 8402 | 1798 | 5624 | 8175 | 8143 | 2112 | 2007 | 9228 | 8075 | 8074 | 9689 | |
| | 1977 | 6691 | 4246 | 11342 | 9339 | 12570 | 3946 | 1709 | 3643 | 7404 | 4008 | 822 | |
| | 2906 | 9396 | 6308 | 7762 | 8245 | 5247 | 8501 | 5398 | 9724 | 10792 | 9537 | 8154 | |
| | 1704 | 3799 | 12444 | 7567 | 4631 | 10236 | 4053 | 10234 | 12524 | 11204 | 12520 | | |
| 282: | 8713 | 1390 | 12290 | 11594 | 6366 | 5219 | 9822 | 472 | 990 | 1864 | 5322 | 3734 | |
| | 5671 | 8402 | 1798 | 5624 | 8175 | 8143 | 2112 | 2007 | 9228 | 8075 | 8074 | 9689 | |
| | 1977 | 6691 | 4246 | 11342 | 9339 | 12570 | 3946 | 1709 | 3643 | 7404 | 4008 | 822 | |
| | 2906 | 9396 | 6308 | 7762 | 8245 | 5247 | 8501 | 5398 | 9724 | 10792 | 9537 | 8154 | |
| | 1704 | 3799 | 12444 | 7567 | 4631 | 10236 | 4053 | 10234 | 12524 | 11204 | 12520 | | |
| 283: | 5129 | 579 | 7910 | 6041 | 4924 | 9938 | 8648 | 1959 | 5116 | 11840 | 10410 | 6723 | |
| | 2627 | 2374 | 8349 | 5198 | 4261 | 7308 | 12451 | 4744 | 8824 | 5423 | 9208 | 7703 | |
| | 8379 | 7382 | 4873 | 7258 | 8871 | 2265 | 9643 | 1685 | 7499 | 8488 | 3329 | 7902 | |
| | 9795 | 3563 | 11706 | 486 | 9611 | 5352 | 8424 | 2190 | 6175 | 6882 | 6684 | 10772 | |
| | 7323 | 5838 | 5796 | 12157 | 5042 | 12530 | 8929 | 2774 | 7524 | 3019 | 6134 | 9705 | |
| | 11596 | 12028 | 5028 | 8919 | 6435 | 10672 | 5108 | 3737 | 6630 | 1204 | 10355 | 3914 | |
| | 934 | 8102 | 11080 | 3227 | 5595 | 4999 | 11933 | 10068 | 493 | 10775 | 6715 | 4025 | |
| | 748 | 3338 | 2537 | 4002 | 9897 | 12249 | 4601 | 2307 | 2406 | 12399 | 3839 | 11641 | |
| | 7811 | 855 | 11881 | 4418 | 874 | 11400 | 3526 | 2517 | 5240 | 7534 | 9327 | 9479 | |
| | 6916 | 4651 | 2448 | 4764 | 7115 | 7359 | 4745 | 2218 | 2445 | 5550 | 11288 | 4565 | |
| | 10376 | 10600 | 10339 | 6052 | 5107 | 10317 | 2243 | 9128 | 4595 | 3864 | 2303 | 9770 | |
| | 9539 | 9743 | 11803 | 7677 | 11096 | 8297 | 1154 | 3485 | 10991 | 876 | 4100 | 7296 | |
| | 4016 | 2065 | 72361 | 2548 | 10273 | 12097 | 2595 | 7217 | 1666 | 8670 | 10349 | 1774 | |
| | 2476 | 7363 | 4741 | 6796 | 6565 | 11292 | 1849 | 4373 | 3435 | 7230 | 3341 | 2541 | |
| | 1821 | 8498 | 5396 | 3198 | 11538 | 3685 | 8651 | 10348 | 7686 | 3494 | 2601 | 3152 | |
| | 2923 | 7678 | 10044 | 12272 | 8979 | 8978 | 9671 | 457 | 3653 | 1629 | 4117 | 4614 | |
| 284: | 6668 | 3235 | 3818 | 3280 | 4758 | 4297 | 9603 | 12233 | 6255 | 277 | 11983 | 5049 | |
| | 1677 | 10510 | 5376 | 4876 | 7709 | 2606 | 7855 | 5817 | 5502 | 2752 | 8873 | 7831 | |
| | 12155 | 4505 | 3421 | 8647 | 2936 | 8837 | 1861 | 10226 | 3621 | | | | |
| 285: | 1976 | 5617 | 4364 | 10244 | 11750 | 7026 | 10598 | 10444 | 12198 | 6957 | 11935 | 1931 | |
| | 721 | 957 | 10530 | 5964 | 3926 | 2863 | 5386 | 3808 | 8614 | 2702 | 6345 | 10476 | |
| | 5312 | 4110 | 6414 | 9914 | 11598 | 7824 | 5318 | 417 | 12305 | 7779 | 5448 | 12493 | |
| | 4038 | | | | | | | | | | | | |
| 286: | 1976 | 5617 | 4364 | 10244 | 11750 | 7026 | 10598 | 10444 | 12198 | 6957 | 11935 | 1931 | |
| | 721 | 957 | 10530 | 5964 | 3926 | 2863 | 5386 | 3808 | 8614 | 2702 | 6345 | 10476 | |
| | 5312 | 4110 | 6414 | 9914 | 11598 | 7824 | 5318 | 417 | 12305 | 7779 | 5448 | 12493 | |
| | 4038 | | | | | | | | | | | | |
| 287: | 4532 | 4537 | 4535 | 4321 | 5690 | 3863 | 4040 | 5167 | 9368 | 6992 | 1071 | 1871 | |
| | 3307 | 1504 | 9777 | 11731 | 3677 | 930 | 7604 | 4057 | 11684 | 4610 | 4616 | 4007 | |
| | 2093 | 1382 | 8118 | 1103 | 4486 | 5467 | 5393 | 4515 | 4521 | 4523 | 4494 | 4498 | |
| | 4491 | 4501 | 4517 | 2428 | 10002 | 7721 | | | | | | | |
| 288: | 4532 | 4537 | 4535 | 4321 | 5690 | 3863 | 4040 | 5167 | 9368 | 6992 | 1071 | 1871 | |
| | 3307 | 1504 | 9777 | 11731 | 3677 | 930 | 7604 | 4057 | 11684 | 4610 | 4616 | 4007 | |
| | 2093 | 1382 | 8118 | 1103 | 4486 | 5467 | 5393 | 4515 | 4521 | 4523 | 4494 | 4498 | |
| | 4491 | 4501 | 4517 | 2428 | 10002 | 7721 | | | | | | | |
| 289: | 5602 | 4469 | 5419 | 5432 | 4637 | 10619 | 12255 | 11347 | 1232 | 1294 | 10091 | 12571 | |
| | 3340 | 7341 | 10614 | 3641 | 10384 | 2591 | 10195 | 6615 | 3382 | | | | |
| 290: | 5602 | 4469 | 5419 | 5432 | 4637 | 10619 | 12255 | 11347 | 1232 | 1294 | 10091 | 12571 | |
| | 3340 | 7341 | 10614 | 3641 | 10384 | 2591 | 10195 | 6615 | 3382 | | | | |
| 291: | 956 | 4465 | 4807 | 7960 | 12053 | | | | | | | | |
| 292: | 956 | 4465 | 4807 | 7960 | 12053 | | | | | | | | |
| 293: | 9995 | 10229 | 5629 | 4497 | 5478 | 1295 | 6535 | 7277 | 5314 | 5311 | 2845 | 2893 | |
| | 1590 | 3892 | 5403 | 9930 | 12093 | | | | | | | | |
| 294: | 5961 | 4836 | 7630 | 4296 | 5666 | 7068 | 3635 | 8611 | 3090 | 1533 | 3559 | 10613 | |
| | 6581 | 2421 | 6383 | 11801 | | | | | | | | | |
| 295: | 8564 | 10036 | 10720 | 7580 | 12251 | 9922 | 5975 | 3210 | 4615 | 747 | 8228 | 10137 | |
| | 4889 | 11413 | 1687 | 7547 | 3357 | 10412 | 4397 | 4738 | 1304 | 8769 | 6626 | 4708 | |
| | 921 | 2843 | 10230 | 6198 | 10814 | 2304 | 9207 | | | | | | |
| 296: | 10164 | 12268 | 7193 | 12156 | 12154 | 9486 | 8455 | 12552 | 5871 | 11173 | 2548 | 2542 | |
| | 5633 | 3141 | 3766 | 590 | 1082 | 3992 | 8267 | 6299 | 778 | 2533 | 1059 | 4146 | |
| | 7163 | 5256 | 11156 | 11648 | 11529 | 5921 | 8825 | 6682 | 6157 | 8241 | 1259 | 10579 | |
| | 11293 | 3172 | 3890 | 3244 | 1660 | 5461 | 9077 | 10417 | 11782 | 9241 | 4647 | 6085 | |
| | 5533 | 10786 | 11283 | 8864 | 7613 | 10145 | 3023 | 2254 | 11899 | 9693 | 4998 | 2249 | |
| | 6410 | 5641 | 7093 | 4052 | 4549 | 1355 | 3042 | 7495 | 9483 | 1005 | 6235 | 11042 | |
| | 9349 | 7772 | 11454 | 7077 | 2216 | 6433 | 7119 | 629 | 6578 | 12361 | 12367 | 12339 | |
| | 12304 | 1095 | 5688 | 9382 | 10369 | 3991 | 7244 | 3978 | 8632 | 6688 | 297 | 4237 | |
| | 8212 | 10490 | 8019 | 10723 | 6507 | 7628 | 10789 | 3579 | 7364 | 8000 | 1445 | 663 | |
| | 12144 | 9990 | 11984 | 1945 | 8030 | 3293 | 8031 | 2228 | 3137 | 5015 | 11472 | | |
| 297: | 10164 | 12268 | 7193 | 9486 | 8455 | 12552 | 5871 | 11173 | 2548 | 2542 | 5633 | 3141 | |
| | 3766 | 590 | 1082 | 3992 | 8267 | 6299 | 778 | 2533 | 1059 | 4146 | 7163 | 5256 | |
| | 11156 | 11648 | 11529 | 5921 | 8825 | 6157 | 8241 | 1259 | 10579 | 11293 | 3172 | 3890 | |
| | 3244 | 1660 | 5461 | 9077 | 10417 | 11782 | 9241 | 4647 | 6085 | 5533 | 10786 | 11283 | |
| | 8864 | 7613 | 10145 | 3023 | 2254 | 11899 | 9693 | 4998 | 2249 | 6410 | 296 | 5015 | |
| | 11472 | 9171 | 5641 | 7093 | 4052 | 1355 | 4549 | 3042 | 7495 | 9483 | 6433 | 7119 | |
| | 6578 | 12361 | 12367 | 12339 | 12304 | 1095 | 5688 | 9382 | 10369 | 3991 | 7244 | 3978 | |
| | 8632 | 6688 | 8000 | 6631 | 2144 | 9990 | 11984 | 1945 | 8030 | 8031 | 3293 | 2228 | |
| | 3137 | | | | | | | | | | | | |
| 298 | : 6538 | 1032 | 1988 | 11733 | 10816 | 4334 | 10053 | 7132 | 8765 | | | | |
| 299: | 9629 | 10933 | 11170 | 4429 | 11119 | 10276 | 2041 | 7360 | 11044 | 10557 | | | |
| 300: | 8084 | 5326 | 12114 | 2801 | 859 | 5498 | 5501 | 5500 | 4097 | 2853 | 11026 | 1093 | |
| | 6864 | 7572 | 1322 | 1998 | 9312 | 3195 | 3212 | 9141 | 6500 | 7593 | 2695 | 5994 | |
| | 11381 | 2046 | 12450 | 1175 | 11496 | 10580 | 3308 | 10507 | 1359 | 766 | 482 | 7144 | |
| | 3680 | 12207 | 5610 | 4785 | 5099 | 837 | 3691 | 11589 | 4538 | 9550 | 8239 | 10350 | |
| | 4306 | 6253 | 8310 | 6929 | 7570 | 10029 | 6839 | 11665 | 12183 | 8699 | 10366 | 1752 | |
| | 4109 | 9684 | 10416 | 12239 | 2071 | 10593 | 11167 | 4792 | 8276 | 4032 | 1858 | 10979 | |
| | 11380 | 1446 | 7503 | 10114 | 1439 | 8461 | 3367 | 8284 | 8579 | 10447 | 5422 | 6013 | |
| | 11212 | 11985 | 10505 | 10684 | 1958 | 5243 | 5224 | 3420 | 5244 | 2666 | 3503 | 10830 | |
| | 7361 | 11291 | 3084 | 4658 | 1222 | 7043 | 833 | 2929 | 9358 | 7216 | 3236 | 4806 | |
| | 1737 | 1662 | 2206 | 10693 | 4204 | 2008 | 12168 | 9731 | 3859 | 8398 | 6959 | 5618 | |
| | 6121 | 10749 | 3974 | 1725 | 3083 | 9145 | 10401 | 3583 | 3584 | 3534 | 5237 | 11267 | |
| | 5317 | 1076 | 5918 | 5308 | 8214 | 7478 | 11067 | 7070 | 703 | 1013 | 6708 | 857 | |
| | 3213 | 6390 | 10358 | 1129 | 3328 | 11224 | 1067 | 2452 | 12064 | 7929 | 2677 | 12496 | |
| | 2669 | 11302 | 5579 | 9844 | 11950 | 6986 | 5851 | 9106 | 12319 | 3231 | 10187 | 11369 | |
| | 3962 | 2664 | 708 | 10537 | 8869 | 11611 | 10873 | 7664 | 9942 | 2756 | 11666 | 605 | |
| | 2372 | 2185 | 4657 | 12151 | 917 | 8091 | 1353 | 2942 | 12000 | 401 | 10695 | 9397 | |
| | 3623 | 4907 | 4103 | 2739 | 3833 | 8806 | 9107 | 5443 | 3374 | 578 | 2520 | 6380 | |
| | 9491 | 10688 | 783 | 3548 | 403 | 5055 | 8515 | 11236 | 7936 | 2002 | 8293 | 5277 | |
| | 1426 | 11734 | 9896 | 12360 | 3552 | 11263 | 4613 | 2881 | 873 | 969 | 7729 | 11390 | |
| | 10130 | | | | | | | | | | | | |
| 301: | 8084 | 5326 | 12114 | 2801 | 859 | 5498 | 5501 | 5500 | 4097 | 2853 | 11026 | 1093 | |
| | 6864 | 7572 | 1322 | 1998 | 9312 | 3195 | 3212 | 9141 | 6500 | 7593 | 2695 | 5994 | |
| | 11381 | 2046 | 12450 | 1175 | 11496 | 10580 | 3308 | 10507 | 1359 | 766 | 482 | 7144 | |
| | 3680 | 12207 | 5610 | 4785 | 5099 | 837 | 3691 | 11589 | 4538 | 9550 | 8239 | 10350 | |
| | 4306 | 6253 | 8310 | 6929 | 7570 | 10029 | 6839 | 11665 | 12183 | 8699 | 10366 | 1752 | |
| | 4109 | 9684 | 10416 | 12239 | 2071 | 10593 | 11167 | 4792 | 8276 | 4032 | 1858 | 10979 | |
| | 11380 | 1446 | 7503 | 10114 | 1439 | 8461 | 3367 | 8284 | 8579 | 10447 | 5422 | 6013 | |
| | 11212 | 11985 | 10505 | 10684 | 1958 | 5243 | 5224 | 3420 | 5244 | 2666 | 3503 | 10830 | |
| | 7361 | 11291 | 3084 | 4658 | 1222 | 7043 | 833 | 2929 | 9358 | 7216 | 3236 | 4806 | |
| | 1737 | 1662 | 2206 | 10693 | 4204 | 2008 | 12168 | 9731 | 3859 | 8398 | 6959 | 5618 | |
| | 6121 | 10749 | 3974 | 1725 | 3083 | 9145 | 10401 | 3583 | 3584 | 3534 | 5237 | 11267 | |
| | 5317 | 1076 | 5918 | 5308 | 8214 | 7478 | 11067 | 7070 | 703 | 1013 | 6708 | 857 | |
| | 3213 | 6390 | 10358 | 1129 | 3328 | 11224 | 1067 | 2452 | 12064 | 7929 | 2677 | 12496 | |
| | 2669 | 11302 | 5579 | 9844 | 11950 | 6986 | 5851 | 9106 | 12319 | 3231 | 10187 | 11369 | |
| | 3962 | 2664 | 708 | 10537 | 8869 | 11611 | 10873 | 7664 | 9942 | 2756 | 11666 | 605 | |
| | 2372 | 2185 | 4657 | 12151 | 917 | 8091 | 1353 | 2942 | 12000 | 401 | 10695 | 9397 | |
| | 3623 | 4907 | 4103 | 2739 | 3833 | 8806 | 9107 | 5443 | 3374 | 578 | 2520 | 6380 | |
| | 9491 | 10688 | 783 | 3548 | 403 | 5055 | 8515 | 11236 | 7936 | 2002 | 8293 | 5277 | |
| | 1426 | 11734 | 9896 | 12360 | 3552 | 11263 | 4613 | 2881 | 873 | 969 | 7729 | 11390 | |
| | 10130 | | | | | | | | | | | | |
| 302: | 7930 | 8544 | 10850 | 11315 | 1622 | 713 | 7552 | 12402 | 12054 | 2832 | 1378 | 7648 | |
| | 5146 | 2634 | 9070 | 7958 | 4361 | 8568 | 5530 | 3222 | 7766 | 9447 | 7141 | 3358 | |
| | 2648 | 3815 | 12564 | 7471 | 949 | 6651 | 11701 | 3772 | 8852 | 4184 | 7621 | 7652 | |
| | 9840 | 9038 | | | | | | | | | | | |
| 303: | 1087 | 3127 | 12531 | 11944 | 8119 | 5400 | 10714 | 2653 | 9713 | 6738 | 7171 | 7017 | |
| | 3271 | 304 3126 | 11365 | 6566 | 6841 | 4270 | 4954 | 5831 | 3493 | 3736 | | | |
| 304: | 9927 | 8180 | 9829 | 3960 | 3127 | 2849 | 1133 | 11944 | 7171 | 4954 | 3126 | | |
| 305: | 4622 | 10899 | 8164 | 3782 | 5729 | 798 | | | | | | | |
| 306: | 5804 | 12016 | 7448 | 10738 | 10708 | 12014 | 10638 | 7423 | 7421 | 7417 | 309 | 10586 | |
| | 7444 | 7446 | 5047 | 10645 | 10646 | 12280 | 207 | 2096 | 11839 | 7072 | 9709 | 1612 | |
| | 8993 | 10037 | 6780 | 11613 | 9034 | 2004 | 8166 | 6931 | 7311 | 6922 | 8933 | 10494 | |
| | 3783 | 3081 | 2034 | 3781 | 9745 | 916 | 6666 | 9140 | 6285 | 9452 | 8035 | 12449 | |
| | 10356 | 10064 | 4275 | 2067 | 3934 11430 | 12246 | 9405 | 2987 | 9052 | 12318 | 6252 | | |
| | 11326 | 8138 | 3397 | 9877 | 310 11058 | 8474 | 9105 | 11870 | 12047 | 3986 | 6725 | | |
| | 1902 | 4332 | 4672 | 9408 | 4088 | 3842 | 2342 | 1701 | 10402 | 12181 | 8446 | 4050 | |
| | 6973 | 6860 | 7715 | 8601 | 0725 4578 | 862 | 7045 | 11785 | 4789 | 5465 | 10224 | | |
| | 8088 | 10189 | 3553 | 9992 | 9964 | 3950 | 2793 | 6677 | 10001 | 3375 | 4200 | 10391 | |
| | 10676 | 11712 | 10682 | 4747 | 206 | 307 | | | | | | | |
| 307: | 12016 | 7448 | 9024 | 10738 | 10708 | 12014 | 7423 | 7421 | 7417 | 309 | 10586 | 7444 | |
| | 7446 | 5047 | 10646 | 12280 | 207 | 2096 | 11839 | 9709 | 1612 | 8993 | 9034 | 2004 | |
| | 8166 | 6931 | 7311 | 6922 | 3783 | 308 | 12034 | 3781 | 916 | 9745 | 9140 | 6285 | |
| | 12449 | 9452 | 8035 | 10356 | 4443 | 10064 | 8138 | 2067 | 3934 | 4275 | 11430 | 9052 | |
| | 12318 | 6252 | 12246 | 9405 | 2987 | 9728 | 11326 | 3397 | 9877 | 8474 | 310 | 11058 | |
| | 9105 | 6860 | 7715 | 860 | 2342 | 1701 | 10402 | 8446 | 4050 | 6973 | 3986 | 11870 | |
| | 12047 | 4332 | 6725 | 1902 | 9408 | 4088 | 3842 | 4672 | 10725 | 12181 | 1973 | 10224 | |
| | 3950 | 4578 | 862 | 7045 | 11785 4789 | 5465 | 8088 | 9992 | 3553 | 10189 | 9964 | | |
| | 2793 | 6677 | 10001 | 3375 | 4200 10391 | 4747 | 206 | 306 | | | | | |
| 308: | 5804 | 12016 | 10678 | 10712 | 10735 | 7448 | 10738 | 10708 | 12014 | 10638 | 7423 | 7421 | |
| | 7417 | 309 | 10586 | 10589 | 10603 | 10584 | 7444 | 10644 | 7446 | 5047 | 10645 | 10646 | |
| | 12280 | 207 | 9710 | 2096 | 11839 | 9709 | 1612 | 8993 | 10037 | 8354 | 6780 | 11613 | |
| | 9034 | 306 | 307 | 2004 | 11103 | 8166 | 6931 | 7311 | 6922 | 8933 | 3783 | 11857 | |
| | 12034 | 3781 | 6666 | 9745 | 12449 | 10356 | 4275 | 12246 | 9405 | 2987 | 2067 | 3934 | |
| | 8138 | 11430 | 9052 | 12318 | 6252 | 7223 | 9728 | 410 | 6792 | 9877 | 3397 | 310 | |
| | 11058 | 9105 | 8474 | 8446 | 4050 | 6973 | 6860 | 7715 | 860 | 4332 | 6725 | 1902 | |
| | 2342 | 1701 | 10402 | 12181 | 9408 | 4088 | 3842 | 10725 | 11870 | 12047 | 3986 | 4672 | |
| | 6779 | 3950 | 862 | 7045 | 11785 | 4789 | 5465 | 10224 | 8088 | 3553 | 9992 | 10189 | |
| | 9964 | 4578 | 2793 | 6677 | 10001 | 3375 | 4200 | 10391 | 11712 | 4747 | 206 | | |
| 309: | 5804 | 12016 | 10678 | 10712 | 10735 | 7448 | 10738 | 10708 | 12014 | 10638 | 7423 | 7421 | |
| | 7417 | 10586 | 10603 | 10589 | 10584 | 7444 | 10644 | 7446 | 5047 | 10645 | 10646 | 12280 | |
| | 207 | 9710 | 2096 | 11839 | 1612 | 8993 | 10037 | 6780 | 11613 | 9034 | 306 | 307 | |
| | 2004 | 8166 | 6931 | 7311 | 6922 | 8933 | 10494 | 3783 | 3081 | 2034 | 3781 | 9745 | |
| | 12449 | 10356 | 4275 | 2067 | 3934 | 9728 | 12246 | 9405 | 2987 | 8138 | 3564 | 2073 | |
| | 4786 | 9877 | 310 | 11058 | 8474 | 9105 | 6779 | 9408 | 4088 | 3842 | 4672 | 6725 | |
| | 1902 | 6860 | 7715 | 860 | 2342 | 8446 | 1701 | 4050 | 10402 | 6973 | 4332 | 11870 | |
| | 12047 | 3986 | 10725 | 10224 | 862 | 7045 | 11785 | 4789 | 5465 | 8088 | 3553 | 10189 | |
| | 9992 | 3950 | 4578 | 1468 | 10676 | 11712 | 10682 | 4747 | 206 | | | | |
| 310: | 5804 | 2397 | 12016 | 7448 | 10738 | 10708 | 12014 | 10638 | 7423 | 7421 | 7417 | 309 | |
| | 7444 | 7446 | 10645 | 12280 | 207 | 9710 | 3151 | 3170 | 2096 | 11839 | 9709 | 1612 | |
| | 8993 | 10037 | 8354 | 6780 | 8499 | 11613 | 1088 | 9034 | 306 | 307 | 2004 | 8166 | |
| | 888 | 7311 | 3783 | 3081 | 2034 | 7362 | 6666 | 8344 | 7302 | 1234 | 10676 | 10741 | |
| | 10660 | 10641 | 10683 | 11712 | 10743 | 10575 | 10581 | 10682 | 4747 | 206 | 8474 | 9105 | |
| 311: | 10915 | 10878 | 10681 | 2529 | 8032 | 413 | 5270 | 2499 | 8936 | 5781 | 4938 | 5276 | |
| | 1252 | 892 | 4567 | | | | | | | | | | |
| 312: | 8987 | 9785 | 7079 | 7212 | 7143 | 1975 | 6697 | 2771 | 8204 | 12195 | 8537 | 585 | |
| | 2367 | 8528 | 2778 | 10971 | 5848 | 3923 | 2481 | 10194 | 10765 | 6901 | | | |
| 313: | 9794 | 11709 | 6934 | 6911 | 3465 | 11447 | 8784 | 2016 | 8641 | 5611 | 8517 | 8671 | |
| | 3003 | 7544 | 6479 | 6231 | 563 | 8829 | 10089 | 2790 | 628 | 627 | 9649 | 1297 | |
| | 11694 | 5577 | 8598 | 9675 | 10148 | 4363 | 3836 | 4733 | 1188 | 3242 | 5221 | 11035 | |
| | 2914 | 8480 | 11016 | 4957 | 7466 | 6072 | 7775 | 10813 | 3443 | 7004 | 1031 | 12329 | |
| | 2384 | 8400 | 3441 | 6113 | 1400 | 10790 | 3796 | 7441 | 1736 | 6771 | 5928 | 2870 | |
| | 5451 | 8104 | 10128 | 10965 | 2791 | 9293 | 11843 | 11570 | 8042 | 1481 | 6529 | 11667 | |
| | 866 | 7292 | 6602 | | | | | | | | | | |
| 314: | 12162 | 11631 | 3039 | 3335 | 1817 | 6144 | 11507 | 11509 | 10668 | 9931 | 7389 | 11289 | |
| | 3607 | 1332 | 7818 | 7488 | 11660 | 11565 | 11685 | 11567 | 11688 | 10617 | 5147 | 2492 | |
| | 1968 | 10962 | 3770 | 7759 | 8253 | 7833 | 2978 | 10138 | 9767 | 3688 | 11601 | 11695 | |
| | 4434 | 10033 | 407 | 4317 | 10372 | 540 | 8736 | 5135 | 6797 | 470 | 12257 | 7890 | |
| | 2547 | 9902 | 8793 | 1833 | 11410 | 5625 | 3866 | 10200 | 2909 | 10621 | 5905 | 11153 | |
| | 769 | 6607 | 7608 | 11014 | 10403 | 1714 | 1985 | 8277 | 11535 | 11659 | 11637 | 12345 | |
| | 12301 | 11505 | 11530 | 11656 | 11525 | 11606 | 12307 | 11634 | 12340 | | | | |
| 315: | 712 | 11134 | 11581 | 8135 | 891 | 5866 | 7918 | 1721 | 10277 | 4963 | 7671 | 9567 | |
| | 512 | 10630 | 6458 | 3683 | 4951 | 8419 | 4724 | 5955 | 3114 | 1441 | 4439 | 8965 | |
| | 11628 | 9774 | 5184 | 10737 | 9308 | 6612 | 10159 | 5721 | 6759 | 12507 | 2586 | 7299 | |
| | 10335 | 9387 | 5504 | 6758 | 9577 | 5043 | 9868 | 6733 | 9951 | 5843 | 11373 | 4090 | |
| | 3481 | 2186 | 10450 | 10709 | 11672 | 6568 | 11882 | 5745 | 9469 | 9268 | 11804 | 10475 | |
| | 11196 | 6964 | 2129 | 10514 | 7931 | 8436 | 1370 | 7659 | 6865 | 1238 | 3006 | 635 | |
| | 7240 | 5350 | 6661 | 12111 | 9988 | 1853 | 1109 | 2594 | 12193 | 12188 | 1329 | 10264 | |
| | 11716 | 4872 | 347 | 4739 | 7259 | 3909 | 3596 | 6541 | 2688 | 2146 | 5708 | 10807 | |
| | 10781 | 10784 | 10777 | 9045 | 8986 | 8786 | 9839 | 11901 | 1929 | 1933 | 1935 | 10650 | |
| | 10654 | 7773 | 7801 | 7804 | 1143 | 2054 | 6917 | 1476 | 10477 | 4712 | 1561 | 10094 | |
| | 1078 | 1684 | 10485 | 2080 | 10545 | 2225 | 11028 | 8886 | 9355 | 2815 | 2957 | 3147 | |
| | 7080 | 5087 | 2577 | 11228 | 10228 | 4716 | 4719 | 8219 | 1623 | 5563 | 11698 | 4688 | |
| | 6802 | 7656 | 7655 | 11357 | 11544 | 11574 | 12191 | 9823 | 707 | 4304 | 11582 | 11993 | |
| | 11988 | 11991 | 12562 | 11182 | 11164 | 11162 | 10876 | 11184 | 2858 | 1541 | 9124 | 7770 | |
| | 11817 | 2155 | 12468 | 8830 | 10980 | 5410 | 8443 | 6061 | 2736 | 11463 | 8780 | 9125 | |
| | 11997 | 935 | 8250 | 9251 | 4203 | 9291 | 6598 | 4948 | 6065 | 2047 | 10171 | 7719 | |
| | 6540 | 3804 | 2670 | 3982 | 11540 | 11059 | 3392 | 10297 | 6763 | 9898 | 2286 | 6482 | |
| | 1045 | 7087 | 8619 | 7714 | 3117 | 7324 | 7301 | 7454 | 9151 | 10810 | 2165 | 1994 | |
| | 11179 | 11370 | 8371 | 7116 | 7222 | 9215 | | | | | | | |
| 316: | 10181 | 5990 | 406 | 6910 | 5922 | 9771 | 8885 | 1859 | 574 | 2867 | 532 | 1868 | |
| | 6925 | 10421 | 3134 | 12068 | 5705 | 2337 | 12241 | 9985 | 3554 | 11752 | 5564 | 2432 | |
| | 2463 | 1750 | 7099 | 9628 | 6813 | 6873 | 1600 | 1443 | 7309 | 12216 | 6438 | 10892 | |
| 317: | 2001 | 9411 | 1075 | 7903 | 8973 | 6228 | 11216 | 3706 | 9101 | 10886 | 2855 | 12572 | |
| | 10961 | 7464 | 2904 | 10516 | 4510 | 8333 | 8057 | 11958 | 4305 | 6046 | 1672 | 5230 | |
| | 11536 | 3762 | 2038 | 11435 | 2899 | 6559 | 5359 | 494 | 6709 | 9645 | 9316 | 8626 | |
| | 4344 | 943 | 5569 | 2274 | 12370 | 3372 | 2986 | 9817 | 2723 | 8355 | 5821 | 6502 | |
| | 9481 | 6030 | 1829 | 7862 | 8577 | 2818 | 10521 | 2507 | 1904 | 11531 | 2831 | 9309 | |
| | 8347 | 3705 | 6837 | 1942 | 529 | 3692 | 884 | 6075 | 11053 | 5261 | 1823 | 5521 | |
| | 5620 | 9741 | 5458 | 4209 | 10496 | 3133 | 10883 | 10748 | 11524 | 8416 | 6456 | 9739 | |
| | 10729 | 3716 | 1869 | 3943 | 10259 | 989 | 1566 | 9414 | 5570 | 3969 | 2061 | 12023 | |
| | 4834 | 7329 | 1599 | 12133 | 1298 | 997 | 3452 | 3409 | 7876 | 500 | 6317 | 10340 | |
| | 9615 | 5619 | 2025 | 11396 | 5304 | 1410 | 5125 | 11354 | 7934 | 11109 | 10205 | 11465 | |
| | 10315 | 7718 | 3708 | 12353 | 7369 | 4198 | 11754 | 9213 | 720 | 2565 | 4404 | 8816 | |
| | 2763 | 9750 | 3487 | 2107 | 2416 | 5876 | 1811 | 10553 | 2898 | 1699 | 11813 | 9078 | |
| | 839 | 6693 | 3694 | 2275 | 8945 | 6825 | 429 | 10377 | 3278 | 10269 | 9851 | 4308 | |
| | 3366 | 5469 | 4158 | 11942 | 10539 | 11281 | 4989 | 10437 | 11448 | 11023 | 4266 | 1399 | |
| | 5475 | 1474 | 3089 | 8937 | 752 | 8129 | 9624 | 603 | 6938 | 4302 | 6071 | 5887 | |
| | 8953 | 9754 | 11068 | 6539 | 11602 | 11856 | 11773 | | | | | | |
| 318: | 1808 | 1810 | 1809 | 1815 | 8197 | 7925 | 3733 | 9562 | 9559 | 8735 | 9493 | 11825 | |
| | 7039 | 2571 | 4406 | 1717 | 4426 | 11479 | 5470 | 5490 | 5468 | 12179 | 12073 | 9263 | |
| | 1882 | 6962 | 8737 | 5554 | 454 | 6331 | 9197 | 7474 | | | | | |
| 319: | 1608 | 435 | 1810 | 1809 | 1808 | 8197 | 9562 | 9559 | 8735 | 9493 | 4045 | 7039 | |
| | 2571 | 4406 | 1717 | 4426 | 11479 | 5470 | 5490 | 5468 | 6962 | 8737 | 5554 | 10895 | |
| | 10799 | 10893 | 10845 | 10872 | 10869 | 10868 | 1277 | 1036 | 7857 | | | | |
| 320: | 11284 | 3835 | 1257 | 7050 | 4894 | 995 | 10631 | 1387 | 3315 | 5206 | 2848 | 2458 | |
| | 5893 | | | | | | | | | | | | |
| 321: | 1992 | 7276 | 11661 | 3904 | 3713 | 8363 | 12462 | 7790 | 8181 | 11322 | 1115 | 2876 | |
| | 4777 | 11426 | 5331 | 3812 | 11811 | 10448 | 730 | 1688 | 10292 | 8788 | 10266 | 7189 | |
| | 7105 | 5338 | 7555 | 6641 | 12172 | 10702 | 3961 | 2554 | 10739 | 3771 | 10525 | 11295 | |
| | 10175 | 3346 | 9422 | 3617 | 1340 | 3652 | 8834 | 1785 | 10107 | 6885 | 9797 | 2092 | |
| | 7460 | 8036 | 1518 | 4343 | 9541 | 10966 | 8739 | 7343 | 7970 | 1357 | 7692 | | |
| 322: | 7998 | 11945 | 3324 | 2518 | 2605 | 12395 | 12415 | 6120 | 4228 | 1728 | 6481 | 9287 | |
| | 8237 | 7203 | 4544 | 11071 | 6485 | 7597 | 3710 | 4975 | 7397 | 5640 | 5151 | 10017 | |
| | 11392 | 8033 | 6793 | 5938 | 12275 | 2260 | 11004 | 9055 | 4389 | 391 | 2053 | 9786 | |
| | 5557 | 7782 | 1275 | | | | | | | | | | |
| 323: | 2163 | 12492 | 12513 | 2433 | 12362 | 5815 | 6948 | 1690 | 4436 | 11925 | 10565 | 3671 | |
| | 12009 | 5590 | 2338 | | | | | | | | | | |
| 324: | 2163 | 12492 | 12513 | 2433 | 12362 | 5815 | 6948 | 1690 | 4436 | 11925 | 10565 | 3671 | |
| | 12009 | 5590 | 2338 | | | | | | | | | | |
| 325: | 5223 | 7733 | 3595 | 6743 | 8171 | 1884 | 4936 | 7342 | 5441 | 1333 | 4021 | 10203 | |
| | 1099 | 788 | 10465 | 1185 | 6579 | 12206 | 11278 | 12277 | 7727 | 3862 | 11362 | 6398 | |
| | 11319 | 5259 | 1270 | 11110 | 3045 | 511 | 3792 | 5551 | | | | | |
| 326: | 4483 | 7102 | 12574 | 11511 | 5281 | | | | | | | | |
| 327: | 5332 | 5927 | 4548 | 5709 | 11543 | 8482 | 3822 | 5041 | 9863 | 838 | 4020 | 11868 | |
| | 5102 | 9911 | 4642 | 10599 | 1012 | 6488 | 4691 | 9525 | 1062 | 7489 | 6816 | 2714 | |
| | 8445 | | | | | | | | | | | | |
| 328: | 11721 | 5605 | 2086 | 4366 | 1269 | 3758 | 7461 | 3682 | 4125 | 10030 | 11534 | 7537 | |
| | 8615 | 11301 | 4300 | 9716 | 7707 | 7358 | 12567 | 10049 | 7574 | 2467 | 8459 | 7101 | |
| | 2732 | 4569 | 7261 | 7972 | 12098 | 982 | 5952 | 3290 | 953 | 12385 | 11696 | 9296 | |
| | 5713 | 11495 | 9981 | 6322 | 6795 | 8719 | 8387 | 6978 | 9584 | 7285 | 810 | 8024 | |
| | 596 | 10008 | 7197 | 4265 | 3603 | 4391 | 9425 | 12253 | 390 | 9350 | 6547 | 3679 | |
| | 7413 | 11860 | 8874 | 476 | 4966 | 11483 | 10611 | 5073 | 8720 | 6724 | 8818 | 4326 | |
| | 8743 | | | | | | | | | | | | |
| 329: | 2805 | 11466 | 10817 | 12063 | 4835 | 12061 | 4262 | 10839 | 12227 | 4562 | 4636 | 4607 | |
| | 4586 | 4609 | 3893 | 7911 | 2164 | 1352 | 7322 | 5134 | 2955 | 2878 | 5825 | 10270 | |
| | 10747 | 6822 | 6782 | 10822 | 7599 | 8525 | 8453 | 2918 | 1122 | 11630 | 4524 | 9768 | |
| | 6459 | 5336 | 11488 | 10000 | 1807 | 9627 | 2250 | 5726 | 2230 | 3561 | 10425 | 1547 | |
| | 3423 | 6893 | 7821 | 7482 | 4962 | 1100 | 1663 | 10881 | 6320 | 8875 | 1487 | 3299 | |
| | 6493 | 7820 | 973 | 4224 | 6789 | 7146 | 11806 | 10590 | 8431 | 11300 | 1913 | 9775 | |
| | 7743 | 2113 | 3428 | 5019 | 11401 | 5529 | 1903 | 7592 | 3655 | 8165 | 11845 | 5638 | |
| | 6858 | 11376 | 7403 | 824 | 7304 | 8472 | 3295 | 8136 | 7078 | 2556 | 2691 | 4804 | |
| | 4179 | 11583 | 11575 | 9102 | 11213 | 3074 | 11867 | 3761 | 9059 | 4156 | 6311 | 10457 | |
| | 12201 | 3400 | 662 | 7056 | 8999 | 9787 | 1318 | 7425 | 1235 | 9162 | 462 | 11826 | |
| | 2887 | 1846 | 8604 | 871 | 9612 | 9641 | 8005 | 6947 | 8418 | 6650 | 8835 | 2217 | |
| | 1607 | 587 | 4853 | 4851 | 2261 | 11405 | 5131 | 3440 | 3463 | 8753 | 7505 | 1693 | |
| | 2532 | 7018 | 7816 | 2862 | 2859 | 5792 | 2825 | 11560 | 2464 | 7947 | 11222 | 8549 | |
| | 250 | 249 | 1118 | 1532 | 12578 | 6821 | 1665 | 5514 | 5491 | 5464 | 5495 | 5457 | |
| | 5437 | 5435 | 4797 | 3327 | 2871 | 1883 | 1886 | 8888 | 3837 | 11290 | 3378 | 9236 | |
| | 3257 | 8982 | 7124 | 9026 | 11772 | 12359 | 12060 | 9068 | 9120 | 5737 | 9856 | 6932 | |
| | 5948 | 7673 | 4368 | 9281 | 2134 | 3824 | 10371 | 2540 | 4223 | 2694 | 10633 | 2639 | |
| | 11261 | 9978 | 5068 | 7848 | 774 | 7835 | 5894 | 6079 | 11670 | 8244 | 10750 | 10141 | |
| | 2381 | 9058 | 6257 | 6588 | 3394 | 6012 | 1778 | 11268 | 11462 | 8660 | 2158 | 12387 | |
| | 10746 | 9187 | 4432 | 7406 | 10647 | 1146 | 7316 | 6100 | 1698 | 4358 | 879 | 1727 | |
| | 12205 | 7170 12545 | 6117 | 10722 | 12516 | 7294 | 12005 | 11165 | 1857 | 12042 | 6879 | | |
| | 3473 | 4353 | 2798 | 10096 | 2424 | 7595 | 9288 | 3396 | 4644 | 7051 | 6749 | 4932 | |
| | 1417 | 11847 | 8676 | 2675 | 3149 | 4493 | 8041 | 2231 | 10890 | 2301 | 3232 | 9139 | |
| | 3530 | 7139 | 7836 | 3718 | 12250 | 881 | 2373 | 3614 | 4126 | 9707 | 5779 | 9630 | |
| | 2905 | 11956 | 10260 | 8176 | 8370 | 1834 | 1301 | 5330 | 2572 | 10162 | 3878 | 8872 | |
| | 7166 | 12030 | 9648 | 2689 | 10149 | 10973 | 9109 | 4471 | 11920 | 685 | 6584 | 2239 | |
| | 10680 | 5472 | 5665 | 3253 | 2889 | 12470 | 8726 | 4199 | 6034 | 6623 | 4362 | 12405 | |
| | 6411 | 10429 | 12497 | 9570 | 1214 | 1030 | 617 | 829 | 10859 | 11229 | 1603 | 3932 | |
| | 1255 | 12084 | 10987 | 900 | 11188 | 2018 | 616 | 10866 | 6138 | 5522 | 1003 | 7084 | |
| | 10459 | 1656 | 9217 | 4190 | 10206 | 4395 | 11017 | 2310 | 3027 | 3199 | 8196 | 12409 | |
| | 1333 | 1930 | 7140 | 8939 | 3081 | 5939 | 1360 | 6958 | 10063 | 5908 | 2324 | 5587 | |
| | 735 | 1173 | 7035 | 8162 | 10945 | 7665 | 8546 | 4249 | 8439 | 4095 | 10156 | 10177 | |
| | 10176 | 931 | 2302 | 2377 | 8634 | 420 | 11000 | 2894 | 3098 | 4069 | 5285 | 1311 | |
| | 9272 | 6242 | 7611 | 3944 | 3947 | 5722 | 5719 | 5695 | 5720 | 5753 | 5727 | 5731 | |
| | 12515 | 9999 | 6710 | 9394 | 9395 | 4022 | 4024 | 10165 | 3990 | 10801 | 3995 | 10163 | |
| | 1553 | 3993 | 11441 | 10846 | 11136 | 7843 | 10491 | 4725 | 11489 | 4723 | 10823 | 5021 | |
| | 10914 | 3017 | 7338 | 10498 | 7898 | 10615 | 3506 | 626 | 4799 | 10409 | 11339 | 1805 | |
| | 7639 | 10281 | 10034 | 8405 | 11038 | 3492 | 8645 | 12001 | 5800 | 7175 | 4668 | 11480 | |
| | 9467 | 3156 | 11075 | 2995 | 7905 | 1423 | 5037 | 7870 | 7748 | 2283 | 9865 | 11865 | |
| | 5561 | 8231 | 8097 | 6110 | 8686 | 7829 | 8871 | 5715 | 1804 | 5644 | 4423 | 2259 | |
| | 11914 | 11250 | 8485 | 9933 | 716 | 6323 | 6799 | 3509 | 12565 | 7764 | 5263 | 9011 | |
| | 6246 | 4504 | 2358 | 8877 | 2182 | 11148 | 10158 | 5262 | 5258 | 4660 | 3899 | 6021 | |
| | 10821 | 10978 | 1801 | 8831 | 1936 | 6826 | 9977 | 3546 | 5982 | 3472 | 8460 | 3460 | |
| | 12528 | 5242 | 9347 | 8527 | 8657 | 8552 | 7744 | 6286 | 2066 | 9201 | 506 | 6016 | |
| | 5456 | 399 | 481 | 11107 | 9066 | 4390 | 6748 | 11573 | 5819 | 5182 | 9176 | 11244 | |
| | 8029 | 3399 | 7013 | 10161 | 10468 | 11469 | 5983 | 9301 | 5544 | 7268 | 5412 | 8121 | |
| | 3720 | 9353 | 2299 | 6358 | 3224 | 11486 | 2423 | 1330 | 12174 | 3550 | 4953 | 2783 | |
| | 11429 | 8828 | 8602 | 1300 | 9104 | 7287 | 8658 | 1986 | 5677 | 8336 | 12262 | 3449 | |
| | 4980 | 9514 | 7606 | 2388 | 1177 | 110820 | 1780 | 11551 | 2392 | 10995 | 9489 | 2737 | |
| | 8454 | 10493 | 975 | 1824 | 7713 | 12036 | 7172 | 8395 | 6062 | 4409 | 8222 | 5608 | |
| | 5031 | 12363 | 11455 | 2661 | 2189 | 5632 | 6561 | 3215 | 11858 | 2652 | 9866 | 8620 | |
| | 11816 | 2701 | 10674 | 568 | 11663 | 11649 | 9706 | 12317 | 12525 | 2916 | 8590 | 7129 | |
| | 9310 | 11073 | 7694 | 1472 | 5767 | 7178 | 8963 | 4159 | 3109 | 8186 | 2200 | 8688 | |
| | 5114 | 9659 | 6461 | 6519 | 5873 | 668 | 11777 | 10392 | 4625 | 10853 | 6210 | 3001 | |
| | 4310 | 1966 | 1885 | 7538 | 5702 | 8513 | 9937 | 10901 | 11642 | 2005 | 4671 | 9435 | |
| | 3667 | 4480 | 5740 | 6785 | 4971 | 10956 | 8452 | 11464 | 10848 | 11438 | 10851 | 10769 | |
| | 10766 | 10764 | 10763 | 3757 | 4574 | 11739 | 6869 | 8373 | 8666 | 10481 | 9606 | 12245 | |
| | 3756 | 3197 | 10861 | 6465 | 3593 | 6775 | 5984 | 599 | 7355 | 6537 | 7494 | 10728 | |
| | 12397 | 9341 | 2226 | 6185 | 10343 | 1288 | 4414 | 6983 | 8412 | 11161 | 11579 | 7999 | |
| | 8479 | 4489 | 1371 | 4138 | 5186 | 5969 | 6473 | 8915 | 8236 | 2240 | 2531 | 11898 | |
| | 4870 | 5512 | 1564 | 12165 | 5524 | 8233 | 5143 | 5631 | 5607 | 4034 | 2935 | 2934 | |
| | 12500 | 5110 | 8078 | 5324 | 762 | 823 | 10079 | 11491 | 8938 | 11159 | 11132 | 6131 | |
| | 11124 | 11129 | 11122 | 11440 | 6280 | 2750 | 8169 | 7635 | 7631 | 5372 | 5348 | 9233 | |
| | 9231 | 9221 | 9240 | 9235 | 9220 | 2122 | 3029 | 7040 | 12560 | 7016 | 8158 | 8759 | |
| | 8762 | 8163 | 7037 | 7822 | 8767 | 7066 | 7061 | 11467 | 942 | 6314 | 7384 | | |
| 330: | 12032 | 12416 | 9702 | 8311 | 9871 | 9085 | 3041 | 8757 | 2659 | 10930 | 4428 | 11833 | |
| | 11792 | 681 | 10543 | 7911 | 9410 | 8467 | 8008 | 9867 | 1772 | 8996 | 7033 | 11906 | |
| | 10828 | 7889 | 12234 | 1084 | 3276 | 8149 | 11266 | 8572 | 1344 | 7106 | 7107 | 4195 | |
| | 4547 | 11422 | 9561 | 4650 | 4648 | 2144 | 2142 | 2148 | 4680 | 4656 | 4653 | 633 | |
| | 5402 | 409 | 6305 | 10014 | 6859 | 12364 | 7575 | 5289 | 3907 | 7452 | 3669 | 11548 | |
| | 2333 | 4742 | 6830 | 2981 | | | | | | | | | |
| 331: | 10160 | 10640 | 8343 | 4802 | 1528 | 8856 | 515 | 677 | 952 | 7450 | 6251 | 4755 | |
| | 8449 | 10473 | 7390 | 6576 | 11718 | 2615 | 7103 | 10211 | 10977 | 4800 | 4314 | 7867 | |
| | 9639 | 7932 | 11248 | 3355 | 7617 | 2525 | 10518 | 5743 | 1589 | 8208 | 9668 | 5774 | |
| | 5974 | 5814 | 2961 | 9399 | 11092 | 5321 | 5264 | 1080 | 6145 | 7689 | 3942 | 7442 | |
| | 2483 | 11748 | 12331 | 12214 | 5980 | 5480 | 7320 | 5440 | 10776 | 4781 | 9666 | 3971 | |
| | 7979 | 3468 | 8146 | 4220 | 4413 | 3920 | 5416 | 8390 | 1957 | 5313 | 2735 | 11318 | |
| | 4437 | 9259 | 8429 | 11015 | 7585 | 7435 | 4475 | 12123 | 4830 | 7053 | 7352 | 3938 | |
| | 7110 | 6593 | 10656 | 966 | 3928 | 10099 | 12555 | 8109 | 11578 | 870 | 5664 | 6989 | |
| | 1416 | 12103 | 11181 | 5195 | 3488 | 8294 | 9944 | 970 | 7199 | 2188 | 8851 | 11185 | |
| | 6333 | 10583 | 8715 | 828 | 11105 | 2300 | 1272 | 4605 | 6204 | 7241 | 4961 | 932 | |
| | 1479 | 3941 | 6155 | 6654 | 2411 | 10311 | 3132 | 10779 | 6695 | 9113 | 4382 | 4370 | |
| | 3238 | 9765 | 5394 | 7378 | 8693 | 4023 | 3953 | 8976 | 2263 | 7064 | 10047 | 461 | |
| | 9468 | 1101 | 4079 | 4728 | 5158 | 8968 | 12479 | 5828 | 4916 | 9417 | 3032 | 2685 | |
| | 9018 | 10135 | 7048 | 897 | 10841 | 6006 | 3968 | 7120 | 6124 | 3102 | 7921 | 2064 | |
| | 9239 | 11783 | 2698 | 7415 | 5823 | 5635 | 11864 | 4640 | 593 | 4046 | 5343 | 6406 | |
| | 2792 | 8092 | 11513 | 1919 | 11764 | 10026 | 8691 | 2679 | 7600 | 10399 | 2289 | 5567 | |
| | 9801 | 2125 | 6284 | 9433 | 2993 | 427 | 11366 | 3581 | 3097 | 4014 | 12532 | 10913 | |
| | 8020 | 4751 | 4316 | 6734 | 1442 | 674 | 6025 | 5541 | 2179 | 7168 | 12170 | 805 | |
| | 3080 | 12469 | 11468 | 11287 | 5842 | 3282 | 9440 | 4309 | 12511 | 12508 | 2063 | 10517 | |
| | 6891 | 9594 | 11087 | 4606 | 8366 | 12400 | 7712 | 4288 | 6764 | | | | |
| 332: | 10160 | 10640 | 8343 | 4802 | 1528 | 8856 | 515 | 677 | 952 | 7450 | 6251 | 4755 | |
| | 8449 | 10473 | 7390 | 6576 | 11718 | 2615 | 7103 | 10211 | 10977 | 4800 | 4314 | 7867 | |
| | 9639 | 7932 | 11248 | 3355 | 7617 | 2525 | 10518 | 5743 | 1589 | 8208 | 9668 | 5774 | |
| | 5974 | 5814 | 2961 | 9399 | 11092 | 5321 | 5264 | 1080 | 6145 | 7689 | 3942 | 7442 | |
| | 2483 | 11748 | 12331 | 12214 | 5980 | 5480 | 7320 | 5440 | 10776 | 4781 | 9666 | 3971 | |
| | 7979 | 3468 | 8146 | 4220 | 4413 | 3920 | 5416 | 8390 | 1957 | 5313 | 2735 | 11318 | |
| | 4437 | 9259 | 8429 | 11015 | 7585 | 7435 | 4475 | 12123 | 4830 | 7053 | 7352 | 3938 | |
| | 7110 | 6593 | 10656 | 966 | 3928 | 10099 | 12555 | 8109 | 11578 | 870 | 5664 | 6989 | |
| | 1416 | 12103 | 11181 | 5195 | 3488 | 8294 | 9944 | 970 | 7199 | 2188 | 8851 | 11185 | |
| | 6333 | 10583 | 8715 | 828 | 11105 | 2300 | 1272 | 4605 | 6204 | 7241 | 4961 | 932 | |
| | 1479 | 3941 | 6155 | 6654 | 2411 | 10311 | 3132 | 10779 | 6695 | 9113 | 4382 | 4370 | |
| | 3238 | 9765 | 5394 | 7378 | 8693 | 4023 | 3953 | 8976 | 2263 | 7064 | 10047 | 461 | |
| | 9468 | 1101 | 4079 | 4728 | 5158 | 8968 | 12479 | 5828 | 4916 | 9417 | 3032 | 2685 | |
| | 9018 | 10135 | 7048 | 897 | 10841 | 6006 | 3968 | 7120 | 6124 | 3102 | 7921 | 2064 | |
| | 9239 | 11783 | 2698 | 7415 | 5823 | 5635 | 11864 | 4640 | 593 | 4046 | 5343 | 6406 | |
| | 2792 | 8092 | 11513 | 1919 | 11764 | 10026 | 8691 | 2679 | 7600 | 10399 | 2289 | 5567 | |
| | 9801 | 2125 | 6284 | 9433 | 2993 | 427 | 11366 | 3581 | 3097 | 4014 | 12532 | 10913 | |
| | 8020 | 4751 | 4316 | 6734 | 1442 | 674 | 6025 | 5541 | 2179 | 7168 | 12170 | 805 | |
| | 3080 | 12469 | 11468 | 11287 | 5842 | 3282 | 9440 | 4309 | 12511 | 12508 | 2063 | 10517 | |
| | 6891 | 9594 | 11087 | 4606 | 8366 | 12400 | 7712 | 4288 | 6764 | | | | |
| 333: | 1001 | 4906 | 8800 | 3344 | 2015 | 2020 | 4318 | 7710 | 10721 | 2563 | 3717 | 1228 | |
| | 4603 | 9718 | 1317 | 2819 | 8797 | 6896 | 9688 | 6275 | 6022 | 6023 | 6010 | 1908 | |
| | 12491 | 3275 | 4299 | 8601 | 4383 | 7942 | 5268 | 10515 | 3747 | 558 | 7924 | 8917 | |
| | 7861 | 7946 | 3744 | 1396 | 12348 | 7923 | 10606 | 2285 | 5758 | 7667 | 5463 | 5546 | |
| | 7922 | 5549 | 12374 | 2282 | 4005 | 11378 | 11112 | 7984 | 8811 | 12299 | 4713 | 3333 | |
| | 5889 | 7864 | 7940 | 1761 | 11398 | 3821 | 2238 | 4004 | 12159 | 9680 | 8705 | 9007 | |
| | 3972 | 10492 | 1765 | 8840 | 7860 | 1405 | 6159 | 11243 | 3817 | 1502 | 4711 | 9800 | |
| | 3945 | 8082 | 664 | 4003 | 6437 | 7684 | 4102 | 3973 | | | | | |
| 334: | 1523 | 2933 | 4956 | 6234 | 6928 | 5998 | 10172 | 7536 | 3631 | 3520 | 11142 | 5900 | |
| | 1996 | 8969 | 9226 | 7768 | 10920 | 10831 | 3174 | 10390 | 6829 | 6832 | 8422 | 3388 | |
| | 1617 | 5714 | 4375 | 10999 | 8464 | 2255 | 5214 | 4427 | 1955 | 4279 | 11633 | 594 | |
| | 3168 | 10884 | 6049 | 6631 | 6194 | 6223 | 5917 | 1368 | 1418 | 1351 | 5670 | 5697 | |
| | 1491 | 7354 | 7180 | 7371 | 6553 | 6011 | 928 | 10117 | 12297 | 3664 | 5929 | 4043 | |
| | 10992 | 1144 | 3217 | 7021 | 5189 | 4788 | 7603 | 5872 | 1107 | 10072 | 6527 | 5109 | |
| | 4881 | 9852 | 4108 | 7739 | 6628 | 8123 | 1613 | 4323 | 7377 | 1697 | 9620 | 11880 | |
| | 7781 | 3078 | 12259 | 3551 | 12426 | 10058 | 8744 | 1061 | 5971 | 584 | 4219 | 12527 | |
| | 954 | 11627 | 2114 | 1581 | 4135 | 3267 | 8356 | 9499 | 5531 | 7817 | 653 | 5065 | |
| | 6344 | 8377 | 12512 10041 | 10082 | 9401 | 6854 | 3502 | 5742 | 5954 | 4072 | 6097 | | |
| | 3479 | 7398 | 11510 | 2184 | 11738 | 9872 | 6915 | 6429 | 1743 | 9416 | 9586 | 5241 | |
| | 9345 | 2234 | 6173 | 3646 | 4997 | 10420 | 10452 | 10367 | 5827 | 8145 | 11490 | 8669 | |
| | 4217 | 10730 | 2926 | 9796 | 6632 | 5532 | 4988 | 10910 | 8890 | 9229 | 10771 | 12439 | |
| | 6960 | 5406 | 1309 | 7523 | 7626 | 4222 | 6737 | 8760 | 1394 | 2420 | 1149 | 7297 | |
| | 8017 | 7952 | 5653 | 1150 | 738 | 4811 | 6665 | 8704 | 6846 | 5297 | 11123 | 11135 | |
| | 11027 | 11963 | 4709 11761 | 3739 | 2835 | 10287 | 6587 | 9001 | 1595 | 1283 | 9529 | | |
| | 8087 | 10291 | 8801 | 8105 | 7255 | 2212 | 8972 | 5764 | 10625 | 3266 | 1263 | 4582 | |
| | 1874 | 10424 | 10061 | 6256 | 2767 | 6798 | 11099 | 7366 | 6400 | 2490 | 890 | 1425 | |
| | 9601 | 2202 | 4027 | 2609 | 8582 | 2990 | 3014 | 11219 | 545 | 1065 | 2693 | 3848 | |
| | 11452 | 768 | 7539 | 6889 | 5039 | 3505 | 11776 | 4037 | 10554 | 2960 | 5723 | 8927 | |
| | 2765 | 6091 | 11885 | 2884 | 8635 | 1971 | 800 | 7345 | 6787 | 9790 | 8855 | 2143 | |
| | 10288 | 4846 | 12471 | 3707 | 4833 | 11065 | 8698 | 10819 | 2897 | 1946 | 1486 | 3365 | |
| | 4763 | 2908 | 8774 | 3723 | 9111 | 8259 | 8421 | 8420 | 1073 | 1243 | 1671 | 2441 | |
| | 5303 | 941 | 11089 | 1314 | 10431 | 4320 | 598 | 6379 | 7019 | 10113 | 10060 | 4886 | |
| | 8623 | 840 | 8916 | 8438 | | | | | | | | | |
| 335: | 2809 | 1347 | 3070 | 5519 | 6353 | 4683 | 10278 | 7995 | 11147 | 4915 | 4817 | 7113 | |
| | 11420 | 1517 | 6416 | 864 | 2738 | 9453 | 8524 | 6360 | 1213 | 5208 | 9694 | 8994 | |
| | 10342 | 4151 | 9222 | 923 | 12313 | 3570 | 12419 | 12544 | 5536 | 8592 | 12258 | 1951 | |
| | 2817 | 1282 | 3183 | 945 | 10906 | 11904 | 5014 | 9906 | 9939 | 9963 | 1814 | 12017 | |
| | 11152 | 11151 | 10075 10440 | 8950 | 4508 | 1999 | 4019 | 10028 | 5341 | 5555 | 6544 | | |
| | 4470 | 5111 | 2582 | 5095 | 8529 | 9270 | 10532 | 2603 | 6266 | 5183 | 10616 | 12434 | |
| | 8392 | 9934 | 8028 11427 | 6678 | 10220 | 9984 | 10875 | 11154 | 2840 | 1899 | 1022 | | |
| | 10969 | 3615 | 6536 | 4357 | 11961 | 3073 | 9159 | 4192 | 8746 | 6211 | 7321 | 6531 | |
| | 7520 | 7943 | 11246 | 661 | 8912 | 7676 | 3024 | 8161 | 6508 | 3996 | 5054 | 10071 | |
| | 12039 | 2298 | 9149 | 9126 | 9123 | 9751 | 9200 | 7546 | 2175 | 9419 | 9670 | 3977 | |
| | 8562 | 7711 | 4388 11106 | 10681 | 1738 | 3580 | 7344 | 5299 | 8466 | 1572 | 1735 | | |
| | 543 | 562 | 9152 | 9147 | 2211 | 2353 | 11077 | 8007 | 12109 | 11282 | 8761 | 1917 | |
| | 10666 | 2558 | 2560 | 9258 | 6729 | 10691 | 10570 | 8130 | 10658 | 11009 | 1060 | 2523 | |
| | 12128 | 11669 | 1851 | 3077 | 10021 | 8747 | 3062 | 7751 | 8521 | 8185 | 10968 | 7149 | |
| | 4920 | 5826 | 9879 | 6009 | 4918 | 6638 | 6614 | 4899 | 6609 | 9959 | 9996 | 6005 | |
| | 9882 | 6007 | 9936 | 9970 | 9880 | 9915 | 9993 | 4923 | 5794 | 9941 | 6610 | 9912 | |
| | 9935 | 9962 | 9991 | 6637 | 9908 | 9957 | 9998 | 4974 | 5931 | 5857 | 5830 | 5852 | |
| | 5865 | 5903 | 5833 | 5862 | 5007 | 11889 | 5093 | 5096 | 5098 | 4978 | 4892 | 6002 | |
| | 5934 | 5788 | 5751 | 5785 | 5958 | 5985 | 5981 | 5822 | 6640 | 6671 | 6643 | 6645 | |
| | 5227 | 12542 | 2875 | 1909 | 2273 | 10016 | 12407 | 9117 | 9178 | 9210 | 9182 | 9211 | |
| | 1910 | 9186 | 9184 | 9148 | 12431 | 8650 | 2612 | 6985 | 991 | 8849 | 3562 | 3545 | |
| | 10129 | 11329 | 3522 | 3568 | 3590 | 422 | 3516 | 8470 | 3541 | 3587 | 3515 | 3566 | |
| | 1261 | 11303 | 11387 | | | | | | | | | | |
| 336: | 1608 | 435 | 1809 | 1808 | 1819 | 1810 | 1815 | 9824 | 7252 | 398 | 2455 | 9562 | |
| | 9559 | 9493 | 5003 10119 | 12283 | 9948 | 9836 | 733 | 7039 | 4426 | 11479 | 5470 | | |
| | 5490 | 5468 | 8773 | 3533 | 7619 | 7474 | 9197 | 6331 | 8737 | 6962 | 6914 | 5554 | |
| | 10872 | 10869 | 10868 10799 | 10895 | 10845 | 10893 | 3095 | 11702 | 12076 | | | | |
| 337: | 6292 | 6296 | 2925 | 9234 | 4245 | 4030 | 8504 | 3729 | 1278 | 1276 | 2356 | 11921 | |
| | 6564 | 9267 | 7681 | 6571 | 6315 | 4473 | 7249 | 6569 | 1545 | 1549 | 8359 | 8695 | |
| | 6567 | 8697 | 1550 | 6294 | 5078 | 11515 | 1009 | 9626 | 6313 | 8442 | | | |
| 338: | 9269 | 4225 | 5257 | 2039 | 4327 | 4244 | 3256 | 9569 | 11115 | 2874 | 10078 | 11414 | |
| | 2797 | 1571 | 3740 | 5525 | 4757 | 2614 | 4167 | 2496 | 7866 | 1249 | 5672 | 2395 | |
| | 4801 | 11979 | 7313 | 3495 | 4528 | 7535 | 5017 | 5728 | 2539 | 3381 | 9306 | 1978 | |
| | 4272 | 8853 | 5847 | 7159 | 9691 | 3906 | 6563 | 1506 | | | | | |
| 339: | 9269 | 4225 | 5257 | 2039 | 4327 | 4244 | 3256 | 9569 | 11115 | 2874 | 10078 | 11414 | |
| | 2797 | 1571 | 3740 | 5525 | 4757 | 2614 | 4167 | 2496 | 7866 | 1249 | 5672 | 2395 | |
| | 4801 | 11979 | 7313 | 3495 | 4528 | 7535 | 5017 | 5728 | 2539 | 3381 | 9306 | 1978 | |
| | 4272 | 8853 | 5847 | 7159 | 9691 | 3906 | 6563 | 1506 | | | | | |
| 340: | 9784 | 5190 | 4849 | 6165 | 8502 | 4479 | 10406 | 10268 | 5977 | | | | |
| 341: | 9784 | 5190 | 4849 | 6165 | 8502 | 4479 | 10406 | 10268 | 5977 | | | | |
| 342: | 647 | 2051 | 8014 | 3393 | 10620 | 7556 | 1770 | 6506 | 9947 | 5875 | 5960 | 5682 | |
| | 2115 | 7965 | 1026 | 4342 | 9448 | 12338 | 2530 | 2052 | 2057 | 9802 | 4635 | 6263 | |
| | 6250 | 6265 | 648 | 7349 | 7090 | 4593 | 1421 | 11800 | 7799 | 10710 | 6823 | 12510 | |
| | 6930 | 3206 | 10032 | | | | | | | | | | |
| 343: | 6115 | 8689 | 3274 | 2618 | 8107 | 4944 | 6200 | 8541 | 802 | 2608 | 8397 | 6422 | |
| | 7563 | 3305 | 10923 | 2865 | 2164 | 4187 | 4295 | 4903 | 10152 | 6888 | 2980 | 11640 | |
| | 4652 | 592 | 4424 | 7353 | 9920 | 9891 | 11011 | 11040 | 1231 | 8681 | 10778 | 1227 | |
| | 8900 | 4843 | 9156 | 2011 | 1415 | 8510 | 869 | 3034 | 3801 | 11645 | 10469 | 10547 | |
| | 455 | 693 | 2502 | 3309 | 12029 | 12320 | 1471 | 7941 | 1465 | 11436 | 4387 | 1876 | |
| | 7757 | 4591 | 2992 | 12535 | 5012 | 1066 | 5511 | 7220 | 6287 | 9982 | 639 | 5884 | |
| 344: | 6115 | 8689 | 3274 | 2618 | 8107 | 4944 | 6200 | 8541 | 802 | 2608 | 8397 | 6422 | |
| | 7563 | 3305 | 10923 | 2865 | 2164 | 4187 | 4295 | 4903 | 10152 | 6888 | 2980 | 11640 | |
| | 4652 | 592 | 4424 | 7353 | 9920 | 9891 | 11011 | 11040 | 1231 | 8681 | 10778 | 1227 | |
| | 8900 | 4843 | 9156 | 2011 | 1415 | 8510 | 869 | 3034 | 3801 | 11645 | 10469 | 10547 | |
| | 455 | 693 | 2502 | 3309 | 12029 | 12320 | 1471 | 7941 | 1465 | 11436 | 4387 | 1876 | |
| | 7757 | 4591 | 2992 | 12535 | 5012 | 1066 | 5511 | 7220 | 6287 | 9982 | 639 | 5884 | |
| 345: | 6421 | 3565 | 10219 | 3371 | 7840 | 1723 | 6161 | 8243 | 1865 | 1827 | 11869 | 623 | |
| | 11423 | | | | | | | | | | | | |
| 346: | 4514 | 1219 | 10858 | 6672 | 3259 | 7266 | 4215 | 8062 | 4171 | 9227 | 9633 | 8002 | |
| | 12033 | 8080 | 11367 | 8440 | 6700 | 1911 | 6590 | 9230 | 12194 | 6068 | 7562 | 11521 | |
| | 11587 | 4044 | 9133 | 6736 | 1178 | 4773 | 9782 | 5388 | 3122 | 8821 | 6226 | 3789 | |
| | 3527 | 8952 | 6047 | 7411 | 5290 | 6426 | 6216 | 10419 | 4816 | 7615 | 2761 | 9079 | |
| | 11600 | 4502 | 9850 | 8065 | 6902 | 1436 | 5686 | 10898 | 8152 | 8155 | 4230 | 5104 | |
| | 1659 | 7568 | 8560 | 5585 | 5128 | 6679 | 9332 | 9329 | 2095 | 6346 | 6659 | 5701 | |
| | 4884 | 9654 | 8034 | 10115 | 8557 | 9587 | 3182 | 7231 | 9717 | 11375 | 6070 | 2404 | |
| | 1767 | 7075 | 7455 | 2457 | 5255 | 7959 | 6350 | 5750 | 1414 | 903 | 2341 | 7578 | |
| | 10703 | 927 | 2248 | 12132 | 863 | 9883 | 618 | 3678 | 12480 | 8396 | 7847 | 9558 | |
| | 11682 | 2469 | 7373 | 10386 | | | | | | | | | |
| 347: | 712 | 11134 | 11581 | 8135 | 891 | 5866 | 7918 | 1721 | 10277 | 4963 | 7671 | 9567 | |
| | 512 | 10630 | 6458 | 3683 | 8419 | 4724 | 5955 | 3114 | 1441 | 4439 | 11628 | 5184 | |
| | 10737 | 9308 | 6612 | 10159 | 5721 | 6759 | 12507 | 7299 | 10335 | 5504 | 6758 | 9577 | |
| | 5043 | 4852 | 9868 | 1887 | 6733 | 9951 | 5843 | 11373 | 4090 | 3481 | 10450 | 10709 | |
| | 11672 | 6568 | 11882 | 3797 | 5745 | 9469 | 9268 | 11804 | 10475 | 11196 | 6964 | 2129 | |
| | 10514 | 1370 | 7659 | 6865 | 3006 | 7240 | 6661 | 9988 | 1853 | 1109 | 2594 | 12193 | |
| | 12188 | 1329 | 10264 | 9045 | 8986 | 1929 | 1933 | 1935 | 10650 | 10654 | 7773 | 7801 | |
| | 7804 | 10477 | 8219 | 11698 | 7655 | 11574 | 11544 | 11582 | 12562 | 11164 | 10876 | 11182 | |
| | 11162 | 11184 | 2858 | 7770 | 11817 | 2155 | 8830 | 5410 | 2736 | 6061 | 6540 | 2047 | |
| | 6065 | 10171 | 3804 | 3392 | 10297 | 3117 | 315 | 8052 | 9815 | 7301 | 7324 | 7454 | |
| | 9151 | 2165 | 1994 | 11179 | 11370 | 7116 | 7222 | 9215 | | | | | |
| 348: | 2559 | 10307 | 2499 | 8094 | 9328 | 6121 | 1307 | 6139 | 3619 | 3556 | 2873 | 5711 | |
| | 1391 | 1177 | 10048 | 10133 | | | | | | | | | |
| 349: | 2559 | 10307 | 12499 | 8094 | 9328 | 6121 | 1307 | 6139 | 3619 | 3556 | 2873 | 5711 | |
| | 1391 | 1177 | 10048 | 10133 | | | | | | | | | |
| 350: | 6170 | 10387 | 820 | 4182 | 9177 | 11720 | 535 | 1444 | 1262 | 10488 | 10083 | 6092 | |
| | 11526 | 11371 | 6812 | 8205 | 9677 | 11325 | 10718 | 2183 | 531 | 3846 | 7492 | 6927 | |
| | 3466 | 4554 | 2717 | 6059 | 7927 | 9446 | 9471 | 9470 | 9476 | 9478 | 9497 | 9473 | |
| | 4854 | 7761 | 2526 | 10504 | 7846 | 1389 | 4350 | 1888 | 4581 | 4583 | 4560 | 4564 | |
| | 1751 | 8487 | 8489 | 11499 | 9701 | 5856 | 8745 | 2880 | 1803 | 1156 | 3107 | 8710 | |
| | 3704 | 3010 | 2932 | 6861 | 2743 | 4442 | 4774 | 3639 | 1620 | | | | |
| 351: | 6170 | 10387 | 820 | 4182 | 9177 | 11720 | 535 | 1444 | 1262 | 10488 | 10083 | 6092 | |
| | 11526 | 11371 | 6812 | 8205 | 9677 | 11325 | 10718 | 2183 | 531 | 3846 | 7492 | 6927 | |
| | 3466 | 4554 | 2717 | 7927 | 9446 | 9471 | 9470 | 9476 | 9497 | 9478 | 9473 | 4854 | |
| | 7761 | 2526 | 7846 | 10504 | 1389 | 4350 | 1888 | 4560 | 4583 | 4581 | 4564 | 1751 | |
| | 8489 | 8491 | 8487 | 11499 | 9701 | 5497 | 1579 | 5856 | 8745 | 6856 | 6470 | 11959 | |
| | 10131 | 827 | 11101 | 1374 | 5291 | 940 | 6870 | 10411 | 4058 | 11708 | 1247 | 2414 | |
| | 4133 | 2045 | 6039 | 6478 | 9442 | 3602 | 2111 | 438 | 1381 | 10648 | 6711 | 3008 | |
| | 11169 | 8555 | 7810 | 1872 | 10183 | 6946 | 2555 | 12266 | 6834 | 5375 | 7465 | 11021 | |
| | 2915 | 644 | 9326 | 3230 | 9185 | 11781 | 6084 | 7725 | 8511 | 12308 | 7518 | 6096 | |
| | 8053 | 10529 | 4914 | 11994 | 2145 | 11924 | 1386 | 1880 | 7453 | 1927 | 8819 | 1341 | |
| | 2473 | 11742 | 8710 | 3107 | 3704 | 10948 | 9928 | 3010 | 2932 | 6861 | 2743 | 4442 | |
| | 4774 | 3639 | 3165 | | | | | | | | | | |
| 352: | 2857 | 10800 | 6701 | 7881 | 9041 | 3658 | 3547 | 9249 | 12438 | 6098 | 7560 | 8334 | |
| | 2860 | 10885 | 3337 | 6907 | 1104 | 98959 | 5754 | 5088 | 12031 | 10458 | 6468 | 3887 | |
| | 3163 | 9860 | 9548 | 487 | 8326 | 1271 | 5539 | 9371 | 9340 | 11769 | 1153 | 11238 | |
| | 11180 | 10497 | 10116 | 1083 | 7915 | 11006 | 5436 | 5438 | 5434 | 1342 | 3075 | 9664 | |
| | 9905 | 8539 | 2635 | 2390 | 1771 | 7095 | 11918 | 3829 | 6122 | 9096 | 11562 | 7609 | |
| | 773 | 12429 | 11502 | 1670 | 1652 | 9013 | 9009 | 9012 | 5992 | 1460 | 3254 | 5360 | |
| | 3832 | 8714 | 4271 | 11931 | 11928 | 10964 | 8362 | 12312 | 7680 | 8286 | 9295 | 4400 | |
| | 11687 | 9265 | 8142 | 8140 | | | | | | | | | |
| 353: | 1313 | 51971 | 2526 | 7194 | 4127 | 10569 | 10567 | 3130 | 11756 | 3924 | 11824 | 5150 | |
| | 1597 | 7330 | 7336 | 5733 | 1840 | 8995 | 10023 | 5309 | 9183 | 3811 | 2799 | 3176 | |
| | 1007 | 2780 | 10768 | 11917 | 12044 | 4188 | 1537 | 9091 | 4172 | 1215 | 11954 | 5210 | |
| | 11001 | 6054 | 396 | 6093 | 789 | 7265 | 10056 | 5622 | 7269 | 2665 | 1409 | 1402 | |
| | 5885 | 10020 | 10587 | 2719 | 6657 | 10054 | 6174 | 9953 | 8025 | 2252 | 4474 | 1348 | |
| | 5691 | 2034 | 9180 | 3591 | 10519 | 5492 | 4422 | 2710 | 2076 | 8465 | 12482 | 7571 | |
| | 11887 | 6428 | 3260 | 11018 | 10323 | 834 | 11437 | 5486 | 604 | 7553 | 388 | 11872 | |
| | 9188 | 4081 | 6905 | 11306 | 7202 | 8348 | 5018 | 9023 | 9484 | 9512 | 4553 | 11385 | |
| | 2233 | 1463 | 8789 | 7834 | 11916 | 4286 | 2350 | 11883 | 8565 | 1749 | 1023 | 10744 | |
| | 4181 | 6476 | 5850 | 1090 | 11086 | 5178 | 2911 | 2349 | 5771 | 610 | 2885 | 5427 | |
| | 3735 | 3349 | 649 | 847 | 11740 | 439 | 4459 | 10523 | 846 | 4315 | 7823 | 8415 | |
| | 6975 | 9073 | 10143 | 8957 | 2315 | 2292 | 6603 | 1321 | 8167 | 11331 | 9757 | 6755 | |
| | 2327 | 2730 | 11943 | 11848 | 5411 | 5103 | 10812 | 8103 | 4922 | 9555 | 12323 | 9526 | |
| | 3046 | 4303 | 9846 | 9636 | 10415 | 2376 | 7618 | 90491 | 18631 | 2452 | 9813 | 8070 | |
| | 10257 | 3030 | 4031 | 4065 | 17161 | 2281 | 6543 | 5890 | 6492 | 3741 | 8608 | 6220 | |
| | 3053 | 9086 | 637 | 6653 | 8593 | 11408 | 12357 | 6247 | 4629 | 2842 | 5476 | 10303 | |
| | 2032 | 8190 | 1284 | 12440 | 9307 | 3477 | 2901 | 4407 | 5191 | 10111 | 4218 | 4412 | |
| | 11723 | 7627 | 1891 | 7522 | 2323 | 8023 | 4766 | 8763 | 3951 | 8643 | 2501 | 5759 | |
| | 1647 | 1794 | 11762 | 5216 | 5233 | 8857 | 11939 | 11126 | 5668 | 5621 | 11780 | 2443 | |
| | 5526 | 448 | 7298 | 6966 | 8734 | 1104 | 5647 | 2321 | 12229 | 10556 | 1362 | 7312 | |
| | 5089 | 4558 | 784 | 7286 | 2999 | 10921 | 10659 | 6804 | 659 | 6020 | 7233 | 6496 | |
| | 4454 | 10299 | 11650 | 6596 | 4378 | 2529 | 10338 | 1375 | 573 | 2224 | 12213 | 1763 | |
| | 1605 | 830 | 5001 | 10446 | 3830 | 4701 | 776 | 9314 | 6716 | 7514 | 3121 | 8862 | |
| | 3508 | 8463 | 1757 | 6913 | 8530 | 5097 | 7740 | 2770 | 459 | 4180 | 2049 | 3855 | |
| | 9103 | 6909 | 2972 | 4374 | 2939 | 12517 | 6215 | 6073 | 6945 | 11644 | 2408 | 8583 | |
| | 12484 | 6919 | 5474 | 3709 | 3313 | 12163 | 3116 | 9475 | 8417 | 10673 | 6369 | 4831 | |
| | 1516 | 1241 | 7797 | 6820 | 8998 | 1997 | 1768 | 2328 | 7424 | 11978 | 8750 | 7780 | |
| | 11894 | 3142 | 12577 | 12293 | 11312 | 2772 | 11537 | 10690 | 1718 | 8646 | 8086 | 4294 | |
| | 9402 | 9400 | 4982 | 4149 | 8342 | 12024 | 2655 | 10289 | 6995 | 8495 | 7186 | 9136 | |
| | 9600 | 4718 | 3389 | 4542 | 519 | 4041 | 992 | 7372 | 1002 | 11226 | 2528 | 12519 | |
| | 1542 | 11389 | 1514 | 6818 | 3426 | 4183 | 9065 | 7662 | 8073 | 521 | 1525 | 6163 | |
| | 861 | 8690 | 2566 | 11361 | 9685 | 12230 | 8817 | 4888 | | | | | |
| 354: | 5626 | 2966 | 4663 | 4805 | 5637 | 8787 | 12445 | 11680 | | | | | |
| 355: | 9746 | 2454 | 2820 | 6126 | 9527 | 11327 | 4206 | 1124 | | | | | |
| 356: | 3803 | 2159 | 11265 | 10262 | 1208 | 2265 | 6548 | 4559 | 9949 | 8892 | 1253 | 5869 | |
| | 6212 | 6017 | 11175 | 3155 | 5749 | 2919 | 12006 | 2161 | 7594 | 10558 | 12270 | | |
| 357: | 11897 | 12310 | 11976 | 5165 | 7935 | 565 | 11277 | 908 | 12483 | 7089 | 11639 | | |
| 358: | 7374 | 4134 | 5499 | 4481 | 11052 | 4793 | 5466 | 6747 | 3954 | 6213 | 640 | 4867 | |
| | 12055 | 11571 | 3592 | 1079 | 5345 | 10097 | 11174 | 7895 | | | | | |
| 359: | 10455 | 9279 | 2524 | 4394 | 10985 | 4178 | 3240 | 6391 | 10552 | 3567 | 2029 | 1042 | |
| | 1797 | 11402 | 7449 | 8268 | 2462 | 865 | 5988 | 3908 | 14041 | 1416 | 5916 | 7278 | |
| | 7325 | 12549 | 7885 | 7883 | 6455 | 11569 | 6302 | 12413 | 9181 | 1962 | 2013 | 3143 | |
| | 8399 | 10462 | 7807 | 7806 | 3136 | 3131 | 11003 | 1251 | 7387 | 2412 | 10649 | 10077 | |
| | 4839 | 7683 | 6752 | 8353 | 3902 | 11971 | 9700 | 7909 | 1974 | 1145 | 11946 | 8178 | |
| | 8457 | | | | | | | | | | | | |
| 360: | 243 | 8836 | 3558 | 6739 | 5558 | 11923 | 11784 | 11730 | 10397 | 3528 | 7134 | 8772 | |
| | 7228 | 2453 | 8340 | 7839 | 1256 | 10038 | 12184 | | | | | | |
| 361: | 10213 | 10215 | 12148 | 10197 | 1692 | 10198 | 10202 | 12341 | 3385 | 2836 | 6484 | 11717 | |
| | 10618 | 3411 | 10927 | 6460 | 1921 | 10241 | 1907 | 12389 | 7827 | 9025 | 5807 | 6681 | |
| | 12391 | 12411 | 6550 | 974 | 5415 | 9578 | 5213 | 4987 | 4080 | 12522 | 2369 | 12124 | |
| | 4767 | 6352 | 7944 | 10217 | 10216 | 3413 | 9071 | 3511 | 11013 | 10218 | 7981 | 8298 | |
| | 9862 | 2132 | 530 | 3844 | 6662 | 6625 | 4550 | 6341 | 1722 | 7027 | 9323 | 5094 | |
| | 3611 | 2266 | 4530 | 7763 | 7290 | 11753 | 2081 | 4242 | 11360 | 1239 | 2673 | 4531 | |
| | 8677 | 4930 | 2570 | 7994 | 6309 | 4476 | 9282 | 6794 | 3851 | 3634 | 3637 | 10242 | |
| | 10245 | | | | | | | | | | | | |
| 362: | 922 | 10181 | 10184 | 6562 | 3258 | 6528 | 6629 | 1180 | 9451 | 406 | 6910 | 5922 | |
| | 8885 | 9557 | 3599 | 7579 | 7047 | 2882 | 10405 | 3975 | 532 | 1868 | 2867 | 574 | |
| | 1859 | 6925 | 6880 | 950 | 10421 | 6722 | 1464 | 1500 | 5038 | 12068 | 3134 | 12241 | |
| | 9985 | 5705 | 3554 | 11752 | 2337 | 1748 | 4287 | 7838 | 8011 | 5651 | 5941 | 9051 | |
| | 5564 | 4621 | 7863 | 2536 | 5059 | 5773 | 5837 | 12335 | 6680 | 7099 | 7118 | 10998 | |
| | 2432 | 2463 | 1750 | 9628 | 6813 | 3628 | 9033 | 5836 | 10449 | 5420 | 5207 | 3387 | |
| | 7412 | 3524 | 394 | 11949 | 8547 | 4036 | 6873 | 1600 | 1443 | 5349 | 4233 | 9783 | |
| | 7318 | 2864 | 11057 | 1323 | 3052 | 10007 | 2599 | 6329 | 9359 | 7436 | 7657 | 11879 | |
| | 1025 | 12197 | 9682 | 10707 | 9968 | 4445 | 801 | 8656 | 6142 | 2948 | 7184 | 4255 | |
| | 10302 | 10364 | 12386 | 73091 | 2216 | 6438 | 2050 | 3050 | 2920 | 5965 | 11072 | 9831 | |
| | 3854 | 5662 | 12003 | 3011 | 2728 | 9738 | 1017 | 8134 | 526 | | | | |
| 363: | 6176 | 8639 | 1152 | 1522 | 8352 | 6375 | 10201 | 5139 | 8072 | 2308 | 4150 | 3445 | |
| | 7428 | 2024 | 4633 | 4866 | 2581 | 12337 | 12476 | 10035 | 8153 | 11036 | 3036 | 7174 | |
| | 5414 | 3759 | 9595 | 1795 | 7561 | 5236 | 11547 | 1813 | 1163 | 4779 | 3695 | 4760 | |
| | 6556 | 8661 | 11299 | 11986 | 8914 | 10050 | 11070 | 4068 | 809 | 4568 | 3229 | 10263 | |
| | 4659 | 10993 | 8382 | 1047 | 2931 | 9895 | 4478 | 1570 | 7237 | 4269 | 3838 | 1016 | |
| | 4137 | 11183 | 12276 | 11482 | 9854 | 11264 | 3433 | 7046 | 8216 | 3513 | 9383 | 8148 | |
| | 1602 | 6058 | 2215 | 1842 | 5999 | 10212 | 8258 | 6591 | 4686 | 9520 | 8497 | 6648 | |
| | 3088 | 6786 | 5986 | 4715 | 7335 | 6510 | 1839 | 5658 | 2103 | 11352 | 7577 | 4634 | |
| | 7828 | 9426 | 11791 | 11970 | 560 | 12269 | 10454 | 3529 | 7253 | 5891 | 880 | 4009 | |
| | 2760 | 7540 | 9015 | 8638 | 3356 | 5775 | 10574 | 1338 | 12117 | 3249 | 7644 | 9762 | |
| | 3751 | 7042 | 3672 | 4202 | 5589 | 6019 | 9835 | 7229 | 7693 | 3086 | 10296 | 9608 | |
| | 11707 | 2588 | 6425 | 9954 | 7071 | 10204 | 7525 | 6469 | 3192 | 5805 | 6230 | 4385 | |
| | 2180 | 6991 | 11841 | 9662 | 5353 | 2773 | 10791 | 3059 | 6304 | 7745 | 5886 | 6518 | |
| | 1536 | 1863 | 1385 | 5022 | 6003 | 8904 | 7257 | 9755 | 11607 | 11221 | 6807 | 4696 | |
| | 8329 | 9798 | 1221 | | | | | | | | | | |
| 364: | 4714 | 6552 | 6036 | 9637 | 11177 | 7157 | 2425 | 8841 | 4455 | 8468 | 3444 | 8404 | |
| | 3936 | 763 | 10942 | 1668 | 885 | 1786 | 10802 | 7271 | 8055 | 4969 | 11623 | 3054 | |
| | 11828 | 2575 | 5685 | 5924 | 5460 | 4819 | 9989 | 11834 | 10380 | 5520 | 9589 | 3334 | |
| | 4912 | 9894 | 7974 | 8700 | 12342 | | | | | | | | |
| 365: | 4543 | 9647 | 3507 | 1211 | 3246 | 10549 | 2019 | 2094 | 4177 | 4338 | 9238 | 5770 | |
| | 4772 | 6343 | 4048 | 12231 | 10905 | 12008 | 4926 | 12442 | 2270 | 5780 | 11506 | 7565 | |
| | 1094 | 12147 | 1451 | 473 | 3294 | 11314 | 9173 | 2035 | 2593 | 12094 | 5494 | 5488 | |
| | 3087 | 2026 | 8206 | 9878 | 4705 | 10472 | 4746 | 6642 | 5937 | 8790 | 11896 | 2244 | |
| | 5026 | 5835 | 7953 | 11936 | 10110 | 7133 | 3785 | | | | | | |
| 366: | 10341 | 5696 | 6298 | 2325 | 2938 | 8027 | 1580 | 7429 | 589 | 12057 | 10353 | 3976 | |
| | 3860 | 1646 | 9225 | 842 | 5818 | 4573 | 1901 | 8803 | | | | | |
| 367: | 4208 | 3058 | 2394 | 8507 | 2917 | 6904 | 1345 | 10919 | 4336 | 1202 | 7187 | 1114 | |
| | 3353 | 3660 | 2387 | 8437 | 9496 | 9413 | 11082 | 8079 | 12040 | 2841 | 4934 | 12221 | |
| | 8040 | 4875 | 7674 | 11844 | 10774 | 6033 | 11664 | 5283 | 5192 | 1085 | 3967 | 2564 | |
| | 3007 | 11334 | 11393 | 9940 | 872 | 2508 | 12169 | 3721 | 6130 | 1306 | 5401 | 10879 | |
| | 883 | 9814 | 5802 | 10180 | 6895 | 7491 | 3952 | 4386 | 8159 | 1106 | 5271 | 6278 | |
| | 4124 | 11612 | 6546 | 556 | 9556 | 5366 | 11798 | 6295 | 10902 | 3531 | 3572 | 3574 | |
| | 7418 | 3765 | 2343 | 7356 | 6349 | 9808 | 3624 | 9583 | 6431 | 3128 | 8098 | 3871 | |
| | 2494 | 1319 | 2271 | 4787 | 1838 | 1456 | 5064 | 6878 | 9972 | 8908 | 6774 | 3809 | |
| | 8730 | 11094 | 670 | 1496 | 5212 | 3588 | 9459 | 8518 | 6963 | 10018 | 7791 | 8264 | |
| | 2418 | 6442 | 11211 | 1636 | 6014 | 5278 | 4155 | 11100 | 10528 | 11481 | 10313 | 7126 | |
| | 8887 | 2600 | 11160 | 3425 | 5846 | 4898 | 4527 | 6393 | 12267 | 1747 | 10239 | 10330 | |
| | 3670 | 10329 | 10327 | 11203 | 10715 | 8883 | 10249 | 1046 | 11155 | 5228 | 2070 | 2128 | |
| | 7076 | 6412 | 6875 | 5853 | 8795 | 564 | 9262 | 2640 | 5083 | 1875 | 6898 | 6951 | |
| | 12373 | 7127 | | | | | | | | | | | |
| 368: | 6754 | 10585 | 6689 | 9826 | 964 | 4693 | 8822 | 6462 | 691 | 2410 | 9712 | 9884 | |
| | 3219 | 7232 | 12539 | 1991 | 11008 | 9322 | 8725 | | | | | | |
| 369: | 1461 | 7305 | 10596 | 7966 | 8323 | 9036 | 4856 | 433 | 2663 | 8335 | 8509 | 11775 | |
| | 10231 | 5820 | 8056 | 12556 | 5630 | 11866 | 9292 | 2220 | 509 | 12153 | 7303 | 12393 | |
| | 7926 | | | | | | | | | | | | |
| 370: | 1200 | 12300 | 576 | 5306 | 8372 | 2320 | 7732 | 6788 | 3633 | 10013 | 657 | 1403 | |
| | 10074 | 7663 | 6585 | 8051 | 2569 | 2722 | 8325 | 1121 | 11616 | 4248 | 6146 | 4276 | |
| | 2647 | 5766 | 9625 | 10767 | 6273 | 4186 | 6188 | 3988 | 4877 | 3998 | 8151 | 6018 | |
| | 2040 | 595 | | | | | | | | | | | |
| 371: | 1200 | 12300 | 6283 | 5306 | 1573 | 8372 | 9432 | 1142 | 533 | 2320 | 7732 | 370 | |
| | 1267 | 595 | 3852 | | | | | | | | | | |
| 372: | 7477 | 1676 | 4448 | 2400 | 6045 | 6940 | 9923 | 11995 | 8913 | 10513 | 634 | 7969 | |
| | 11746 | 6446 | 4371 | 1018 | 4026 | 10874 | 11604 | 5505 | 9219 | 4140 | 6427 | 12025 | |
| | 1669 | 3605 | 5027 | 10847 | 11128 | 1483 | 9362 | 2044 | 12343 | 3560 | 430 | 11220 | |
| | 12146 | 10479 | 7769 | 4704 | 5385 | 12424 | 3286 | 1435 | 12461 | 10990 | 7985 | 5652 | |
| | 6086 | 12067 | 2785 | 6367 | 3470 | 2598 | 10591 | 4756 | 2959 | 10900 | 11878 | 12536 | |
| | 5795 | 12559 | 5450 | 8391 | 10046 | 7073 | 3157 | 2834 | 8144 | 2236 | 2782 | 1926 | |
| | 9617 | 1987 | 2822 | 2279 | 2196 | 10312 | 5369 | 10124 | 11903 | 12289 | 4170 | 12092 | |
| | 8540 | 2362 | 12010 | 5204 | 9431 | 6620 | 3500 | 9585 | 7989 | 1508 | 4885 | 877 | |
| | 6119 | 3807 | 2585 | 12330 | 4380 | 3820 | 5302 | 3056 | 6337 | 2060 | 3096 | 202 | |
| | 4492 | 1604 | 11737 | 710 | 8574 | 11646 | 3171 | 9030 | 765 | 5680 | 10955 | 6592 | |
| | 2624 | 9114 | 5576 | 5196 | 5912 | 1980 | 11275 | 1119 | 3929 | 9810 | 12099 | 11930 | |
| | 4546 | 3504 | 1950 | 7696 | 374 | 1703 | | | | | | | |
| 373: | 7477 | 1676 | 4448 | 2400 | 6045 | 6940 | 9923 | 8913 | 10513 | 6341 | 1746 | 6446 | |
| | 4371 | 1018 | 4026 | 11604 | 5505 | 9219 | 4140 | 6427 | 12025 | 3605 | 11128 | 9362 | |
| | 1483 | 5027 | 10847 | 2044 | 12343 | 3560 | 430 | 11220 | 12146 | 12424 | 3286 | 12461 | |
| | 10479 | 10990 | 5652 | 5385 | 6086 | 4704 | 7769 | 7985 | 2785 | 6367 | 10591 | 10900 | |
| | 11878 | 12536 | 12559 | 12067 | 10046 | 3157 | 5450 | 8144 | 9617 | 1987 | 2822 | 10312 | |
| | 2196 | 5369 | 10124 | 11903 | 12289 | 2362 | 12010 | 6620 | 5204 | 7989 | 4885 | 877 | |
| | 4170 | 2585 | 8540 | 4380 | 12092 | 3820 | 1508 | 3056 | 6337 | 5302 | 3096 | 2060 | |
| | 202 | 4492 | 1604 | 11737 | 710 | 8574 | 11646 | 3171 | 9030 | 765 | 5680 | 2624 | |
| | 9114 | 6592 | 10955 | 5196 | 5912 | 1980 | 11275 | 9810 | 12099 | 4821 | 10994 | 8060 | |
| | 1531 | 6262 | 4632 | 1058 | 2716 | 7317 | 4825 | 3731 | 5786 | 414 | 5576 | 1000 | |
| | 9714 | 1854 | 2489 | 4638 | 4485 | 11930 | 3504 | 1950 | 7696 | 374 | 372 | 1703 | |
| 374: | 7477 | 1676 | 4448 | 2400 | 6045 | 6940 | 9923 | 11995 | 8913 | 10513 | 634 | 7969 | |
| | 11746 | 6446 | 4371 | 1018 | 4026 | 10874 | 11604 | 5505 | 9219 | 4140 | 6427 | 12025 | |
| | 3605 | 1669 | 10847 | 5027 | 11128 | 9362 | 1483 | 2044 | 12343 | 3560 | 430 | 11220 | |
| | 12146 | 10479 | 4704 | 7769 | 5385 | 12424 | 3286 | 12461 | 10990 | 7985 | 5652 | 6086 | |
| | 1435 | 12067 | 2785 | 6367 | 3470 | 10591 | 2959 | 10900 | 2598 | 11878 | 12536 | 12559 | |
| | 5450 | 10046 | 7073 | 3157 | 2834 | 5795 | 8144 | 9617 | 10146 | 1987 | 2822 | 2279 | |
| | 2196 | 10312 | 5369 | 10124 | 11903 | 12289 | 4170 | 2362 | 12010 | 5204 | 6620 | 12092 | |
| | 8540 | 9585 | 9431 | 3500 | 7989 | 1508 | 4885 | 877 | 2585 | 4380 | 3820 | 3056 | |
| | 6337 | 5302 | 2060 | 3096 | 202 | 4492 | 1604 | 11737 | 710 | 8574 | 11646 | 3171 | |
| | 9030 | 765 | 5680 | 6592 | 10955 | 2624 | 9114 | 5196 | 5912 | 1980 | 11275 | 5576 | |
| | 9810 | 12099 | 11930 | 4546 | 3504 | 1950 | 7696 | 372 | | | | | |
| 375: | 2393 | 3407 | 11789 | 2984 | 10140 | 7809 | 9834 | 6717 | 6156 | 10608 | 6364 | | |
| 376: | 6589 | 11497 | 6836 | 11332 | 11382 | 5877 | 2213 | 2951 | 8215 | 1064 | 1057 | 8227 | |
| | 8249 | 10551 | 3319 | 8195 | 8218 | 8221 | 9142 | 9661 | 8198 | 6116 | 10889 | 10520 | |
| | 7399 | 3659 | 1734 | 5077 | 3510 | 5010 | 8351 | 9403 | 9244 | 483 | 4466 | 12167 | |
| | 7031 | 4216 | 6477 | 4107 | 12150 | 6828 | 5305 | 12404 | 1567 | 7248 | 11614 | 7445 | |
| | 3482 | 5079 | 2734 | 11033 | 3311 | 7402 | 4221 | 2223 | 1040 | 9289 | 2902 | 4438 | |
| | 4600 | 4324 | 9168 | 2576 | 10382 | 7057 | 4976 | 1719 | 10894 | 10483 | 3361 | 9016 | |
| | 5634 | 7496 | 1784 | 9760 | 12134 | 7188 | 8533 | 10833 | 1303 | 9336 | 4810 | 10290 | |
| | 3800 | 11192 | 6040 | 852 | 586 | 9907 | 11699 | 8192 | 7242 | 2963 | 10418 | 12069 | |
| | 9588 | 10604 | 2330 | 9242 | 6800 | 10782 | 7530 | 6261 | 8220 | 8962 | 7198 | 7306 | |
| | 7697 | 2102 | 2085 | 9372 | 5757 | 3700 | 11432 | 3755 | 11635 | 3376 | 11831 | 9573 | |
| | 10934 | 12553 | 9010 | 12441 | 2757 | 3093 | 11913 | 9725 | 3144 | 5892 | 10167 | 7130 | |
| | 5337 | 3872 | 1625 | 4143 | 7507 | 3179 | 7982 | 2590 | 1203 | 1932 | 1225 | 6260 | |
| | 1044 | 9032 | 498 | 499 | 9053 | 7023 | 8322 | 4927 | 3331 | 10393 | 8132 | 11728 | |
| | 8655 | 7771 | 988 | 8909 | 1791 | 5413 | 2157 | 10976 | 1365 | 2511 | 3200 | 7167 | |
| | 9986 | 11603 | 1041 | 6238 | 10166 | 11045 | 9704 | 9621 | 7669 | 2014 | 3281 | 11206 | |
| | 2697 | 4067 | 5118 | 12401 | 5368 | 12284 | 9430 | 7136 | 12412 | 6387 | 9543 | 2522 | |
| | 572 | 5119 | 1606 | 8394 | 10248 | 11146 | 10285 | 11719 | 6776 | 11309 | 11139 | 10439 | |
| | 9245 | 11197 | 11729 | 2036 | 4759 | 9773 | 6077 | 5571 | 11810 | 10084 | 10857 | 8191 | |
| | 9597 | 8037 | 3279 | 8225 | 797 | 976 | 977 | 979 | 999 | 5185 | 4166 | 9598 | |
| | 4901 | 7135 | 2944 | 10328 | 8189 | 6781 | | | | | | | |
| 377: | 10527 | 6513 | 5978 | 2596 | 1034 | 5101 | 1637 | 6141 | 6160 | 5334 | 12110 | | |
| 378: | 11873 | 5442 | 7939 | 7815 | 10258 | 11591 | 11595 | 4116 | 4129 | 9663 | 4114 | 11588 | |
| | 11586 | 11585 | 9690 | 11556 | 4111 | 11550 | 9687 | 4264 | 11554 | 5405 | 4130 | 3884 | |
| | 9667 | 3491 | 11545 | 3879 | 11546 | 3875 | 9646 | 3873 | 4105 | 3881 | 4101 | 4086 | |
| | 4084 | 3850 | 4082 | 4078 | 8588 | 8545 | 8589 | 9271 | 8300 | 5033 | 5035 | 5058 | |
| | 1832 | 5005 | 9380 | 5056 | 2097 | 1720 | 7704 | 10811 | 2733 | 5138 | 3490 | 8251 | |
| | 3805 | 2314 | 3573 | 5858 | 2753 | 2629 | 7295 | 557 | 3786 | 8599 | 9153 | 2012 | |
| | 5249 | 12190 | 6141 | 5334 | 6162 | 7529 | 1731 | 10108 | 463 | 12105 | 5048 | 660 | |
| | 7731 | 10191 | 9632 | 11189 | 6866 | 10706 | 4292 | 7977 | 437 | 10106 | 5124 | 1552 | |
| | 2131 | 7651 | 11225 | 8644 | 1923 | 3585 | 6432 | 3532 | | | | | |
| 379: | 8061 | 8064 | 7961 | 7964 | 404 | 3270 | 11215 | 3265 | 10192 | 11241 | 2078 | 11168 | |
| | 7871 | 12087 | 4499 | 1544 | 1412 | 6268 | 8820 | 11677 | 914 | 5507 | 4996 | 4991 | |
| | 4416 | 4419 | 1981 | 4347 | 3401 | 10092 | 11767 | 11031 | 12403 | 9799 | 8861 | 3101 | |
| | 12558 | 10974 | 1155 | 1157 | 1162 | 1171 | 1167 | 10984 | 5609 | 5612 | 5156 | 5809 | |
| | 5813 | 2069 | 10182 | 4042 | 3226 | 7512 | 6791 | 5053 | 6674 | 11820 | 11674 | 10970 | |
| | 9466 | 11069 | 10506 | 2468 | 2442 | 2444 | 2291 | 2435 | 2288 | 2294 | 2296 | 1196 | |
| | 12392 | 12414 | 12417 | 12418 | 12430 | 12435 | 12437 | 12453 | 8217 | 3323 | 4516 | 10500 | |
| | 12038 | 2221 | 5834 | 3035 | 7400 | 2413 | 1207 | 2833 | 2850 | 4552 | 4556 | 3578 | |
| | 5581 | 555 | 7183 | 552 | 7176 | 553 | 7179 | 549 | 7185 | 4518 | 4522 | 4539 | |
| | 4541 | 3889 | 12474 | 5841 | 9042 | 5812 | 8199 | 8200 | 8494 | 469 | 4590 | 6355 | |
| | 711 | 9845 | 9847 | 4984 | 7919 | 7432 | 7433 | 4285 | 11121 | 4503 | 7100 | 5439 | |
| | 2561 | 5559 | 1944 | 1237 | 10062 | 2402 | 4735 | 6583 | 3891 | 5718 | 5725 | 5746 | |
| | 9737 | 2946 | 2949 | 7280 | 5538 | 2658 | 2674 | 9057 | 8712 | 9135 | 5144 | 6967 | |
| | 11626 | 10759 | 9277 | 11254 | 11258 | 10005 | 400 | 1615 | 4506 | 2137 | 6636 | 12186 | |
| | 843 | 8021 | 3464 | 4335 | 12045 | 3009 | 6698 | 7468 | 1733 | 3239 | 4185 | 12228 | |
| | 1011 | 4131 | 5279 | 11790 | 5453 | 5452 | 9366 | 10461 | 6840 | 5340 | 4790 | 9069 | |
| | 4421 | 767 | 6182 | 2807 | 11421 | 6683 | 6090 | 4254 | 11473 | 4256 | 7225 | 11457 | |
| | 6361 | 5623 | 1560 | 2751 | 6147 | 6148 | 6151 | 11409 | 11411 | 11415 | 9097 | 1310 | |
| | 3111 | 4301 | 9508 | 7650 | 1796 | 11061 | 11104 | 11934 | 6530 | 9063 | 10105 | 4959 | |
| | 7479 | 8137 | 11271 | 4864 | 11951 | 8624 | 8110 | 5704 | 4119 | 6365 | 9492 | 7963 | |
| | 10912 | 2447 | 3204 | 3317 | 2521 | 2451 | 2450 | 2546 | 2514 | 3202 | 2487 | 2365 | |
| | 3205 | 2363 | 3148 | 2396 | 3354 | 2480 | 4047 | 3352 | 3203 | 3175 | 3243 | 2484 | |
| | 3262 | 3173 | 2419 | 2335 | 3380 | 3316 | 4051 | 3164 | 9189 | 11975 | 11977 | 12013 | |
| | 7351 | 6499 | 6517 | 11125 | 10880 | 9640 | 9651 | 5762 | 5769 | 11996 | 11736 | 6987 | |
| | 8226 | 3336 | 8224 | 1210 | 722 | 7083 | 11418 | 5972 | 9384 | 11424 | 6600 | 7623 | |
| | 7528 | 10940 | 10803 | 8430 | 3662 | 3099 | 4359 | 5542 | 1686 | 11972 | 8902 | 2017 | |
| | 2110 | 6669 | 6692 | 11541 | 4284 | 1473 | 4147 | 8879 | 8882 | 4376 | 8535 | 9364 | |
| | 10522 | 7701 | 8652 | 11989 | 10456 | 4561 | 12185 | 1501 | 3769 | 9669 | 5220 | 5218 | |
| | 9616 | 2405 | 12056 | 491 | 492 | 8338 | 819 | 2222 | 6325 | 1906 | 9158 | 6199 | |
| | 421 | 5392 | 2403 | 3750 | 694 | 697 | 699 | 724 | 728 | 6340 | 3693 | 3696 | |
| | 3955 | 7148 | 1166 | 2645 | 2409 | 8777 | 4990 | 8278 | 8279 | 8281 | 8304 | 8306 | |
| | 8308 | 8312 | 947 | 4453 | 1206 | 10609 | 10755 | 11735 | 11539 | 11786 | 1546 | 10196 | |
| | 7632 | 3082 | 3037 | 3110 | 3106 | 6524 | 3289 | 12083 | 12085 | 12082 | 490 | 6197 | |
| | 12080 | 12079 | 2219 | 8066 | 6405 | 8894 | 7333 | 6385 | 10897 | 8930 | 1223 | 3912 | |
| | 11910 | 1912 | 8891 | 3475 | 4698 | 2662 | 901 | 1194 | 1503 | 1507 | 8696 | 9203 | |
| | 6471 | 566 | 6133 | 3248 | 11892 | 5459 | 3302 | 8553 | 4703 | 8621 | 851 | 4337 | |
| | 4341 | 3675 | 2970 | 5601 | 10607 | 9524 | 12425 | 7307 | 9223 | 3918 | 736 | 729 | |
| | 961 | 10464 | 6196 | 1543 | 2758 | 2971 | 5700 | 12211 | 2578 | 10438 | 3880 | 1539 | |
| | 8865 | 8981 | 3738 | 12457 | 445 | 3540 | 11456 | 5703 | 4762 | 8680 | 2839 | 583 | |
| | 4627 | 8732 | 5599 | 2623 | 6321 | 5659 | 10004 | 10168 | 8741 | 6218 | 2194 | 2214 | |
| | 6554 | 6244 | 6555 | 2191 | 7472 | 8949 | 2896 | 6699 | 6703 | 3469 | 4902 | 9719 | |
| | 1995 | 5537 | 3957 | 3964 | 11679 | 3719 | 424 | 8848 | 3586 | 11832 | 7055 | 10785 | |
| | 9507 | 7643 | 10467 | 7642 | 10395 | 8808 | 9495 | 8628 | 9050 | 12192 | 9591 | 3681 | |
| | 7246 | 11257 | 10605 | 9721 | 2379 | 1187 | 1674 | 10009 | 1108 | 6522 | 3363 | 3360 | |
| | 1049 | 1051 | 1056 | 7756 | 7738 | 8897 | 2974 | 8924 | 2988 | 7438 | 832 | 4666 | |
| | 11859 | 4702 | 2991 | 4355 | 8867 | 4968 | 8868 | 3897 | 8895 | 2967 | 4669 | 4697 | |
| | 4674 | 4700 | 9415 | 6838 | 6549 | 2617 | 621 | 1831 | 10829 | 10808 | 4794 | 6627 | |
| | 4776 | 7605 | 8694 | 12200 | 11056 | 11002 | 7868 | 3699 | 2610 | 419 | 418 | 10435 | |
| | 936 | 2345 | 6762 | 12543 | 9549 | 10661 | 10689 | 10699 | 10719 | 1190 | 1165 | 1161 | |
| | 1170 | 11929 | 11419 | 7988 | 3798 | 1218 | 1220 | 2721 | 1800 | 6167 | 1268 | 3178 | |
| 380: | 7583 | 12223 | 3882 | 6192 | 10967 | 5287 | 11700 | 9299 | 12204 | 3071 | 9116 | 6233 | |
| | 3626 | 6939 | 5957 | 2854 | 2852 | 10080 | 6245 | 9582 | 11285 | 9334 | 2429 | | |
| 381: | 611 | 12004 | 6814 | 5320 | 1380 | 5991 | 7802 | 5112 | 6551 | 402 | 7832 | 382 | |
| | 11138 | | | | | | | | | | | | |
| 382: | 611 | 12004 | 5991 | 6551 | 7832 | | | | | | | | |
| 383: | 4837 | 10247 | 4513 | 8974 | 9193 | 3250 | 11577 | 10663 | 2910 | 9363 | 1186 | | |
| 384: | 11191 | 6118 | 591 | 9506 | 9370 | 8717 | 1055 | 9504 | 10360 | 6606 | 575 | 5878 | |
| | 5911 | 3404 | 1764 | 7501 | 4369 | 4367 | 12240 | 12238 | 2227 | 7439 | 2003 | 7437 | |
| | 7440 | 7521 | 11862 | 2334 | 12466 | 12137 | 5673 | 11590 | 12090 | 11766 | 7515 | 5121 | |
| | 3935 | 6239 | 6232 | 836 | 6307 | 6289 | 6328 | 6310 | 9157 | 8674 | 2257 | 2828 | |
| | 2851 | 6282 | 1990 | 10944 | 5126 | 5127 | 905 | 3876 | 907 | 8578 | 912 | 8514 | |
| | 8899 | 12309 | 12059 | 10972 | 11683 | 4862 | 4099 | 11900 | 9518 | 9521 | 4985 | 9517 | |
| | 6702 | 960 | 9819 | 958 | 965 | 963 | 2731 | 11043 | 10487 | 10486 | 11010 | 7682 | |
| | 1759 | 9618 | 9619 | 5901 | 10142 7649 | 753 | 755 | 4752 | 6402 | 11686 | 1413 | | |
| | 656 | 5951 | 9563 | 795 | 8523 4826 | 11233 | 3115 | | | | | | |
| 385: | 12282 | 3816 | 6979 | 4487 | 8194 4174 | 1027 | 3606 | 9593 | 8612 | 10293 | 4967 | | |
| | 3304 | 6074 | 6908 | 8506 | 6658 7332 | 8682 | 9519 | 4399 | 4231 | 3446 | 3597 | | |
| | 11520 | 11676 | 11673 | 11704 | 11678 | 11714 | 11703 | 5090 | 10122 | 4379 | | | |
| 386: | 3874 | 2573 | 7549 | 7517 | 9650 | 3332 | 1953 | 4431 | 11909 | 3497 | 10045 | 2551 | |
| | 2545 | 9861 | 8988 | 4509 | 11527 | 10422 | 4863 | 8961 | 11568 | 5627 | 2724 | 9699 | |
| | 5675 | 8512 | 2715 | 4144 | | | | | | | | | |

### Example 6

[0111] This example illustrates the preparation and identification by screening of transgenic seeds and plants having enhanced agronomic traits using DNA encoding homologs identified in Example 7. Transgenic corn, soybean or cotton seed and plants with recombinant DNA encoding each of the homologs identified in Example 5 are prepared by transformation. The transgenic seed, plantlets and progeny plants are screened for nitrogen use efficiency, yield, water use efficiency, growth under cold stress and seed composition change. Transgenic plants and seed having at least one enhanced agronomic trait of this invention are identified.

### Example 7

[0112] This example illustrates the identification of consensus amino acid sequence for the proteins and homologs encoded by DNA that is used to prepare the transgenic seed and plants of this invention having enhanced agronomic traits.

[0113] ClustalW program was selected for multiple sequence alignments of the amino acid sequence of SEQ ID NO: 371 and 11 homologs. Three major factors affecting the sequence alignments dramatically are (1) protein weight matrices; (2) gap open penalty; (3) gap extension penalty. Protein weight matrices available for ClustalW program include Blosum, Pam and Gonnet series. Those parameters with gap open penalty and gap extension penalty were extensively tested. On the basis of the test results, Blosum weight matrix, gap open penalty of 10 and gap extension penalty of 1 were chosen for multiple sequence alignment. Attached are the sequences of SEQ ID NO: 371, its homologs and the consensus sequence at the end. The symbols for consensus sequence are (1) uppercase letters for 100% identity in all positions of multiple sequence alignment output; (2) lowercase letters for >=70% identity; symbol; (3) “X” indicated <70% identity; (4) dashes “-” meaning that gaps were in >=70% sequences.

| | |
|---|---|
| SEQ ID NO: | |
| 371 | MDIFDNSDLEYLVDEFH--ADFDDDEPFGEVDVTSESDSDFMDSDFDFELSESKTNNETS |
| 12300 | MDIFDNSDLEYLVDDFHGFSDSEDDEPFGEFDHKSEADSDFEDDLDPTQESD------TS |
| 6283 | MEHFNNDDLEYVVDEYYDVPDFAVEDTS---SDIVPELTSDVDSDFEDEFPTSNAKTDTT |
| 1573 | MEHFNNDDLEYVVDEYYDVPDFAVEDTS---SDIVPELTSDVDSDFEDEFPTSNAKTDTT |
| 8372 | MEHFNNDDLEYVVDEYYDVPDFAVEDTS---SDIVPELTSDVDSDFEDEFPTSNAKTDTT |
| 5306 | MEHFNNDDLEYVVDEYYDVPDFAVEDTS---SDIVPELTSDVDSDFEDEFPTSNAKTDTT |
| 9432 | ------------------------------------------------------------ |
| 533 | ------------------------------------------------------------ |
| 2320 | ------------------------------------------------------------ |
| 1142 | -------------------------------------------------MTISNTSSTSK |
| 1200 | ------------------------------------------------------------ |
| 7732 | -----------------MAHDLHDDLEFVSGDDDDYYLEFDHDPGHGFHTSAATSASQTL |
| consensus | xxxxxxxxxxxxxxxxxxxxxxxxxxxx---xxxxxxxxxxxxxxxxxxxxxxxxxxxxx |
| | ALEARNGKDIQGIPWESLNYTRDRYRENRLLHYKNFESLFRSREELDKECLQVEKGKNFY |
| | ALEARNGKDIQGIPWERLNYSRDQYRYKRLQQYKNFEILFRSRQDLDKECLQVEKGKHFY |
| | ASEARNGKDIQGIPWERLNYSRDKYRETRLKQYKNYQNFSRSRHDLRKECLEVQKGETFY |
| | ASEARNGKDIQGIPWERLNYSRDKYRETRLKQYKNYQNFSRSRHDLRKECLEVQKGETFY |
| | ASEARNGKDIQGIPWERLNYSRDKYRETRLKQYKNYQNFSRSRHDLRKECLEVQKGETFY |
| | ASEARNGKDIQGIPWERLNYSRDKYRETRLKQYKNYQNFSRSRHDLRKECLEVQKGETFY |
| | -----------GIPWERLNYSRDKYRETRLKQYKNYQNFSRSRHDLRKECFEVQKGETFY |
| | -----------GIPWERLNYSRDKYRETRLKQYKNYQNFSLSPHHLHKECFQVQKGQTFY |
| | -----------GIPWERLNYSRDKYRETRLKQYKNYQNFSRSPHHLRKECFQVQKGQTFY |
| | TIFRRNGKDIQGIPWERLNYSRDKYRETRLKQYKNYQNFSLSPHHLHKECFQVQKGQTFY |
| | ------------IPWERLQITRKDYRKARLEQYKNYENFPQSGELMDKLCKQVESSSKYY |
| | IGALYFRTSRWTIPWERLNYSRNQYREMRLRQYKNYENLTMPRDGLEKECKQVERKDTFY |
| | xxxxxxxxxxxgIPWErLnysRdxYRexRLxqYKNyxnfxxsxxxlxKeCxxVxkgxtfY |
| | DFQFNTRLVKSTIAHFQLR----------------NLVWATSKHDVYFMNNYSLMHWSSL |
| | DFQFNTRLVKSTIAHFQLR----------------NLLWATTKHDVYFMKNYSLMHWSSL |
| | DFFFNTRLVKSTIVHFQLR----------------NLLWATSKHDVYFMQNYSVMHWSAL |
| | DFFFNTRLVKSTIVHFQLLRQVXVSSLAGPNIMLRNLLWATSKNDVYFMQNYSVMHWSAL |
| | DFFFNTRLVRXTLAGPNIMLR--------------NLLWATSKHDVYFMQNYSVMHWSAL |
| | DFFFNTRLVKSTIVHFQLRPN----------IMLRNLLWATSKHDVYFMQNYSVNHWSAL |
| | DFFFNTRLVKSTIVHFQLR----------------NLLWATSKHDVYFMQNYSVMHWSAL |
| | DFFFNTRLVKSTIVHFQLRN----------------LLWATSKHDVYLMQNYSVMHWSAL |
| | DFFFNTRLVKSTIVHFQLQLGRTX-------IMLRNLLWATSKHDVYLMQNYSVMHWSAL |
| | DFFFNTRLVKSTIVHFQLLXRWNMSSLAGPYIMLRNLLWATSKHDVYLMQDYSVMHWSAL |
| | EFQYNTRIVKPSILHFQLR----------------NLLWATSKHDVYFMSNSTVGHWSSL |
| | DFHLNTRLVKSTTVHFQLR----------------NLLWATSKHDVYLMQNYSVMHWSSL |
| | dFxfNTRlVkstixhfglxxx----------xxxxnLlWATsKHDVYxMqnysvmHWSxL |
| | LQRGKEVLNVAKPIVPSMKQHGSLSQSVSRVQISTMAVKDDLKLREGSKESLSVRKSTNL |
| | LQRSKEVLNVAKPIVPTMKQPGLLSQSISRVQISTMAVKDDLIVAGGFQGELICKRINEP |
| | LRRGKEVLNVAKPIIPTLKRPGFLAQPVSRVQISTMTVKENLMVAGGFQGELICKNLKHP |
| | LRRGKEVLNVAKPIIPTLKRPGFLAQPVSRVQISTMTVKENLMVAGGX-SRVSLYNLKHP |
| | LRRGKEVLNVAKPIIPTLKRPGFLAQPVSRVQISTMTVKENLMVAGGFQGELICKNLKHP |
| | LRRGKEVLNVAKPIIPTLKRPGFLAQPVSRVQISTMTVKENLMVAGGFQGELICKNLKHP |
| | LRRGKEVLNVAKPIIPTLKRPGFLAQPVSRVQISTMTVKENLMVAGGFQGELICKNLKHP |
| | LQRSKEVLNVAKPIIPTLTHPGFLAQPVSRVQISTMTVKENLMVAGGFQGELICKNLKQP |
| | LRRGKEVLNVAKPIIPTLKRPGFLAQPVSRVQISTMTVKENLMVAGGFQGELICKNLKHP |
| | LQRSKEVLNVAKPIIPTLTHPGFLAQPVSRVQISTMTVKENLMVAGGFQGELICKVGLII |
| | SHKMTDVLDFSGHVAPAKKHPGCALEGFTGVQVSTLAVNEGLLVAGGFQGELVCKSLGER |
| | LQRGKEVLNVAGQLAPSQNVR--GAMPLSRVQISTMAVKGNLMVAGGFQGELICKYVDKP |
| | lxrxkeVLnvakpixptxkxpgxlaqpvsrVQiSTmxVkenLmvagGfqgelickxxxxp |
| | RLLSALN----------------------------------------------------- |
| | GVAFCTVLHRFX-NDITNSVDIYNAPSGSLRVITANNDCTVRVLDAXNFAFLNSFTL--- |
| | GVLFCGKITTDDNAITHAV-DVYSNPAGSLRVITANNDFQGRVFD--------------- |
| | GVLFCGKITTDDNAITNAV-DVYSNPAGSLRVITANNDFQVRVFDAENFASLGWFKYDWS |
| | GVLFCGKITTDDNAITNAV-DVYSNPAGSLRVITANNDFQVRVFDAENFASLGCFKYDWS |
| | GVLFCGKITTDDNAITNAV-DVYSNPAGSLRVITANNDFQVRVFDAENFASLGCFKYDWS |
| | GVLFCGKITTDDNAITNAV-DVYRNPAGSEGNPA-------------------------- |
| | GVLFCGKITTDGNAITNAVXDVYRNPAGSLRVITAXNDSQASGFDAENFAS--------- |
| | GVLFCGKITTDDNAITNAV-DVYSNPAGSLRVITANNDFQVRVFDAENFASLGCFKYDWS |
| | ISYFHSI----------------------------------------------------- |
| | DVKFCTRTTLSDNAITNAM-DIHRSTSGSLRITVSNNDSGVREFDMERFQLLNHFRFNWP |
| | GVAFCTNLTGNNNSITNAV-DIYQAPNGGTRITTANNDCVVRTFDTERFSLISHFAFPWS |
| | gvxfcxxxtxxxnxitxax-dxyxxpxgsxrxxxxxndxxxxxxdxxxxxxxxxxxxxxx |
| | ------------------------------------------------------------ |
| | ------------------------------------------------------------ |
| | ------------------------------------------------------------ |
| | VNNTSVSPDG-------------------------------------------------- |
| | VNNTSVSPDGKLLAVLGDSTECLIADANTGKITGSLKGHLDYSFSSAWHPDGQILATGNQ |
| | VNNTSVSPDGKLLAVLGDSTECLIADANTGKITGSLKGHLDYSFSSAWHPDGQILATGNQ |
| | ------------------------------------------------------------ |
| | ------------------------------------------------------------ |
| | VNNTSVSPDGKLLAVLGDSTECLIADANTGKITGSLKGHLDYSFSSAWHPDGQILATGNQ |
| | ------------------------------------------------------------ |
| | VNHTSVSPDKKLLAVVGDDRDALLVDSRNGKVTSTLVGHLDYSFASAWHLDGVTFATGNQ |
| | VNNTSVSPDGKLLAVLGDSSDCLIADSQSGKEMARLKGHLDYSFSSAWHPDGRVVATGNQ |
| | xxxxxxxxxxxxxxxxxxxxxxxxxxxxxxxxxxxxxxxxxxxxxxxxxxxxxxxxxxxx |
| | ------------------------------------------------------------ |
| | ------------------------------------------------------------ |
| | ------------------------------------------------------------ |
| | ------------------------------------------------------------ |
| | DKTCRLWDIRNLSQSMAVLKGRMGAIRALRFTSDGRFLAMAEPADFVHIFDSHSGYEQGQ |
| | DKTCRLWDIRNLSQSMAVLKGRMGAIRALRFTSDGRFLAMAEPADFVHIFDSHSGYEQGQ |
| | ------------------------------------------------------------ |
| | ------------------------------------------------------------ |
| | DKTCRLWDIRNLSQSMAVLKGRMGAIRALRFTSDGRFLAMAEPADFVHIFDSHSGYEQGQ |
| | ------------------------------------------------------------ |
| | DKTCRVWDIRNPSTSLAVLRGNIGAIRCIRYSSDGRFLLFSEPADFVHVYSTAECYRKRQ |
| | DRTCRVWDVRNMSRSVAVLEGRIGAVRGLRYSPDGRFLAASEPADFVHVYDAAAGYADAQ |
| | xxxxxxxxxxxxxxxxxxxxxxxxxxxxxxxxxxxxxxxxxxxxxxxxxxxxxxxxxxxx |
| | ------------------------------------------------------* |
| | ------------------------------------------------------* |
| | ------------------------------------------------------* |
| | ------------------------------------------------------* |
| | EIDLFGEIAGISFSPDTEALFVGIADRTYGSLLEFNRKRHYNYLDSF-------* |
| | EIDLFGEIAGISFSPDTEALFVGIADRTYGSLLEFNRKRHYNYLDSF-------* |
| | ------------------------------------------------------* |
| | ------------------------------------------------------* |
| | EIDLFGEIAGISFSPDTEALFVGIADRTYGSLLEFNRKRHYNYLDSF-------* |
| | ------------------------------------------------------* |
| | EIDFFGEISGISLSPDD------ESLFVGVCDRVYASLLNYRLVHANGYLDSYM* |
| | EIDLFGEIAGVAFSPAGNNGGGGEALFVSIADRTYGSLLEFHRRRRHGYLDCYV* |
| | xxxxxxxxxxxxxxxxxxxxxxxxxxxxxxxxxxxxxxxxxxxxxxx-------* |

[0114] The consensus amino acid sequence can be used to identify DNA corresponding to the full scope of this invention that is useful in providing transgenic plants, e.g., corn, soybean and cotton plants with transgenic cells expressing protein encoding DNA that impart an enhanced agronomic traits. For example, enhanced nitrogen use efficiency, enhanced yield, enhanced water use efficiency, enhanced growth under cold stress and/or improved seed compositions are imparted by the expression in the plants of DNA encoding a protein with amino acid sequence identical to the consensus amino acid sequence.

### Example 8

### Identification of Target Genes of Transcription Factors ABF3 and CBF3

### Chemical Kinetics Models to Identify Regulator-Target Relationships.

[0115] It has been shown both in mRNA blotting and microarray experiments that activation of regulators under stress conditions usually occurs earlier than that of its targets (Haake, 2002, Seki, 2002a). In eukaryotic cells, the effect of a regulator is usually achieved in multiple steps, including transcription of the regulator genes, transportation of the regulator mRNA(s) out of the nucleus, translation of the transcript(s), transportation of the regulator protein back to the nucleus, and the binding of the regulator protein to the promoter regions of its target genes to achieve transcriptional regulation. Noticeable timing difference exists among changes in concentrations of the regulator mRNA, the regulator protein, and the mRNAs of its targets. A chemical kinetics model naturally fits this context by taking into account of the time lags among these events.

[0116] Because the active level of the regulator protein is not measured directly in microarray experiments, the regulator protein concentration is treated as a hidden variable in our model to serve as the link between the measurable mRNA concentrations of a regulator and its target(s). More specifically, the regulator protein concentration can be modeled by the following chemical kinetic equation without considering post-translational regulation:

$$\frac{d {R}_{p}}{d t} = {K}_{tran} {R}_{m} {K}_{p} {R}_{p} \qquad equation ( 1 )$$

where Rₚ is the regulator protein concentration; Rₘ is the regulator mRNA concentration; Kₜᵣₐₙ is the apparent rate of mRNA translation, and Kₚ is the turnover rate of the regulator protein. Accordingly, the time course of the target mRNA concentration can be modeled with the following equation

$$\frac{d {T}_{m}}{d t} = {B}_{t} + f ( {R}_{p} ) - {K}_{t} {T}_{m} \qquad equation ( 2 )$$

where Tₘ is the concentration of the target mRNA; Bₜ is the basal transcription rate of the target gene; and Kₜ is the turnover rate of the target mRNA; f(Rₚ) measures the regulated transcription rate, which is different for activators and repressors. For activators, it has the following Taylor first order approximation when Rₚ is small (Chen et al., 1999).

$$f ( {R}_{p} ) = f ( {R}_{p} = 0 ) + \frac{d ( f ( {R}_{p} )}{d {R}_{p}} {\vert}_{Rp = 0} {R}_{p} \qquad equation ( 3 )$$

f(Rₚ=0) is equal to zero, assuming target gene transcription should not be activated when there is no regulator protein.

$$\frac{d ( f ( {R}_{p} )}{d {R}_{p}} {\vert}_{Rp = 0}$$

is the activation rate of regulator protein on the target gene. If it is replaced by parameter K_{act} for simplicity, f(Rₚ) takes the following form:

f(Rₚ)=K_{act}Rₚ equation (4)

[0117] The basal level target transcription rate should satisfy the following condition:

Bₜ+f(R_{pbasal})−KₜT_{mbasal}=0 equation (5)

Where R_{pbasal} and T_{mbasal} are the basal concentrations of the regulator protein and target mRNA, respectively.

[0118] Usually, what is reported in transcription profiling experiment is not the absolute concentration of mRNA, but rather a fold change compared to basal transcription level of that gene. Thus, we define relative changes of Rₘ and Tₘ as Rₘ′ and Tₘ′

Rₘ′=Rₘ/R_{basal}−1 equation (6)

Tₘ′=Tₘ/T_{mbasal}−1 equation (7)

Combining equation (1), (2), (4), (5), (6) and (7), and considering the fact that KₜᵣₐₙR_{mbasel}−KₚR_{pbaseal}=0, leads to the following second order ordinary differential equation:

$$\frac{{d}^{2} ( {T}_{m}^{′} )}{d {t}^{2}} + ( {K}_{t} + {K}_{p} ) \frac{d ( {T}_{m}^{′} )}{d t} + {K}_{t} {K}_{p} {T}_{m}^{′} = γ {R}_{m}^{′} \qquad equation ( 8 )$$

### Where γ=K_{act}KₜᵣₐₙR_{mbasal}/T_{mbasel}

[0119] Given all the model parameters, the relationship between the relative mRNA levels of regulator and its target, Rₘ′ and Tₘ′, is defined by Equation (8). In other words, for the target gene of a regulator, its relative mRNA level Tₘ′ has to satisfy equation (8), given the model parameters and the relative regulator mRNA level Rₘ′. It is interesting to note that the regulator protein concentration, a key variable in the original model equations, is not involved explicitly in the final equation relating the relative mRNA levels of regulator and target. To predict the target of a specific regulator, we can solve equation (8) to obtain the theoretical target behavior curve, and then find the genes with mRNA levels similar to the theoretical curve, which will be identified as the potential targets of that regulator.

[0120] In the case of transcript expression profiling experiments under stress conditions, the initial conditions should be the following:

$$\begin{matrix}{T}_{m}^{′} {\vert}_{t = 0} = 0 & equation ( 9 ) \\ \frac{d ( {T}_{m}^{′} )}{d t} {\vert}_{t = 0} = 0 & equation ( 10 )\end{matrix}$$

[0121] Because the target gene mRNA and the regulator protein should be at their basal levels at the onset of stress condition (t=0). It is apparent from equations (2) and (5) that initial condition (10) should be true.

[0122] To approximate Rₘ, a stepwise linear model can be fit as follows:

Rₘ′ᵢ(t)=αᵢ+βᵢt tᵢ≦t≦tᵢ₊₁ i=0, . . . , n−1 equation (11)

Where tᵢ is i^{th} time point; and αᵢ and βᵢ are the parameters of stepwise linear function in each time interval, which are determined by the measured regulator mRNA levels at the two adjacent time points. Equation (8) has analytic solution:

Tmᵢ(t)′=Aᵢe^{-K}^{ₜ}^{t}+Bᵢe^{-K}^{ₚ}^{t}+Cᵢ+Dᵢt tᵢ≦t≦tᵢ₊₁, i=0, . . . , n−1 equation (12)

Where Dᵢ=βᵢγ/KₚKₜ and Cᵢ=[αᵢγ−(Kₚ+Kₜ)Dᵢ]/KₚKₜ
The contiguous restrictions on Tₘ′ are stated in the following equations:

$$\begin{matrix}{Tm}_{i}^{′} ( t ) = {Tm}_{i + 1}^{′} ( t ) , \\ when t = {t}_{i} i = 1 , … , n - 1. & equation ( 13 ) \\ \frac{d ( {Tm}_{i}^{′} ( t ) )}{d t} = \frac{d ( {Tm}_{i + 1}^{′} ( t ) )}{d t} , \\ when t = {t}_{i} i = 1 , … , n - 1. & equation ( 14 )\end{matrix}$$

After substituting equation (12) into equations (9), (10), (13) and (14), Aᵢ and Bᵢ can be obtained by solving sets of linear algebra equations, and are functions of αᵢ, βᵢ, γ, Kₜ and Kₚ.

[0123] Learning model parameters. For each regulator and target pair, there are three parameters involved in equation (8), the target mRNA turnover rate K₁, the active regulator turnover rate Kₚ, and γ, which is equal to K_{act}KₜᵣₐₙR_{basal}/T_{basel}. K_{act} represents the strength of regulator protein effect on the target gene; Kₜᵣₐₙ is the translation rate of regulator mRNA. They lump together with the ratio of basal mRNA concentrations of regulator and target to form parameter γ, which determines the magnitude of the relative target mRNA level but not its shape. It is the parameters Kₜ and Kₚ that determine the shape of the relative target mRNA level, such as how fast the target gene responds to the regulator.

[0124] For gene expression experiments under stress conditions in plants, the kinetics model can be trained with known regulator-target pair reported in the literature (e.g., CBF and RD17 in Arabidopsis under cold stress) with a non-linear regression model. When the normalized expression profile of a target gene with its maximal response is considered, there is no need to keep γ as a free model parameter (γ1=nγ2 leads to Tₘ₁′=nTₘ₂′ when other parameters are kept the same in equations (8), (9) and (10)). Therefore, only two parameters Kₜ and Kₚ are estimated from the non-linear regression model, and are used to predict other regulators and their targets in plant stress response. The theoretical target mRNA expression profiles are calculated for all the genes annotated as transcription factors, and Pearson correlation coefficient is computed for each theoretical target profile and each observed expression profile in each stress condition. When high correlation in one or several stress conditions is found, the transcription factor could be one of the putative regulators of the corresponding gene.

[0125] Target gene prediction using promoter motif analysis. As an additional line of evidence for regulator-target pair prediction, we used promoter motif analysis to correlate regulators and their potential targets. Differentially expressed genes under stress conditions measured in microarray experiments can be partitioned into certain number of clusters based on the similarity in their expression profiles. All known promoter motifs within 1500 base-pairs distance to the starting codon were extracted from AGRIS database (Davuluri, 2003) for each gene. The frequency of each promoter motif in each cluster is computed, and Fisher's Exact Test is conducted to test the over-representation of certain promoter motifs. Enriched promoter motifs for a given cluster are selected as putative regulator motifs when statistical significance meets certain cutoff value (e.g., p-value 0.05). When a transcription factor (or a family of transcription factors) is known to bind to the putative regulator motif, the transcription factor(s) should be the putative regulators of target genes with the regulator motif in that cluster.

[0126] Combining evidences from kinetics models and promoter analysis. Kinetics models and promoter analysis independently predict putative regulator-target pairs, we attempted to combine their results to enhance our ability to detect true regulator-target pairs. In our kinetics models, for each target gene only the transcription factors with a Pearson correlation coefficient higher than certain cutoff in at least one stress condition are considered as its potential regulators. It is possible that the same regulator regulates its target genes in different stress conditions. Therefore, it is reasonable to give a higher ranking for a regulator if its theoretical target profiles are correlated to those of certain gene in multiple conditions. Based on these ideas, a ranking score for each possible regulator-target pair is derived as follows:

$$score ( {r}_{i} , {t}_{j} ) = {\prod }_{k} {R}_{k} ( {r}_{i} , {t}_{j} ) / N \qquad equation ( 15 )$$

Where Rₖ(rᵢ,tⱼ) is the rank of Pearson correlation coefficient of the theoretical target profile of transcription factor rᵢ to that of gene tⱼ in stress condition k; N is the total number of transcription factors on DNA chip.

[0127] The rank of the scores for putative transcription factors should represent the likelihood of them being the true regulator for a specific gene. Similarly, the rank of p-value of motif enrichment is the indicator of the likelihood of a transcription factor(s) being the true regulator for a specific target. Lastly, we combine both rankings from kinetics model prediction and promoter analysis by defining a score for a given regulator-target pair as following:

$$L ( {r}_{i} , {t}_{j} ) = {\prod }_{m} {rank}_{m} ( {r}_{i} , {t}_{j} ) / N \\ m = 1 , 2 \qquad equation ( 17 )$$

Where L(rᵢ,tⱼ) can be viewed as the strength of transcription factor rᵢ to be the regulator of gene tⱼ; rank₁(rᵢ,tⱼ) and rank₂(rᵢ,tⱼ) are the rank of score(rᵢ,tⱼ) from kinetics model prediction, and the rank of p-value of regulator rᵢ binding motifs enrichment for the cluster with gene tᵢ, respectively.

[0128] This method was applied to an Arabidopsis gene expression dataset measuring responses to various stress conditions (Seki et al., 2002a; Seki, et al., 2002b). In this experiment, wild-type Arabidopsis plants were subject to stress treatments for various periods (1, 2, 5, 10 and 24 hours), and extracted mRNA samples were hybridized to a cDNA microarray with ˜7000 full-length cDNAs. 493 genes were chosen for the analysis, as each of these genes was differentially regulated in at least one of the stress conditions.

TABLE 8
The evidence of the predicted target genes of CBF3.
This table shows the evidence strength,
whether evidence from kinetics model or
enriched promoter analysis exists for each predicted target.

| | | Evidence | Kinetics | Promoter |
|---|---|---|---|---|
| SEQ ID NO | Target | strength (10⁻⁵) | model | Analysis |
| / | At1g01470 | 2.13333 | yes | yes |
| / | AtGolS3 | 2.13333 | yes | yes |
| / | RD17 | 2.13333 | yes | yes |
| / | ERD10 | 2.13333 | yes | yes |
| 175 | At1g21790 | 2.13333 | yes | yes |
| / | ERD7 | 2.13333 | yes | yes |
| / | cor15A | 2.13333 | yes | yes |
| / | FL3-5A3 | 4.26667 | yes | yes |
| / | kin2 | 4.26667 | yes | yes |
| / | cor15B | 6.4 | yes | yes |
| 176 | ERD4 | 26.66667 | yes | no |
| / | RD29A | 26.66667 | yes | no |
| / | At1g16850 | 53.33333 | yes | no |
| 177 and 178 | At1g78070 | 800 | no | yes |
| / | kin1 | 800 | no | yes |

TABLE 9
The evidence of the predicted target genes of ABF3.
This table shows the evidence strength,
whether evidence from kinetics model or
enriched promoter analysis exists for each predicted target.

| | | Evidence | Kinetics | Promoter |
|---|---|---|---|---|
| SEQ ID NO | Target | strength (10⁻⁵) | model | Analysis |
| 179, 180 and 181 | At3g47340 | 1.26222 | yes | yes |
| 182 | At5g13170 | 1.26222 | yes | yes |
| 183 | At2g19900 | 1.26222 | yes | yes |
| 184 and 185 | At5g09530 | 2.52444 | yes | yes |
| 186 | At2g42790 | 2.52444 | yes | yes |
| 187 | At3g56200 | 2.52444 | yes | yes |
| 188 and 189 | At5g01520 | 2.52444 | yes | yes |
| 190 | At5g66780 | 3.78667 | yes | yes |
| 191 | At5g59320 | 3.78667 | yes | yes |
| 192 | AtHB7 | 5.04889 | yes | yes |
| / | RD29B | 7.57333 | yes | yes |
| 193 | RD20 | 7.57333 | yes | yes |

[0129] It has been shown that ABF3 and CBF3 confer stress tolerance to transgenic plants. Thus, the target genes of ABF3 and CBF3, identified by this invention, including SEQ ID NO: 368 through SEQ ID NO: 386, and their homologs, are particularly useful for producing transgenic plant cells in crop plants with enhanced stress tolerance.

### Example 9

### Identification Of Amino Acid Domain by Pfam Analysis

[0130] The amino acid sequence of the expressed proteins that were shown to be associated with an enhanced trait were analyzed for Pfam protein family against the current Pfam collection of multiple sequence alignments and hidden Markov models using the HMMER software in the appended computer listing. The Pfam protein families for the proteins of SEQ ID NO: 194 through 386 are shown in Table 10. The Hidden Markov model databases for the identified patent families are also in the appended computer listing allowing identification of other homologous proteins and their cognate encoding DNA to enable the full breadth of the invention for a person of ordinary skill in the art. Certain proteins are identified by a single Pfam domain and others by multiple Pfam domains. For instance, the protein with amino acids of SEQ ID NO: 194 is characterized by three Pfam domains, i.e. PPDK_N, PEP-utilizer and PEP-utilizer_C.

TABLE 10

| PEP | | | | | | |
|---|---|---|---|---|---|---|
| SEQ | | | | | | |
| ID | | Pfam domain | | | | |
| NO | GENE ID | name | begin | stop | score | E-value |
| 194 | PHE0003351_PMON81242.pep | PPDK_N | 99 | 464 | 710.9 | 7.90E−211 |
| 194 | PHE0003351_PMON81242.pep | PEP-utilizers | 500 | 601 | 182.3 | 1.10E−51 |
| 194 | PHE0003351_PMON81242.pep | PEP-utilizers_C | 613 | 969 | 723.9 | 1.00E−214 |
| 195 | PHE0003351_PMON83625.pep | PPDK_N | 99 | 464 | 710.9 | 7.90E−211 |
| 195 | PHE0003351_PMON83625.pep | PEP-utilizers | 500 | 601 | 182.3 | 1.10E−51 |
| 195 | PHE0003351_PMON83625.pep | PEP-utilizers_C | 613 | 969 | 723.9 | 1.00E−214 |
| 196 | PHE0000207_PMON77878.pep | Pkinase | 1 | 259 | 343.1 | 4.40E−100 |
| 197 | PHE0000208_PMON77879.pep | Pkinase | 1 | 259 | 353.4 | 3.30E−103 |
| 198 | PHE0000209_PMON77891.pep | Pkinase | 1 | 259 | 354.9 | 1.20E−103 |
| 199 | PHE0000210_PMON77880.pep | Pkinase | 1 | 259 | 359.4 | 5.40E−105 |
| 200 | PHE0001329_PMON92878.pep | Pkinase | 12 | 266 | 354.3 | 1.80E−103 |
| 200 | PHE0001329_PMON92878.pep | NAF | 311 | 371 | 123.6 | 5.10E−34 |
| 201 | PHE0001425_PMON79162.pep | CAF1 | 19 | 252 | 368.1 | 1.30E−107 |
| 202 | PHE0001573_PMON92870.pep | GATase_2 | 2 | 162 | 55.5 | 3.10E−15 |
| 202 | PHE0001573_PMON92870.pep | Asn_synthase | 210 | 451 | 329.6 | 5.00E−96 |
| 203 | PHE0001664_PMON99280.pep | FAD_binding_4 | 69 | 213 | 83.4 | 6.30E−22 |
| 204 | PHE0001674_PMON79194.pep | Myb_DNA-binding | 25 | 70 | 36.3 | 9.90E−08 |
| 205 | PHE0002026_PMON96489.pep | Ammonium_transp | 36 | 459 | 628.5 | 5.10E−186 |
| 206 | PHE0002108_PMON92821.pep | CSD | 1 | 65 | 155.1 | 1.60E−43 |
| 207 | PHE0002109_PMON93856.pep | CSD | 1 | 67 | 144.8 | 2.10E−40 |
| 208 | PHE0002508_PMON92607.pep | CBFD_NFYB_HMF | 24 | 89 | 130.9 | 3.20E−36 |
| 209 | PHE0002650_PMON81832.pep | SRF-TF | 9 | 59 | 106.9 | 5.50E−29 |
| 209 | PHE0002650_PMON81832.pep | K-box | 73 | 172 | 118.4 | 1.90E−32 |
| 210 | PHE0002989_PMON95630.pep | Miro | 10 | 126 | 74.3 | 3.40E−19 |
| 210 | PHE0002989_PMON95630.pep | Ras | 11 | 173 | 288.8 | 9.30E−84 |
| 212 | PHE0003300_PMON95106.pep | MtN3_slv | 12 | 99 | 131.1 | 2.80E−36 |
| 212 | PHE0003300_PMON95106.pep | MtN3_slv | 133 | 219 | 134.9 | 2.00E−37 |
| 214 | PHE0003389_PMON94682.pep | p450 | 48 | 527 | 286.5 | 4.60E−83 |
| 215 | PHE0003614_PMON95111.pep | Pyridoxal_deC | 33 | 381 | 531.8 | 6.80E−157 |
| 216 | PHE0003684_PMON92807.pep | Myb_DNA-binding | 118 | 168 | 47.9 | 3.00E−11 |
| 217 | PHE0003684_PMON93378.pep | Myb_DNA-binding | 118 | 168 | 47.9 | 3.00E−11 |
| 218 | PHE0003853_PMON92602.pep | Cyclin_N | 46 | 171 | 72.6 | 1.10E−18 |
| 219 | PHE0003903_PMON98271.pep | TPP_enzyme_N | 44 | 220 | 302.9 | 5.50E−88 |
| 219 | PHE0003903_PMON98271.pep | TPP_enzyme_M | 241 | 390 | 157.3 | 3.70E−44 |
| 220 | PHE0003905_PMON99283.pep | Aldedh | 30 | 492 | 514.4 | 1.10E−151 |
| 221 | PHE0003907_PMON98066.pep | Ribosomal_L12 | 124 | 191 | 62.6 | 1.20E−15 |
| 222 | PHE0003908_PMON98064.pep | DnaJ | 31 | 93 | 128.9 | 1.30E−35 |
| 223 | PHE0003960_PMON95079.pep | CTP_transf_2 | 56 | 186 | 142.9 | 7.70E−40 |
| 224 | PHE0003967_PMON95088.pep | GST_N | 11 | 84 | 43.3 | 7.40E−10 |
| 228 | PHE0004023_PMON92446.pep | PHD | 198 | 248 | 54.9 | 2.40E−13 |
| 229 | PHE0004026_PMON93885.pep | Aa_trans | 44 | 438 | 409.4 | 4.80E−120 |
| 230 | PHE0004027_PMON93860.pep | FAD_binding_4 | 64 | 218 | 83.9 | 4.60E−22 |
| 231 | PHE0004028_PMON94697.pep | Alpha-amylase | 10 | 426 | −62.1 | 4.30E−06 |
| 232 | PHE0004034_PMON92631.pep | DUF1336 | 236 | 478 | 491.8 | 7.30E−145 |
| 234 | PHE0004047_PMON92619.pep | LIM | 11 | 68 | 53.4 | 7.00E−13 |
| 234 | PHE0004047_PMON92619.pep | LIM | 110 | 167 | 63.9 | 4.70E−16 |
| 235 | PHE0004047_PMON93388.pep | LIM | 11 | 68 | 53.4 | 7.00E−13 |
| 235 | PHE0004047_PMON93388.pep | LIM | 110 | 167 | 63.9 | 4.70E−16 |
| 236 | PHE0004068_PMON93663.pep | AWPM-19 | 1 | 125 | 287.6 | 2.20E−83 |
| 237 | PHE0004071_PMON93311.pep | RRM_1 | 105 | 174 | 77.3 | 4.40E−20 |
| 238 | PHE0004072_PMON93654.pep | MMR_HSR1 | 214 | 324 | 65.7 | 1.40E−16 |
| 239 | PHE0004072_PMON93669.pep | MMR_HSR1 | 214 | 324 | 65.7 | 1.40E−16 |
| 241 | PHE0004075_PMON92851.pep | MtN3_slv | 15 | 104 | 75.5 | 1.50E−19 |
| 241 | PHE0004075_PMON92851.pep | MtN3_slv | 137 | 223 | 97.2 | 4.50E−26 |
| 242 | PHE0004080_PMON93321.pep | peroxidase | 19 | 227 | 241 | 2.40E−69 |
| 243 | PHE0004084_PMON95141.pep | Phi_1 | 35 | 314 | 691.3 | 6.40E−205 |
| 244 | PHE0004093_PMON93332.pep | Dimerisation | 40 | 100 | 105.7 | 1.20E−28 |
| 244 | PHE0004093_PMON93332.pep | Methyltransf_2 | 104 | 350 | 317.5 | 2.20E−92 |
| 245 | PHE0004093_PMON94155.pep | Dimerisation | 40 | 100 | 105.7 | 1.20E−28 |
| 245 | PHE0004093_PMON94155.pep | Methyltransf_2 | 104 | 350 | 317.5 | 2.20E−92 |
| 247 | PHE0004144_PMON93842.pep | Cofilin_ADF | 16 | 143 | 152.4 | 1.10E−42 |
| 248 | PHE0004148_PMON92574.pep | Iso_dh | 28 | 412 | 521.5 | 8.40E−154 |
| 249 | PHE0004149_PMON92471.pep | HEAT_PBS | 115 | 143 | 23.8 | 0.00057 |
| 249 | PHE0004149_PMON92471.pep | HEAT_PBS | 155 | 181 | 37.8 | 3.50E−08 |
| 249 | PHE0004149_PMON92471.pep | HEAT_PBS | 186 | 212 | 22.4 | 0.0015 |
| 249 | PHE0004149_PMON92471.pep | HEAT_PBS | 260 | 287 | 16.8 | 0.074 |
| 250 | PHE0004149_PMON93899.pep | HEAT_PBS | 115 | 143 | 23.8 | 0.00057 |
| 250 | PHE0004149_PMON93899.pep | HEAT_PBS | 155 | 181 | 37.8 | 3.50E−08 |
| 250 | PHE0004149_PMON93899.pep | HEAT_PBS | 186 | 212 | 22.4 | 0.0015 |
| 250 | PHE0004149_PMON93899.pep | HEAT_PBS | 260 | 287 | 16.8 | 0.074 |
| 251 | PHE0004152_PMON93672.pep | AT_hook | 69 | 81 | 7.4 | 1.1 |
| 251 | PHE0004152_PMON93672.pep | DUF296 | 96 | 217 | 175.1 | 1.60E−49 |
| 252 | PHE0004155_PMON92626.pep | ADH_N | 41 | 152 | 176.1 | 8.20E−50 |
| 252 | PHE0004155_PMON92626.pep | ADH_zinc_N | 181 | 324 | 127.8 | 2.70E−35 |
| 253 | PHE0004156_PMON92623.pep | NPH3 | 135 | 364 | 219.3 | 7.80E−63 |
| 254 | PHE0004162_PMON92481.pep | AUX_IAA | 22 | 279 | 395.9 | 5.30E−116 |
| 255 | PHE0004164_PMON92465.pep | X8 | 29 | 115 | 168.4 | 1.70E−47 |
| 257 | PHE0004167_PMON93333.pep | APS_kinase | 108 | 264 | 363.4 | 3.20E−106 |
| 258 | PHE0004168_PMON93855.pep | FAD_binding_4 | 84 | 225 | 93 | 8.10E−25 |
| 258 | PHE0004168_PMON93855.pep | BBE | 476 | 534 | 120.1 | 5.70E−33 |
| 259 | PHE0004169_PMON92568.pep | Aldo_ket_red | 14 | 298 | 389.4 | 4.80E−114 |
| 260 | PHE0004184_PMON92565.pep | UIM | 214 | 231 | 14.4 | 0.29 |
| 260 | PHE0004184_PMON92565.pep | UIM | 298 | 315 | 24 | 0.00049 |
| 261 | PHE0004185_PMON92802.pep | p450 | 39 | 504 | 157.8 | 2.70E−44 |
| 262 | PHE0004188_PMON92803.pep | HSF_DNA-bind | 70 | 233 | 177.8 | 2.50E−50 |
| 263 | PHE0004190_PMON92801.pep | HLH | 175 | 213 | 9.2 | 0.014 |
| 264 | PHE0004208_PMON92834.pep | Myb_DNA-binding | 5 | 56 | 39.1 | 1.30E−08 |
| 264 | PHE0004208_PMON92834.pep | Myb_DNA-binding | 134 | 181 | 44.6 | 3.10E−10 |
| 265 | PHE0004215_PMON92827.pep | PBP | 14 | 170 | 30 | 1.50E−07 |
| 266 | PHE0004223_PMON92840.pep | Fasciclin | 40 | 179 | 11.7 | 0.00032 |
| 266 | PHE0004223_PMON92840.pep | Fasciclin | 217 | 353 | 104.9 | 2.20E−28 |
| 267 | PHE0004225_PMON94167.pep | Aldedh | 77 | 539 | 880.7 | 6.30E−262 |
| 268 | PHE0004226_PMON95114.pep | Aldedh | 77 | 539 | 873 | 1.30E−259 |
| 269 | PHE0004227_PMON92605.pep | UPF0057 | 5 | 55 | 76.3 | 8.50E−20 |
| 270 | PHE0004229_PMON92867.pep | UPF0057 | 4 | 54 | 96.4 | 8.00E−26 |
| 271 | PHE0004233_PMON92843.pep | HSF_DNA-bind | 60 | 236 | 255.5 | 1.00E−73 |
| 272 | PHE0004237_PMON93673.pep | HSP20 | 48 | 153 | 184.3 | 2.80E−52 |
| 273 | PHE0004243_PMON92621.pep | CBFD_NFYB_HMF | 22 | 87 | 122.5 | 1.10E−33 |
| 274 | PHE0004244_PMON92858.pep | CBFD_NFYB_HMF | 39 | 104 | 121 | 3.00E−33 |
| 275 | PHE0004245_PMON93813.pep | CBFD_NFYB_HMF | 25 | 90 | 129.2 | 1.00E−35 |
| 276 | PHE0004248_PMON94672.pep | CBFD_NFYB_HMF | 37 | 102 | 125.3 | 1.60E−34 |
| 278 | PHE0004250_PMON92881.pep | CBFD_NFYB_HMF | 25 | 90 | 119.7 | 7.80E−33 |
| 279 | PHE0004252_PMON92606.pep | CBFD_NFYB_HMF | 14 | 79 | 94.1 | 3.80E−25 |
| 280 | PHE0004253_PMON92874.pep | CBFD_NFYB_HMF | 7 | 71 | 83.8 | 5.00E−22 |
| 281 | PHE0004258_PMON93385.pep | Pkinase | 5 | 276 | 144.7 | 2.30E−40 |
| 282 | PHE0004258_PMON93806.pep | Pkinase | 5 | 276 | 144.7 | 2.30E−40 |
| 283 | PHE0004259_PMON93384.pep | Abhydrolase_3 | 95 | 319 | 302.4 | 7.70E−88 |
| 285 | PHE0004261_PMON93389.pep | Pkinase | 31 | 282 | 289.6 | 5.30E−84 |
| 285 | PHE0004261_PMON93389.pep | Pkinase_Tyr | 31 | 280 | 69.3 | 6.10E−20 |
| 286 | PHE0004261_PMON93655.pep | Pkinase | 31 | 282 | 289.6 | 5.30E−84 |
| 286 | PHE0004261_PMON93655.pep | Pkinase_Tyr | 31 | 280 | 69.3 | 6.10E−20 |
| 287 | PHE0004262_PMON92862.pep | Pkinase | 86 | 366 | 153.9 | 3.70E−43 |
| 287 | PHE0004262_PMON92862.pep | Pkinase_Tyr | 86 | 366 | 132.2 | 1.30E−36 |
| 288 | PHE0004262_PMON93360.pep | Pkinase | 86 | 366 | 153.9 | 3.70E−43 |
| 288 | PHE0004262_PMON93360.pep | Pkinase_Tyr | 86 | 366 | 132.2 | 1.30E−36 |
| 289 | PHE0004264_PMON92845.pep | PMEI | 25 | 174 | 138.8 | 1.40E−38 |
| 290 | PHE0004264_PMON93354.pep | PMEI | 25 | 174 | 138.8 | 1.40E−38 |
| 291 | PHE0004265_PMON92873.pep | Suc_Fer-like | 59 | 308 | 60.7 | 4.30E−15 |
| 292 | PHE0004265_PMON93807.pep | Suc_Fer-like | 59 | 308 | 60.7 | 4.30E−15 |
| 293 | PHE0004266_PMON92877.pep | Myb_DNA-binding | 298 | 348 | 46.6 | 7.80E−11 |
| 294 | PHE0004284_PMON93857.pep | U-box | 23 | 97 | 98.2 | 2.30E−26 |
| 295 | PHE0004285_PMON95136.pep | CBFD_NFYB_HMF | 61 | 126 | 123 | 7.70E−34 |
| 296 | PHE0004286_PMON93666.pep | ICL | 21 | 551 | 1239.3 | 0 |
| 297 | PHE0004287_PMON93344.pep | ICL | 21 | 552 | 1169.2 | 0 |
| 298 | PHE0004307_PMON94102.pep | RWP-RK | 196 | 247 | 90.7 | 4.00E−24 |
| 299 | PHE0004314_PMON93397.pep | zf-C3HC4 | 148 | 185 | 34.1 | 4.50E−07 |
| 300 | PHE0004321_PMON93811.pep | Redoxin | 64 | 228 | 4.9 | 0.0016 |
| 300 | PHE0004321_PMON93811.pep | GSHPx | 73 | 181 | 246.5 | 5.10E−71 |
| 301 | PHE0004321_PMON93834.pep | Redoxin | 64 | 228 | 4.9 | 0.0016 |
| 301 | PHE0004321_PMON93834.pep | GSHPx | 73 | 181 | 246.5 | 5.10E−71 |
| 302 | PHE0004325_PMON93818.pep | CcmH | 1 | 139 | 16.6 | 6.50E−09 |
| 303 | PHE0004335_PMON93850.pep | DZC | 158 | 193 | 81.9 | 1.80E−21 |
| 303 | PHE0004335_PMON93850.pep | DZC | 308 | 343 | 80.9 | 3.70E−21 |
| 304 | PHE0004336_PMON93858.pep | DZC | 179 | 214 | 78.3 | 2.20E−20 |
| 304 | PHE0004336_PMON93858.pep | DZC | 369 | 404 | 71.4 | 2.60E−18 |
| 306 | PHE0004348_PMON93810.pep | CSD | 1 | 65 | 136.8 | 5.50E−38 |
| 307 | PHE0004349_PMON93812.pep | CSD | 1 | 65 | 141.9 | 1.50E−39 |
| 308 | PHE0004350_PMON93826.pep | CSD | 1 | 66 | 148.4 | 1.70E−41 |
| 309 | PHE0004351_PMON93821.pep | CSD | 1 | 66 | 149.5 | 8.10E−42 |
| 310 | PHE0004352_PMON93824.pep | CSD | 2 | 68 | 151.2 | 2.50E−42 |
| 312 | PHE0004393_PMON94192.pep | efhand | 29 | 57 | 18 | 0.031 |
| 312 | PHE0004393_PMON94192.pep | efhand | 66 | 94 | 25.3 | 0.0002 |
| 312 | PHE0004393_PMON94192.pep | efhand | 110 | 138 | 24.2 | 0.00042 |
| 313 | PHE0004395_PMON94145.pep | C2 | 16 | 138 | 72.1 | 1.60E−18 |
| 313 | PHE0004395_PMON94145.pep | PLDc | 357 | 392 | 30.1 | 7.20E−06 |
| 313 | PHE0004395_PMON94145.pep | PLDc | 702 | 729 | 37.1 | 5.70E−08 |
| 314 | PHE0004396_PMON94137.pep | Orn_Arg_deC_N | 118 | 393 | 282.3 | 8.80E−82 |
| 314 | PHE0004396_PMON94137.pep | Orn_DAP_Arg_deC | 396 | 596 | 161.7 | 1.70E−45 |
| 315 | PHE0004417_PMON94190.pep | Spermine_synth | 13 | 256 | 516.1 | 3.40E−152 |
| 316 | PHE0004418_PMON94368.pep | Amino_oxidase | 18 | 504 | 275.8 | 7.90E−80 |
| 317 | PHE0004419_PMON95100.pep | Amidohydro_1 | 95 | 446 | 56.2 | 1.00E−13 |
| 317 | PHE0004419_PMON95100.pep | Amidohydro_3 | 95 | 444 | −49.9 | 0.00024 |
| 318 | PHE0004421_PMON95120.pep | AP2 | 52 | 118 | 92.2 | 1.40E−24 |
| 319 | PHE0004422_PMON95123.pep | AP2 | 58 | 123 | 78.5 | 1.90E−20 |
| 322 | PHE0004432_PMON94112.pep | Lactamase_B | 63 | 262 | 81.6 | 2.20E−21 |
| 322 | PHE0004432_PMON94112.pep | RMMBL | 400 | 440 | 33.6 | 6.10E−07 |
| 323 | PHE0004472_PMON94115.pep | Sina | 5 | 205 | 188 | 2.00E−53 |
| 324 | PHE0004472_PMON94126.pep | Sina | 5 | 205 | 188 | 2.00E−53 |
| 325 | PHE0004488_PMON95609.pep | Anti-silence | 1 | 155 | 392.9 | 4.40E−115 |
| 327 | PHE0004492_PMON95614.pep | NPH3 | 193 | 435 | 469.9 | 2.90E−138 |
| 328 | PHE0004545_PMON95117.pep | Ribosomal_L14 | 49 | 196 | 105.5 | 1.50E−28 |
| 329 | PHE0004574_PMON94433.pep | Transaldolase | 102 | 405 | 620.7 | 1.20E−183 |
| 329 | PHE0004574_PMON94433.pep | efhand | 444 | 472 | 21.3 | 0.0031 |
| 330 | PHE0004606_PMON95627.pep | Metallophos | 54 | 249 | 154 | 3.60E−43 |
| 331 | PHE0004620_PMON94189.pep | PFK | 6 | 281 | 515.1 | 7.30E−152 |
| 332 | PHE0004620_PMON94442.pep | PFK | 6 | 281 | 515.1 | 7.30E−152 |
| 333 | PHE0004622_PMON95621.pep | F-box | 2 | 49 | 43.2 | 8.10E−10 |
| 333 | PHE0004622_PMON95621.pep | LRR_2 | 150 | 175 | 41.5 | 2.60E−09 |
| 333 | PHE0004622_PMON95621.pep | FBD | 332 | 382 | 74.8 | 2.50E−19 |
| 334 | PHE0004626_PMON95101.pep | Aminotran_3 | 79 | 434 | 323.4 | 3.50E−94 |
| 335 | PHE0004630_PMON94367.pep | Iso_dh | 40 | 363 | 326.9 | 3.20E−95 |
| 336 | PHE0004634_PMON94385.pep | AP2 | 28 | 91 | 114.2 | 3.40E−31 |
| 337 | PHE0004640_PMON95066.pep | FAE1_CUT1_RppA | 75 | 365 | 539.9 | 2.40E−159 |
| 337 | PHE0004640_PMON95066.pep | Chal_sti_synt_C | 322 | 466 | 8.7 | 0.0003 |
| 337 | PHE0004640_PMON95066.pep | ACP_syn_III_C | 382 | 464 | 26.7 | 2.30E−08 |
| 338 | PHE0004645_PMON94655.pep | 14-3-3 | 5 | 241 | 304.8 | 1.50E−88 |
| 339 | PHE0004645_PMON94685.pep | 14-3-3 | 5 | 241 | 304.8 | 1.50E−88 |
| 342 | PHE0004650_PMON94686.pep | Skp1_POZ | 4 | 64 | 105.3 | 1.70E−28 |
| 342 | PHE0004650_PMON94686.pep | Skp1 | 112 | 190 | 173 | 6.90E−49 |
| 343 | PHE0004652_PMON94657.pep | UPF0005 | 31 | 247 | 55.1 | 2.20E−13 |
| 344 | PHE0004652_PMON94687.pep | UPF0005 | 31 | 247 | 55.1 | 2.20E−13 |
| 346 | PHE0004689_PMON95131.pep | Pkinase | 12 | 291 | 357 | 2.70E−104 |
| 347 | PHE0004691_PMON95129.pep | Spermine_synth | 33 | 278 | 501.4 | 9.60E−148 |
| 348 | PHE0004719_PMON94698.pep | zf-C3HC4 | 203 | 243 | 26.6 | 8.00E−05 |
| 349 | PHE0004719_PMON95089.pep | zf-C3HC4 | 203 | 243 | 26.6 | 8.00E−05 |
| 350 | PHE0004734_PMON94667.pep | KOW | 26 | 62 | 30.7 | 4.80E−06 |
| 350 | PHE0004734_PMON94667.pep | eIF-5a | 84 | 153 | 125.8 | 1.10E−34 |
| 351 | PHE0004735_PMON95116.pep | KOW | 26 | 62 | 32.2 | 1.70E−06 |
| 351 | PHE0004735_PMON95116.pep | eIF-5a | 84 | 153 | 120.3 | 5.10E−33 |
| 352 | PHE0004739_PMON95110.pep | Miro | 7 | 121 | 68.7 | 1.70E−17 |
| 352 | PHE0004739_PMON95110.pep | Ras | 8 | 179 | 270.9 | 2.30E−78 |
| 353 | PHE0004753_PMON95105.pep | Aldedh | 61 | 520 | 791.8 | 3.50E−235 |
| 355 | PHE0004770_PMON95122.pep | DUF1242 | 2 | 70 | 118.4 | 1.80E−32 |
| 357 | PHE0004774_PMON95147.pep | zf-A20 | 14 | 38 | 33.1 | 9.10E−07 |
| 357 | PHE0004774_PMON95147.pep | zf-AN1 | 92 | 132 | 68.2 | 2.50E−17 |
| 358 | PHE0004777_PMON95118.pep | RNA_pol_L | 6 | 83 | 75.9 | 1.20E−19 |
| 359 | PHE0004785_PMON95057.pep | Ribosomal_L18p | 26 | 172 | 251.4 | 1.70E−72 |
| 360 | PHE0004786_PMON95604.pep | Phi_1 | 35 | 314 | 691.3 | 6.40E−205 |
| 361 | PHE0004788_PMON95092.pep | DS | 53 | 369 | 587.4 | 1.30E−173 |
| 362 | PHE0004799_PMON95602.pep | DAO | 34 | 481 | −14.1 | 7.30E−05 |
| 362 | PHE0004799_PMON95602.pep | Amino_oxidase | 42 | 483 | 342.7 | 5.60E−100 |
| 363 | PHE0004841_PMON95636.pep | DNA_photolyase | 18 | 190 | 254.3 | 2.30E−73 |
| 363 | PHE0004841_PMON95636.pep | FAD_binding_7 | 223 | 501 | 503 | 3.20E−148 |
| 367 | PHE0004888_PMON95603.pep | Globin | 7 | 134 | 73 | 8.40E−19 |
| 367 | PHE0004888_PMON95603.pep | FAD_binding_6 | 156 | 263 | 29 | 4.80E−07 |
| 367 | PHE0004888_PMON95603.pep | NAD_binding_1 | 276 | 393 | 13.4 | 9.80E−05 |
| 369 | ERD4.pep | DUF221 | 295 | 710 | 245.3 | 1.20E−70 |
| 370 | At1g78070.2.pep | WD40 | 310 | 347 | 34.1 | 4.40E−07 |
| 372 | At3g47340.1.pep | GATase_2 | 2 | 161 | 99.6 | 8.60E−27 |
| 372 | At3g47340.1.pep | Asn_synthase | 209 | 450 | 344.3 | 1.80E−100 |
| 373 | At3g47340.3.pep | GATase_2 | 2 | 161 | 99.6 | 8.60E−27 |
| 373 | At3g47340.3.pep | Asn_synthase | 209 | 430 | 286.1 | 6.20E−83 |
| 374 | At3g47340.2.pep | GATase_2 | 2 | 161 | 99.6 | 8.60E−27 |
| 374 | At3g47340.2.pep | Asn_synthase | 209 | 450 | 344.3 | 1.80E−100 |
| 375 | At5g13170.1.pep | MtN3_slv | 12 | 99 | 135.1 | 1.80E−37 |
| 375 | At5g13170.1.pep | MtN3_slv | 134 | 220 | 135.4 | 1.40E−37 |
| 376 | At2g19900.1.pep | malic | 107 | 295 | 407.1 | 2.20E−119 |
| 376 | At2g19900.1.pep | Malic_M | 297 | 550 | 466.9 | 2.30E−137 |
| 379 | At2g42790.1.pep | Citrate_synt | 93 | 461 | 506.2 | 3.40E−149 |
| 380 | At3g56200.1.pep | Aa_trans | 21 | 426 | 106.3 | 8.10E−29 |
| 381 | At5g01520.1.pep | zf-C3HC4 | 146 | 183 | 26.1 | 0.00011 |
| 384 | At5g59320.1.pep | Tryp_alpha_amyl | 27 | 111 | 114.7 | 2.30E−31 |
| 385 | AtHB7.pep | Homeobox | 30 | 86 | 66.6 | 7.10E−17 |
| 385 | AtHB7.pep | HALZ | 87 | 131 | 39.2 | 1.30E−08 |
| 386 | RD20.pep | Caleosin | 54 | 227 | 469 | 5.30E−138 |

TABLE 11

| Pfam domain | accession | gathering | |
|---|---|---|---|
| name | number | cutoff | domain description |
| 14-3-3 | PF00244.9 | 25 | 14-3-3 protein |
| ACP_syn_III_C | PF08541.1 | −24.4 | 3-Oxoacyl-[acyl-carrier-protein (ACP)] synthase III C |
| | | | terminal |
| ADH_N | PF08240.2 | −14.5 | Alcohol dehydrogenase GroES-like domain |
| ADH_zinc_N | PF00107.16 | 23.8 | Zinc-binding dehydrogenase |
| AP2 | PF00847.9 | 0 | AP2 domain |
| APS_kinase | PF01583.9 | 25 | Adenylylsulphate kinase |
| AT_hook | PF02178.8 | 3.6 | AT hook motif |
| AUX_IAA | PF02309.6 | −83 | AUX/IAA family |
| AWPM-19 | PF05512.1 | 25 | AWPM-19-like family |
| Aa_trans | PF01490.7 | −128.4 | Transmembrane amino acid transporter protein |
| Abhydrolase_3 | PF07859.2 | 25.8 | alpha/beta hydrolase fold |
| Aldedh | PF00171.11 | −209.3 | Aldehyde dehydrogenase family |
| Aldo_ket_red | PF00248.10 | −97 | Aldo/keto reductase family |
| Alpha-amylase | PF00128.12 | −93 | Alpha amylase, catalytic domain |
| Amidohydro_1 | PF01979.8 | −37.4 | Amidohydrolase family |
| Amidohydro_3 | PF07969.1 | −65.5 | Amidohydrolase family |
| Amino_oxidase | PF01593.12 | −11.4 | Flavin containing amine oxidoreductase |
| Aminotran_3 | PF00202.10 | −207.6 | Aminotransferase class-III |
| Ammonium_transp | PF00909.10 | −144 | Ammonium Transporter Family |
| Anti-silence | PF04729.4 | 25 | Anti-silencing protein, ASF1-like |
| Asn_synthase | PF00733.10 | −52.8 | Asparagine synthase |
| BBE | PF08031.1 | 25 | Berberine and berberine like |
| C2 | PF00168.18 | 3.7 | C2 domain |
| CAF1 | PF04857.8 | −100.5 | CAF1 family ribonuclease |
| CBFD_NFYB_HMF | PF00808.12 | 18.4 | Histone-like transcription factor (CBF/NF-Y) and |
| | | | archaeal histone |
| CSD | PF00313.12 | −0.3 | ‘Cold-shock’ DNA-binding domain |
| CTP_transf_2 | PF01467.16 | −11.8 | Cytidylyltransferase |
| Caleosin | PF05042.3 | 25 | Caleosin related protein |
| CcmH | PF03918.4 | −30.8 | Cytochrome C biogenesis protein |
| Chal_sti_synt_C | PF02797.5 | −6.1 | Chalcone and stilbene synthases, C-terminal |
| | | | domain |
| Citrate_synt | PF00285.10 | −101.5 | Citrate synthase |
| Cofilin_ADF | PF00241.10 | −4.7 | Cofilin/tropomyosin-type actin-binding protein |
| Cyclin_N | PF00134.13 | −14.7 | Cyclin, N-terminal domain |
| DAO | PF01266.12 | −35.9 | FAD dependent oxidoreductase |
| DNA_photolyase | PF00875.8 | 26.1 | DNA photolyase |
| DS | PF01916.7 | −95.2 | Deoxyhypusine synthase |
| DUF1242 | PF06842.1 | 25 | Protein of unknown function (DUF1242) |
| DUF1336 | PF07059.2 | −78.2 | Protein of unknown function (DUF1336) |
| DUF221 | PF02714.5 | 25 | Domain of unknown function DUF221 |
| DUF296 | PF03479.4 | −11 | Domain of unknown function (DUF296) |
| DZC | PF08381.1 | 15.3 | Disease resistance/zinc finger/chromosome |
| | | | condensation-like region |
| Dimerisation | PF08100.1 | 18.1 | Dimerisation domain |
| DnaJ | PF00226.19 | −8 | DnaJ domain |
| F-box | PF00646.21 | 13.6 | F-box domain |
| FAD_binding_4 | PF01565.12 | −8.1 | FAD binding domain |
| FAD_binding_6 | PF00970.13 | −11.4 | Oxidoreductase FAD-binding domain |
| FAD_binding_7 | PF03441.4 | 25 | FAD binding domain of DNA photolyase |
| FAE1_CUT1_RppA | PF08392.1 | −192.7 | FAE1/Type III polyketide synthase-like protein |
| FBD | PF08387.1 | 25 | FBD |
| Fasciclin | PF02469.10 | 4 | Fasciclin domain |
| GATase_2 | PF00310.10 | −106.2 | Glutamine amidotransferases class-II |
| GSHPx | PF00255.10 | −16 | Glutathione peroxidase |
| GST_N | PF02798.9 | 14.6 | Glutathione S-transferase, N-terminal domain |
| Globin | PF00042.11 | −8.8 | Globin |
| HALZ | PF02183.7 | 17 | Homeobox associated leucine zipper |
| HEAT_PBS | PF03130.5 | 15 | PBS lyase HEAT-like repeat |
| HLH | PF00010.15 | 8.2 | Helix-loop-helix DNA-binding domain |
| HSF_DNA-bind | PF00447.7 | −70 | HSF-type DNA-binding |
| HSP20 | PF00011.10 | 13 | Hsp20/alpha crystallin family |
| Homeobox | PF00046.18 | −4.1 | Homeobox domain |
| ICL | PF00463.10 | −234 | Isocitrate lyase family |
| Iso_dh | PF00180.10 | −97 | Isocitrate/isopropylmalate dehydrogenase |
| K-box | PF01486.7 | 0 | K-box region |
| KOW | PF00467.18 | 29.1 | KOW motif |
| LIM | PF00412.11 | 0 | LIM domain |
| LRR_2 | PF07723.2 | 6 | Leucine Rich Repeat |
| Lactamase_B | PF00753.16 | 24.6 | Metallo-beta-lactamase superfamily |
| MMR_HSR1 | PF01926.11 | 31.2 | GTPase of unknown function |
| Malic_M | PF03949.4 | −143.9 | Malic enzyme, NAD binding domain |
| Metallophos | PF00149.17 | 22 | Calcineurin-like phosphoesterase |
| Methyltransf_2 | PF00891.7 | −103.8 | O-methyltransferase |
| Miro | PF08477.1 | 28 | Miro-like protein |
| MtN3_slv | PF03083.5 | −0.8 | MtN3/saliva family |
| Myb_DNA-binding | PF00249.19 | 2.8 | Myb-like DNA-binding domain |
| NAD_binding_1 | PF00175.10 | −3.9 | Oxidoreductase NAD-binding domain |
| NAF | PF03822.4 | 4.5 | NAF domain |
| NPH3 | PF03000.4 | 25 | NPH3 family |
| Orn_Arg_deC_N | PF02784.7 | −76 | Pyridoxal-dependent decarboxylase, pyridoxal |
| | | | binding domain |
| Orn_DAP_Arg_deC | PF00278.12 | 6.7 | Pyridoxal-dependent decarboxylase, C-terminal |
| | | | sheet domain |
| PBP | PF01161.9 | −20.6 | Phosphatidylethanolamine-binding protein |
| PEP-utilizers | PF00391.12 | 10 | PEP-utilising enzyme, mobile domain |
| PEP-utilizers_C | PF02896.7 | −173 | PEP-utilising enzyme, TIM barrel domain |
| PFK | PF00365.10 | −132 | Phosphofructokinase |
| PHD | PF00628.17 | 25.9 | PHD-finger |
| PLDc | PF00614.11 | 0 | Phospholipase D Active site motif |
| PMEI | PF04043.5 | 25 | Plant invertase/pectin methylesterase inhibitor |
| PPDK_N | PF01326.8 | −87 | Pyruvate phosphate dikinase, PEP/pyruvate binding |
| | | | domain |
| Phi_1 | PF04674.2 | 25 | Phosphate-induced protein 1 conserved region |
| Pkinase | PF00069.14 | −70.8 | Protein kinase domain |
| Pkinase_Tyr | PF07714.5 | 65 | Protein tyrosine kinase |
| Pyridoxal_deC | PF00282.9 | −158.6 | Pyridoxal-dependent decarboxylase conserved |
| | | | domain |
| RMMBL | PF07521.1 | 18.5 | RNA-metabolising metallo-beta-lactamase |
| RNA_pol_L | PF01193.12 | 16.9 | RNA polymerase Rpb3/Rpb11 dimerisation domain |
| RRM_1 | PF00076.11 | 20.7 | RNA recognition motif. (a.k.a. RRM, RBD, or RNP |
| | | | domain) |
| RWP-RK | PF02042.5 | 25 | RWP-RK domain |
| Ras | PF00071.11 | −69.9 | Ras family |
| Redoxin | PF08534.1 | −1 | Redoxin |
| Ribosomal_L12 | PF00542.8 | 25 | Ribosomal protein L7/L12 C-terminal domain |
| Ribosomal_L14 | PF00238.9 | −8 | Ribosomal protein L14p/L23e |
| Ribosomal_L18p | PF00861.12 | 25 | Ribosomal L18p/L5e family |
| SRF-TF | PF00319.8 | 11 | SRF-type transcription factor (DNA-binding and |
| | | | dimerisation domain) |
| Sina | PF03145.6 | −48.4 | Seven in absentia protein family |
| Skp1 | PF01466.8 | −2 | Skp1 family, dimerisation domain |
| Skp1_POZ | PF03931.5 | 14.9 | Skp1 family, tetramerisation domain |
| Spermine_synth | PF01564.6 | −93.8 | Spermine/spermidine synthase |
| Suc_Fer-like | PF06999.2 | −42.4 | Sucrase/ferredoxin-like |
| TPP_enzyme_M | PF00205.11 | −23.9 | Thiamine pyrophosphate enzyme, central domain |
| TPP_enzyme_N | PF02776.7 | −70 | Thiamine pyrophosphate enzyme, N-terminal TPP |
| | | | binding domain |
| Transaldolase | PF00923.9 | −49 | Transaldolase |
| Tryp_alpha_amyl | PF00234.10 | −4 | Protease inhibitor/seed storage/LTP family |
| U-box | PF04564.5 | 10.5 | U-box domain |
| UIM | PF02809.10 | 4.1 | Ubiquitin interaction motif |
| UPF0005 | PF01027.11 | −6.7 | Uncharacterised protein family UPF0005 |
| UPF0057 | PF01679.7 | 25 | Uncharacterized protein family UPF0057 |
| WD40 | PF00400.20 | 21.5 | WD domain, G-beta repeat |
| X8 | PF07983.3 | −28.8 | X8 domain |
| eIF-5a | PF01287.9 | 9.6 | Eukaryotic initiation factor 5A hypusine, DNA- |
| | | | binding OB fold |
| efhand | PF00036.20 | 17.5 | EF hand |
| malic | PF00390.8 | 25 | Malic enzyme, N-terminal domain |
| p450 | PF00067.11 | −105 | Cytochrome P450 |
| peroxidase | PF00141.12 | −10 | Peroxidase |
| zf-A20 | PF01754.6 | 25 | A20-like zinc finger |
| zf-AN1 | PF01428.6 | 0 | AN1-like Zinc finger |
| zf-C3HC4 | PF00097.13 | 16.9 | Zinc finger, C3HC4 type (RING finger) |

### Example 10

### Selection of Transgenic Plants with Enhanced Agronomic Traits

[0131] This example illustrates identification of plant cells of the invention by screening transgenic plants and seeds for an enhanced trait. Transgenic seed and plants, e.g., with transgenic corn cells in the plants prepared in Example 2, transgenic soybean cells in the plants prepared in Example 3, transgenic cotton cells in the plants prepared in Example 4, and transgenic cells in the plants prepared in Example 6, are screened for enhanced water use efficiency, enhanced cold tolerance, increased yield, enhanced nitrogen use efficiency, enhanced seed protein and enhanced seed oil as compared to control plants.

### A. Selection for Enhanced Nitrogen Use Efficiency

[0132] The physiological efficacy of transgenic corn plants (tested as hybrids) can be tested for nitrogen use efficiency (NUE) traits in a high-throughput nitrogen (N) selection method. The collected data are compared to the measurements from wildtype controls using a statistical model to determine if the changes are due to the transgene. Raw data were analyzed by SAS software. Results shown herein are the comparison of transgenic plants relative to the wildtype controls.

### (1) Media Preparation for Planting a NUE Protocol

[0133] Planting materials used: Metro Mix 200 (vendor: Hummert) Cat. #10-0325, Scotts Micro Max Nutrients (vendor: Hummert) Cat. #07-6330, OS 4⅓″×3⅞″ pots (vendor: Hummert) Cat. #16-1415, OS trays (vendor: Hummert) Cat. #16-1515, Hoagland's macronutrients solution, Plastic 5″ stakes (vendor: Hummert) yellow Cat. #49-1569, white Cat. #49-1505, Labels with numbers indicating material contained in pots. Fill 500 pots to rim with Metro Mix 200 to a weight of ˜140 g/pot. Pots are filled uniformly by using a balancer. Add 0.4 g of Micro Max nutrients to each pot. Stir ingredients with spatula to a depth of 3 inches while preventing material loss.

### (2) Planting a NUE Selection in the Greenhouse

[0134] (a) Seed Germination—Each pot is lightly watered twice using reverse osmosis purified water. The first watering is scheduled to occur just before planting; and the second watering, after the seed has been planted in the pot. Ten Seeds of each entry (1 seed per pot) are planted to select eight healthy uniform seedlings. Additional wild type controls are planted for use as border rows. Alternatively, 15 seeds of each entry (1 seed per pot) are planted to select 12 healthy uniform seedlings (this larger number of plantings is used for the second, or confirmation, planting). Place pots on each of the 12 shelves in the Conviron growth chamber for seven days. This is done to allow more uniform germination and early seedling growth. The following growth chamber settings are 25° C./day and 22° C./night, 14 hours light and ten hours dark, humidity ˜80%, and light intensity ˜350 μmol/m²/s (at pot level). Watering is done via capillary matting similar to greenhouse benches with duration of ten minutes three times a day.

[0135] (b) Seedling transfer—After seven days, the best eight or 12 seedlings for the first or confirmation pass runs, respectively, are chosen and transferred to greenhouse benches. The pots are spaced eight inches apart (center to center) and are positioned on the benches using the spacing patterns printed on the capillary matting. The Vattex matting creates a 384-position grid, randomizing all range, row combinations. Additional pots of controls are placed along the outside of the experimental block to reduce border effects.

[0136] Plants are allowed to grow for 28 days under the low N run or for 23 days under the high N run. The macronutrients are dispensed in the form of a macronutrient solution (see composition below) containing precise amounts of N added (2 mM NH₄NO₃ for limiting N selection and 20 mM NH₄NO₃ for high N selection runs). Each pot is manually dispensed 100 ml of nutrient solution three times a week on alternate days starting at eight and ten days after planting for high N and low N runs, respectively. On the day of nutrient application, two 20 min waterings at 05:00 and 13:00 are skipped. The vattex matting should be changed every third run to avoid N accumulation and buildup of root matter. Table 12 shows the amount of nutrients in the nutrient solution for either the low or high nitrogen selection.

TABLE 12

| | 2 mM NH₄NO₃ | 20 mM NH₄NO₃ (high |
|---|---|---|
| | (Low Nitrogen Growth | Nitrogen Growth |
| | Condition, Low N) | Condition, High N) |
| Nutrient Stock | mL/L | mL/L |
| 1 M NH₄N0₃ | 2 | 20 |
| 1 M KH₂PO₄ | 0.5 | 0.5 |
| 1 M MgSO₄•7H₂O | 2 | 2 |
| 1 M CaCl₂ | 2.5 | 2.5 |
| 1 M K₂SO₄ | 1 | 1 |

Note
Adjust pH to 5.6 with HCl or KOH

[0137] (c) Harvest Measurements and Data Collection—After 28 days of plant growth for low N runs and 23 days of plant growth for high N runs, the following measurements are taken (phenocodes in parentheses): total shoot fresh mass (g) (SFM) measured by Sartorius electronic balance, V6 leaf chlorophyll measured by Minolta SPAD meter (relative units) (LC), V6 leaf area (cm²) (LA) measured by a Li-Cor leaf area meter, V6 leaf fresh mass (g) (LFM) measured by Sartorius electronic balance, and V6 leaf dry mass (g) (LDM) measured by Sartorius electronic balance. Raw data were analyzed by SAS software. Results shown are the comparison of transgenic plants relative to the wildtype controls.

[0138] To take a leaf reading, samples were excised from the V6 leaf. Since chlorophyll meter readings of corn leaves are affected by the part of the leaf and the position of the leaf on the plant that is sampled, SPAD meter readings were done on leaf six of the plants. Three measurements per leaf were taken, of which the first reading was taken from a point one-half the distance between the leaf tip and the collar and halfway from the leaf margin to the midrib while two were taken toward the leaf tip. The measurements were restricted in the area from ½ to ¾ of the total length of the leaf (from the base) with approximately equal spacing between them. The average of the three measurements was taken from the SPAD machine.

[0139] Leaf fresh mass is recorded for an excised V6 leaf, the leaf is placed into a paper bag. The paper bags containing the leaves are then placed into a forced air oven at 80° C. for 3 days. After 3 days, the paper bags are removed from the oven and the leaf dry mass measurements are taken.

[0140] From the collected data, two derived measurements are made: (1) Leaf chlorophyll area (LCA), which is a product of V6 relative chlorophyll content and its leaf area (relative units). Leaf chlorophyll area=leaf chlorophyll×leaf area. This parameter gives an indication of the spread of chlorophyll over the entire leaf area; (2) specific leaf area (LSA) is calculated as the ratio of V6 leaf area to its dry mass (cm²/g dry mass), a parameter also recognized as a measure of NUE.

TABLE 13

| PEP | | | | Leaf chlorophyll area | | | Leaf chlorophyll | | | Shoot fresh mass | | |
|---|---|---|---|---|---|---|---|---|---|---|---|---|
| SEQ | | | | Percent | | P- | Percent | | P- | Percent | | P- |
| ID NO | Construct ID | Event ID | run | change | Delta | value | change | Delta | value | change | Delta | value |
| 199 | PMON77880 | ZM_M61363 | 1 | 2.2 | 140.91 | 0.5093 | 1.8 | 0.55 | 0.4558 | 8.9 | 4.39 | 0.0396 |
| | PMON77880 | ZM_M61363 | 2 | −6.1 | −311.2 | 0.038 | 1.6 | 0.46 | 0.3878 | −4.5 | −2.04 | 0.1861 |
| | PMON77880 | ZM_M61882 | 1 | 22.3 | 1423.3 | 0 | 15.1 | 4.68 | 0 | 38.5 | 18.94 | 0 |
| | PMON77880 | ZM_M61882 | 2 | 5.6 | 288.92 | 0.0458 | 8.4 | 2.44 | 0 | 7.8 | 3.51 | 0.0108 |
| 204 | PMON79194 | ZM_M47022 | 1 | 11.7 | 0.09 | 1.00E−04 | 11.7 | 0.09 | 1.00E−04 | −8.1 | −16.4 | 2.00E−04 |
| | PMON79194 | ZM_M47136 | 1 | −10.4 | −0.08 | 4.00E−04 | 8.3 | 0.44 | 2.00E−04 | 7.4 | 0.39 | 0.0011 |
| | PMON79194 | ZM_M48721 | 1 | −10.9 | −685.75 | 0.0017 | 7.1 | 2.2 | 0.0016 | 10.5 | 4.48 | 0.0036 |

### Nitrogen Use Field Efficacy Assay

[0141] Level I. Transgenic plants provided by the present invention are planted in field without any nitrogen source being applied. Transgenic plants and control plants are grouped by genotype and construct with controls arranged randomly within genotype blocks. Each type of transgenic plants are tested by 3 replications and across 5 locations. Nitrogen levels in the fields are analyzed in early April pre-planting by collecting 30 sample soil cores from 0-24″ and 24 to 48″ soil layer. Soil samples are analyzed for nitrate-nitrogen, phosphorus(P), Potassium(K), organic matter and pH to provide baseline values. P, K and micronutrients are applied based upon soil test recommendations.

[0142] Level II. Transgenic plants provided by the present invention are planted in field with three levels of nitrogen (N) fertilizer being applied, i.e. low level (0 N), medium level (80 lb/ac) and high level (180 lb/ac). Liquid 28% or 32% UAN (Urea, Ammonium Nitrogen) are used as the N source and apply by broadcast boom and incorporate with a field cultivator with rear rolling basket in the same direction as intended crop rows. Although there is no N applied to the 0 N treatment the soil should still be disturbed in the same fashion as the treated area. Transgenic plants and control plants are grouped by genotype and construct with controls arranged randomly within genotype blocks. Each type of transgenic plants is tested by 3 replications and across 4 locations. Nitrogen levels in the fields are analyzed in early April pre-planting by collecting 30 sample soil cores from 0-24″ and 24 to 48″ soil layer. Soil samples are analyzed for nitrate-nitrogen, phosphorus(P), Potassium(K), organic matter and pH to provide baseline values. P, K and micronutrients are applied based upon soil test recommendations.

### B. Selection for Increased Yield

[0143] Many transgenic plants of this invention exhibit improved yield as compared to a control plant. Improved yield can result from enhanced seed sink potential, i.e. the number and size of endosperm cells or kernels and/or enhanced sink strength, i.e. the rate of starch biosynthesis. Sink potential can be established very early during kernel development, as endosperm cell number and size are determined within the first few days after pollination.

[0144] Much of the increase in corn yield of the past several decades has resulted from an increase in planting density. During that period, corn yield has been increasing at a rate of 2.1 bushels/acre/year, but the planting density has increased at a rate of 250 plants/acre/year. A characteristic of modern hybrid corn is the ability of these varieties to be planted at high density. Many studies have shown that a higher than current planting density should result in more biomass production, but current germplasm does not perform well at these higher densities. One approach to increasing yield is to increase harvest index (HI), the proportion of biomass that is allocated to the kernel compared to total biomass, in high density plantings.

[0145] Effective yield selection of enhanced yielding transgenic corn events uses hybrid progeny of the transgenic event over multiple locations with plants grown under optimal production management practices, and maximum pest control. A useful target for improved yield is a 5% to 10% increase in yield as compared to yield produced by plants grown from seed for a control plant. Selection methods may be applied in multiple and diverse geographic locations, for example up to 16 or more locations, over one or more plating seasons, for example at least two planting seasons to statistically distinguish yield improvement from natural environmental effects. It is to plant multiple transgenic plants, positive and negative control plants, and pollinator plants in standard plots, for example 2 row plots, 20 feet long by 5 feet wide with 30 inches distance between rows and a 3 foot alley between ranges. Transgenic events can be grouped by recombinant DNA constructs with groups randomly placed in the field. A pollinator plot of a high quality corn line is planted for every two plots to allow open pollination when using male sterile transgenic events. A useful planting density is about 30,000 plants/acre. High planting density is greater than 30,000 plants/acre, preferably about 40,000 plants/acre, more preferably about 42,000 plants/acre, most preferably about 45,000 plants/acre. Surrogate indicators for yield improvement include source capacity (biomass), source output (sucrose and photosynthesis), sink components (kernel size, ear size, starch in the seed), development (light response, height, density tolerance), maturity, early flowering trait and physiological responses to high density planting, for example at 45,000 plants per acre, for example as illustrated in Table 14 and 15.

TABLE 14

| Timing | Evaluation | Description | comments |
|---|---|---|---|
| V2-3 | Early stand | Can be taken any time after | |
| | | germination and prior to | |
| | | removal of any plants. | |
| Pollen shed | GDU to 50% shed | GDU to 50% plants shedding | |
| | | 50% tassel. | |
| Silking | GDU to 50% silk | GDU to 50% plants showing | |
| | | silks. | |
| Maturity | Plant height | Height from soil surface to | 10 plants per plot - Yield |
| | | flag leaf attachment (inches). | team assistance |
| Maturity | Ear height | Height from soil surface to | 10 plants per plot - Yield |
| | | primary ear attachment node. | team assistance |
| Maturity | Leaves above ear | visual scores: erect, size, | |
| | | rolling | |
| Maturity | Tassel size | Visual scores +/− vs. WT | |
| Pre-Harvest | Final Stand | Final stand count prior to | |
| | | harvest, exclude tillers | |
| Pre-Harvest | Stalk lodging | No. of stalks broken below | |
| | | the primary ear attachment. | |
| | | Exclude leaning tillers | |
| Pre-Harvest | Root lodging | No. of stalks leaning >45° | |
| | | angle from perpendicular. | |
| Pre-Harvest | Stay green | After physiological maturity | |
| | | and when differences among | |
| | | genotypes are evident: Scale | |
| | | 1 (90-100% tissue green)-9 | |
| | | (0-19% tissue green). | |
| Harvest | Grain Yield | Grain yield/plot (Shell | |
| | | weight) | |

TABLE 15

| Timing | Evaluation | Description |
|---|---|---|
| V8-V12 | Chlorophyll | |
| V12-VT | Ear leaf area | |
| V15-15DAP | Chl fluorescence | |
| V15-15DAP | CER | |
| 15-25 DAP | Carbohydrates | sucrose, starch |
| Pre-Harvest | 1st internode diameter | |
| Pre-Harvest | Base 3 internode diameter | |
| Pre-Harvest | Ear internode diameter | |
| Maturity | Ear traits | diameter, length, kernel |
| | | number, kernel weight |

[0146] Electron transport rates (ETR) and CO2 exchange rates (CER): ETR and CER are measured with Li6400LCF (Licor, Lincoln, Nebr.) around V9-R1 stages. Leaf chlorophyll fluorescence is a quick way to monitor the source activity and is reported to be highly correlated with CO₂ assimilation under varies conditions (Photosyn Research, 37: 89-102). The youngest fully expanded leaf or 2 leaves above the ear leaf is measured with actinic light 1500 (with 10% blue light) micromol m⁻² s⁻¹, 28° C., CO2 levels 450 ppm. Ten plants are measured in each event. There are 2 readings for each plant.

[0147] A hand-held chlorophyll meter SPAD-502 (Minolta-Japan) is used to measure the total chlorophyll level on live transgenic plants and the wild type counterparts a. Three trifoliates from each plant are analyzed, and each trifoliate were analyzed three times. Then 9 data points are averaged to obtain the chlorophyll level. The number of analyzed plants of each genotype ranges from 5 to 8.

[0148] When selecting for yield improvement a useful statistical measurement approach comprises three components, i.e. modeling spatial autocorrelation of the test field separately for each location, adjusting traits of recombinant DNA events for spatial dependence for each location, and conducting an across location analysis. The first step in modeling spatial autocorrelation is estimating the covariance parameters of the semivariogram. A spherical covariance model is assumed to model the spatial autocorrelation. Because of the size and nature of the trial, it is likely that the spatial autocorrelation may change. Therefore, anisotropy is also assumed along with spherical covariance structure. The following set of equations describes the statistical form of the anisotropic spherical covariance model.

$$C ( h ; θ ) = vI ( h = 0 ) + {σ}^{2} ( 1 - \frac{3}{2} h + \frac{1}{2} {h}^{3} ) I ( h < 1 ) ,$$

where I(•) is the indicator function, h=\sqrt{\dot{x}²+\dot{y}²} and

\dot{x}=[cos(ρπ/180)(x₁−x₂)−sin(ρπ/180)(y₁−y₂)]/ωₓ

\dot{y}=[sin(ρπ/180)(x₁−x₂)+cos(ρπ/180)(y₁−y₂)]/ω_{y}

where s₁=(x₁, y₁) are the spatial coordinates of one location and s₂=(x₂, y₂) are the spatial coordinates of the second location. There are 5 covariance parameters, θ=(ν, σ², ρ, ωₙ, ωⱼ), where ν is the nugget effect, σ² is the partial sill, ρ is a rotation in degrees clockwise from north, Ωₙ is a scaling parameter for the minor axis and ωⱼ is a scaling parameter for the major axis of an anisotropical ellipse of equal covariance. The five covariance parameters that defines the spatial trend will then be estimated by using data from heavily replicated pollinator plots via restricted maximum likelihood approach. In a multi-location field trial, spatial trend are modeled separately for each location.

[0149] After obtaining the variance parameters of the model, a variance-covariance structure is generated for the data set to be analyzed. This variance-covariance structure contains spatial information required to adjust yield data for spatial dependence. In this case, a nested model that best represents the treatment and experimental design of the study is used along with the variance-covariance structure to adjust the yield data. During this process the nursery or the seed batch effects can also be modeled and estimated to adjust the yields for any yield parity caused by seed batch differences. After spatially adjusted data from different locations are generated, all adjusted data is combined and analyzed assuming locations as replications. In this analysis, intra and inter-location variances are combined to estimate the standard error of yield from transgenic plants and control plants. Relative mean comparisons are used to indicate statistically significant yield improvements.

### C. Selection for Enhanced Water Use Efficiency (WUE)

[0150] Described in this example is a high-throughput method for greenhouse selection of transgenic corn plants to wild type corn plants (tested as inbreds or hybrids) for water use efficiency and method for selection transgenic cotton plants for water use efficiency. This selection process imposes 3 drought/re-water cycles on plants over a total period of 15 days after an initial stress free growth period of 11 days. Each cycle consists of 5 days, with no water being applied for the first four days and a water quenching on the 5th day of the cycle. The primary phenotypes analyzed by the selection method are the changes in plant growth rate as determined by height and biomass during a vegetative drought treatment. The hydration status of the shoot tissues following the drought is also measured. The plant height is measured at three time points. The first is taken just prior to the onset drought when the plant is 11 days old, which is the shoot initial height (SIH). The plant height is also measured halfway throughout the drought/re-water regimen, on day 18 after planting, to give rise to the shoot mid-drought height (SMH). Upon the completion of the final drought cycle on day 26 after planting, the shoot portion of the plant is harvested and measured for a final height, which is the shoot wilt height (SWH) and also measured for shoot wilted biomass (SWM). The shoot is placed in water at 40 degree Celsius in the dark. Three days later, the shoot is weighted to give rise to the shoot turgid weight (STM). After drying in an oven for four days, the shoots are weighted for shoot dry biomass (SDM). The shoot average height (SAH) is the mean plant height across the 3 height measurements. The procedure described above may be adjusted for +/−˜one day for each step given the situation.

[0151] To correct for slight differences between plants, a size corrected growth value is derived from SIH and SWH. This is the Relative Growth Rate (RGR). Relative Growth Rate (RGR) is calculated for each shoot using the formula [RGR %=(SWH−SIH)/((SWH+SIH)/2)*100]. Relative water content (RWC) is a measurement of how much (%) of the plant was water at harvest. Water Content (RWC) is calculated for each shoot using the formula [RWC %=(SWM−SDM)/(STM−SDM)*100]. Fully watered corn plants of this age run around 98% RWC.

[0152] Progeny transgenic plants are selected from a population of transgenic cotton events under specified growing conditions and are compared with control cotton plants. Control cotton plants are substantially the same cotton genotype but without the recombinant DNA, for example, either a parental cotton plant of the same genotype that was not transformed with the identical recombinant DNA or a negative isoline of the transformed plant. Additionally, a commercial cotton cultivar adapted to the geographical region and cultivation conditions, i.e. cotton variety ST474, cotton variety FM 958, and cotton variety Siokra L-23, are used to compare the relative performance of the transgenic cotton plants containing the recombinant DNA. The specified culture conditions are growing a first set of transgenic and control plants under “wet” conditions, i.e. irrigated in the range of 85 to 100 percent of evapotranspiration to provide leaf water potential of −14 to −18 bars, and growing a second set of transgenic and control plants under “dry” conditions, i.e. irrigated in the range of 40 to 60 percent of evapotranspiration to provide a leaf water potential of −21 to −25 bars. Pest control, such as weed and insect control is applied equally to both wet and dry treatments as needed. Data gathered during the trial includes weather records throughout the growing season including detailed records of rainfall; soil characterization information; any herbicide or insecticide applications; any gross agronomic differences observed such as leaf morphology, branching habit, leaf color, time to flowering, and fruiting pattern; plant height at various points during the trial; stand density; node and fruit number including node above white flower and node above crack boll measurements; and visual wilt scoring. Cotton boll samples are taken and analyzed for lint fraction and fiber quality. The cotton is harvested at the normal harvest timeframe for the trial area. Enhanced water use efficiency is indicated by increased yield, improved relative water content, enhanced leaf water potential, increased biomass, enhanced leaf extension rates, and improved fiber parameters.

### D. Selection for Growth Under Cold Stress

[0153] (1) Cold germination assay—Three sets of seeds are used for the assay. The first set consists of positive transgenic events (F1 hybrid) where the genes of the present invention are expressed in the seed. The second seed set is nontransgenic, wild-type negative control made from the same genotype as the transgenic events. The third set consisted of two cold tolerant and one cold sensitive commercial check lines of corn. All seeds are treated with a fungicide “Captan” (MAESTRO® 80DF Fungicide, Arvesta Corporation, San Francisco, Calif., USA). 0.43 mL Captan is applied per 45 g of corn seeds by mixing it well and drying the fungicide prior to the experiment.

[0154] Corn kernels are placed embryo side down on blotter paper within an individual cell (8.9×8.9 cm) of a germination tray (54×36 cm). Ten seeds from an event are placed into one cell of the germination tray. Each tray can hold 21 transgenic events and 3 replicates of wildtype (LH244SDms+LH59), which is randomized in a complete block design. For every event there are five replications (five trays). The trays are placed at 9.7 C for 24 days (no light) in a Convrion growth chamber (Conviron Model PGV36, Controlled Environments, Winnipeg, Canada). Two hundred and fifty milliliters of deionized water are added to each germination tray. Germination counts are taken 10th, 11th, 12th, 13th, 14th, 17th, 19th, 21st, and 24th day after start date of the experiment. Seeds are considered germinated if the emerged radicle size is 1 cm. From the germination counts germination index is calculated.

[0155] The germination index is calculated as per:

Germination index=(Σ([T+1−nᵢ]*[Pᵢ−Pᵢ₋ᵢ]))/T

[0156] Where T is the total number of days for which the germination assay is performed. The number of days after planting is defined by n. “i” indicated the number of times the germination had been counted, including the current day. P is the percentage of seeds germinated during any given rating. Statistical differences are calculated between transgenic events and wild type control. After statistical analysis, the events that show a statistical significance at the p level of less than 0.1 relative to wild-type controls will advance to a secondary cold selection. The secondary cold screen is conducted in the same manner of the primary selection only increasing the number of repetitions to ten. Statistical analysis of the data from the secondary selection is conducted to identify the events that show a statistical significance at the p level of less than 0.05 relative to wild-type controls.

TABLE 16

| | | | Germination Index | | | |
|---|---|---|---|---|---|---|
| | | | 1st Run | | 2nd Run | |
| PEP SEQ | | | % | P | % | P |
| ID | CONSTRUCT | Event | Change | value | Change | value |
| 266 | PMON92840 | MON810, ZM_M106115 | 28 | 0.079 | 15 | 0.233 |
| | PMON92840 | MON810, ZM_M107208 | 58 | 0.000 | 24 | 0.049 |
| | PMON92840 | MON810, ZM_M107212 | 36 | 0.026 | 34 | 0.006 |
| | PMON92840 | MON810, ZM_M107214 | 53 | 0.001 | 26 | 0.035 |
| | PMON92840 | MON810, ZM_M107221 | 29 | 0.072 | −5 | 0.663 |
| | PMON92840 | MON810, ZM_M107224 | 60 | 0.000 | 35 | 0.004 |
| | PMON92840 | MON810, ZM_M107228 | 39 | 0.017 | 30 | 0.016 |
| 284 | PMON92854 | MON810, ZM_M103991 | 28 | 0.070 | 9 | 0.364 |
| | PMON92854 | MON810, ZM_M104002 | 35 | 0.025 | 8 | 0.412 |
| | PMON92854 | MON810, ZM_M105195 | 27 | 0.082 | 10 | 0.321 |
| | PMON92854 | MON810, ZM_M105213 | 30 | 0.060 | 21 | 0.033 |
| | PMON92854 | MON810, ZM_M105218 | 74 | 0.000 | 49 | 0.000 |
| | PMON92854 | MON810, ZM_M105267 | 43 | 0.006 | 28 | 0.004 |
| | PMON92854 | MON810, ZM_M106123 | −1 | 0.965 | 30 | 0.002 |

[0157] (2) Cold Shock assay—The experimental set-up for the cold shock assay is the same as described in the above cold germination assay except seeds were grown in potted media for the cold shock assay.

[0158] The desired numbers of 2.5″ square plastic pots are placed on flats (n=32, 4×8). Pots were filled with Metro Mix 200 soil-less media containing 19:6:12 fertilizer (6 lbs/cubic yard) (Metro Mix, Pots and Flat are obtained from Hummert International, Earth City, Mo.). After planting seeds, pots are placed in a growth chamber set at 23° C., relative humidity of 65% with 12 hour day and night photoperiod (300 uE/m2-min). Planted seeds are watered for 20 minute every other day by sub-irrigation and flats were rotated every third day in a growth chamber for growing corn seedlings.

[0159] On the 10^{th} day after planting the transgenic positive and wild-type negative (WT) plants are positioned in flats in an alternating pattern. Chlorophyll fluorescence of plants is measured on the 10^{th} day during the dark period of growth by using a PAM-2000 portable fluorometer as per the manufacturer's instructions (Walz, Germany). After chlorophyll measurements, leaf samples from each event are collected for confirming the expression of genes of the present invention. For expression analysis six V1 leaf tips from each selection are randomly harvested. The flats are moved to a growth chamber set at 5° C. All other conditions such as humidity, day/night cycle and light intensity are held constant in the growth chamber. The flats are sub-irrigated every day after transfer to the cold temperature. On the 4^{th} day chlorophyll fluorescence is measured. Plants are transferred to normal growth conditions after six days of cold shock treatment and allowed to recover for the next three days. During this recovery period the length of the V3 leaf is measured on the 1^{st} and 3^{rd} days. After two days of recovery V2 leaf damage is determined visually by estimating percent of green V2 leaf.

[0160] Statistical differences in V3 leaf growth, V2 leaf necrosis and fluorescence during pre-shock and cold shock can be used for estimation of cold shock damage on corn plants.

[0161] (3) Early seedling growth assay—Three sets of seeds are used for the experiment. The first set consists of positive transgenic events (F1 hybrid) where the genes of the present invention are expressed in the seed. The second seed set is nontransgenic, wild-type negative control made from the same genotype as the transgenic events. The third seed set consists of two cold tolerant and two cold sensitive commercial check lines of corn. All seeds are treated with a fungicide “Captan”, (3a,4,7,a-tetrahydro-2-[(trichloromethly)thio]-1H-isoindole-1,3(2H)-dione, Drex Chemical Co. Memphis, Tenn.). Captan (0.43 mL) was applied per 45 g of corn seeds by mixing it well and drying the fungicide prior to the experiment.

[0162] Seeds are grown in germination paper for the early seedling growth assay. Three 12″×18″ pieces of germination paper (Anchor Paper #SD7606) are used for each entry in the test (three repetitions per transgenic event). The papers are wetted in a solution of 0.5% KNO₃ and 0.1% Thyram.

[0163] For each paper fifteen seeds are placed on the line evenly spaced down the length of the paper. The fifteen seeds are positioned on the paper such that the radical would grow downward, for example longer distance to the paper's edge. The wet paper is rolled up starting from one of the short ends. The paper is rolled evenly and tight enough to hold the seeds in place. The roll is secured into place with two large paper clips, one at the top and one at the bottom. The rolls are incubated in a growth chamber at 23° C. for three days in a randomized complete block design within an appropriate container. The chamber is set for 65% humidity with no light cycle. For the cold stress treatment the rolls are then incubated in a growth chamber at 12° C. for twelve days. The chamber is set for 65% humidity with no light cycle.

[0164] After the cold treatment the germination papers are unrolled and the seeds that did not germinate are discarded. The lengths of the radicle and coleoptile for each seed are measured through an automated imaging program that automatically collects and processes the images. The imaging program automatically measures the shoot length, root length, and whole seedling length of every individual seedling and then calculates the average of each roll.

[0165] After statistical analysis, the events that show a statistical significance at the p level of less than 0.1 relative to wild-type controls will advance to a secondary cold selection. The secondary cold selection is conducted in the same manner of the primary selection only increasing the number of repetitions to five. Statistical analysis of the data from the secondary selection is conducted to identify the events that show a statistical significance at the p level of less than 0.05 relative to wild-type controls.

TABLE 17

| PEP | | | | root length | | | shoot length | | | total length | | |
|---|---|---|---|---|---|---|---|---|---|---|---|---|
| SEQ ID | | | | Percent | | P- | Percent | | | Percent | | P- |
| NO | construct | event | run | change | Delta | value | change | Delta | P-value | change | Delta | value |
| 204 | PMON79194 | ZM_M47022 | 1 | 10 | 1.05 | 0.0801 | 5 | 0.38 | 0.4359 | 8 | 1.43 | 0.1411 |
| | PMON79194 | ZM_M47022 | 2 | 31 | 3.31 | 0 | 44 | 3.25 | 0 | 36 | 6.56 | 0 |
| | PMON79194 | ZM_M47136 | 1 | 9 | 0.96 | 0.1078 | 13 | 1.08 | 0.0304 | 11 | 2.05 | 0.0372 |
| | PMON79194 | ZM_M47136 | 2 | 35 | 3.69 | 0 | 36 | 2.65 | 1.00E−04 | 35 | 6.34 | 0 |
| | PMON79194 | ZM_M48721 | 1 | 14 | 1.47 | 0.0153 | 10 | 0.84 | 0.0908 | 13 | 2.31 | 0.0192 |
| | PMON79194 | ZM_M48721 | 2 | 28 | 2.99 | 2.00E−04 | 33 | 2.47 | 3.00E−04 | 30 | 5.46 | 0 |

### (4). Cold Field Efficacy Trial

[0166] This example sets forth a cold field efficacy trial to identify gene constructs that confer enhanced cold vigor at germination and early seedling growth under early spring planting field conditions in conventional-till and simulated no-till environments. Seeds are planted into the ground around two weeks before local farmers are beginning to plant corn so that a significant cold stress is exerted onto the crop, named as cold treatment. Seeds also are planted under local optimal planting conditions such that the crop has little or no exposure to cold condition, named as normal treatment. The cold field efficacy trials are carried out in five locations, including Glyndon Minn., Mason Mich., Monmouth Ill., Dayton Iowa, Mystic Conn. At each location, seeds are planted under both cold and normal conditions with 3 repetitions per treatment, 20 kernels per row and single row per plot. Seeds are planted 1.5 to 2 inch deep into soil to avoid muddy conditions. Two temperature monitors are set up at each location to monitor both air and soil temperature daily.

[0167] Seed emergence is defined as the point when the growing shoot breaks the soil surface. The number of emerged seedling in each plot is counted everyday from the day the earliest plot begins to emerge until no significant changes in emergence occur. In addition, for each planting date, the latest date when emergence is 0 in all plots is also recorded. Seedling vigor is also rated at V3-V4 stage before the average of corn plant height reaches 10 inches, with 1=excellent early growth, 5=Average growth and 9=poor growth. Days to 50% emergence, maximum percent emergence and seedling vigor are calculated using SAS software for the data within each location or across all locations.

E. Screens for Transgenic Plant Seeds with Increased Protein and/or Oil Levels

[0168] This example sets forth a high-throughput selection for identifying plant seeds with improvement in seed composition using the Infratec 1200 series Grain Analyzer, which is a near-infrared transmittance spectrometer used to determine the composition of a bulk seed sample. Near infrared analysis is a non-destructive, high-throughput method that can analyze multiple traits in a single sample scan. An NIR calibration for the analytes of interest is used to predict the values of an unknown sample. The NIR spectrum is obtained for the sample and compared to the calibration using a complex chemometric software package that provides a predicted values as well as information on how well the sample fits in the calibration.

[0169] Infratec Model 1221, 1225, or 1227 with transport module by Foss North America is used with cuvette, item #1000-4033, Foss North America or for small samples with small cell cuvette, Foss standard cuvette modified by Leon Girard Co. Corn and soy check samples of varying composition maintained in check cell cuvettes are supplied by Leon Girard Co. NIT collection software is provided by Maximum Consulting Inc. Software. Calculations are performed automatically by the software. Seed samples are received in packets or containers with barcode labels from the customer. The seed is poured into the cuvettes and analyzed as received.

TABLE 18

| | |
|---|---|
| Typical sample(s): | Whole grain corn and soybean seeds |
| Analytical time to run method: | Less than 0.75 min per sample |
| Total elapsed time per run: | 1.5 minute per sample |
| Typical and minimum sample size: | Corn typical: 50 cc; minimum 30 cc |
| | Soybean typical: 50 cc; |
| | minimum 5 cc |
| Typical analytical range: | Determined in part by the specific |
| | calibration. |
| | Corn - moisture 5-15%, oil 5-20%, |
| | protein 5-30%, starch 50-75%, and |
| | density 1.0-1.3%. |
| | Soybean - moisture 5-15%, |
| | oil 15-25%, and protein 35-50%. |

TABLE 19
Transgenic corn plants have an increased oil level in seeds

| PEP | | | 2004 Data | | 2005 Data | |
|---|---|---|---|---|---|---|
| SEQ | | | Oil | | Oil | |
| ID NO | Event | Construct | Delta | Pvalue | delta | P value |
| 231 | ZM_S90572 | PMON17730 | 0.18 | 0.22 | 0.25 | 0.04 |
| | ZM_S90588 | PMON17730 | N/A | N/A | 0.10 | 0.33 |
| | ZM_S90610 | PMON17730 | N/A | N/A | −0.03 | 0.78 |
| | ZM_S90614 | PMON17730 | 0.26 | 0.08 | 0.47 | 0.00 |
| | ZM_S90622 | PMON17730 | −0.03 | 0.82 | 0.31 | 0.00 |

TABLE 20
Transgenic corn plants have an increased protein level in seeds

| PEP | | | | | | | | | | |
|---|---|---|---|---|---|---|---|---|---|---|
| SEQ | | | 1st Inbred protein trial | | | | 2nd Inbred protein trial | | | |
| ID | | | Mean | Mean | | | Mean | Mean | | |
| NO | Construct | Event | transgenic | control | Delta | Pvalue | transgenic | control | Delta | Pvalue |
| 208 | PMON92607 | ZM_M106133 | 14.06 | 10.39 | 3.67 | 0 | 11.91 | 10.06 | 1.84 | 0.0023 |
| | | ZM_M106129 | 16.46 | 10.39 | 6.07 | 0 | 16.00 | 10.06 | 5.94 | 0 |
| | | ZM_M105269 | 15.80 | 10.39 | 5.41 | 0 | 14.89 | 10.06 | 4.83 | 0 |
| | | ZM_M105268 | 14.07 | 10.39 | 3.67 | 0 | 12.81 | 10.06 | 2.74 | 0 |
| | | ZM_M104742 | 12.57 | 10.39 | 2.18 | 0.0064 | 12.52 | 10.06 | 2.46 | 0 |
| | | ZM_M104740 | 14.45 | 10.39 | 4.06 | 0 | 12.93 | 10.06 | 2.86 | 0 |
| | | ZM_M104403 | 12.90 | 10.39 | 2.51 | 0.0017 | 12.60 | 10.06 | 2.53 | 0 |
| | | ZM_M104399 | 13.21 | 10.39 | 2.82 | 0.0004 | 14.04 | 10.06 | 3.98 | 0 |
| | | ZM_M104398 | 14.91 | 10.39 | 4.51 | 0 | 12.79 | 10.06 | 2.73 | 0 |
| | | ZM_M104396 | 12.13 | 10.39 | 1.74 | 0.0289 | 12.90 | 10.06 | 2.83 | 0 |
| | | ZM_M104385 | 13.12 | 10.39 | 2.72 | 0.0007 | 12.89 | 10.06 | 2.82 | 0 |
| | | ZM_M104371 | 12.23 | 10.39 | 1.83 | 0.0213 | 12.18 | 10.06 | 2.12 | 0.0004 |
| | | ZM_M104369 | 13.41 | 10.39 | 3.01 | 0.0002 | 11.35 | 10.06 | 1.29 | 0.0309 |
| | | ZM_M103621 | 12.26 | 10.39 | 1.86 | 0.0191 | 10.76 | 10.06 | 0.69 | 0.2425 |
| | | ZM_M106138 | 13.74 | 10.39 | 3.35 | 0 | 13.34 | 10.06 | 3.28 | 0 |

TABLE 21
Transgenic soybean plants have an increased seed oil level

| PEP | | | | | | | | | |
|---|---|---|---|---|---|---|---|---|---|
| SEQ | | | | seed oil content | | | seed protein content | | |
| ID | | | | control | transgenic | | control | transgenic | |
| NO | construct | event | run | mean | mean | delta | mean | mean | delta |
| 231 | PMON94697 | construct | 1 | 20.0 | 19.7 | −0.3 | 42.0 | 42.9 | 0.9 |
| | | analysis | 2 | 19.6 | 20.2 | 0.6* | 43.3 | 43.6 | 0.3 |
| | | | 3 | 19.9 | 20.6 | 0.7* | 42.5 | 43.1 | 0.6 |
| | | GM_A79833 | 1 | 20.2 | 19.7 | −0.3 | 42.0 | 42.9 | 0.9 |
| | | | 2 | 19.6 | 19.9 | 0.3 | 43.3 | 43.5 | 0.2 |
| | | GM_A79838 | 2 | 19.6 | 19.8 | 0.2 | 43.3 | 45.2 | 1.9* |
| | | GM_A79839 | 2 | 19.6 | 20.4 | 0.8* | 43.3 | 43.7 | 0.4 |
| | | GM_A79857 | 2 | 19.6 | 19.9 | 0.3 | 43.3 | 43.7 | 0.4 |
| | | GM_A79859 | 2 | 19.6 | 20.6 | 1.0* | 43.3 | 43.7 | −0.6 |
| | | GM_A79894 | 2 | 19.6 | 20.4 | 0.8* | 43.3 | 43.1 | −0.2 |
| | | GM_A79896 | 2 | 19.6 | 19.8 | 0.2 | 43.3 | 44.4 | 1.1* |
| | | GM_A79914 | 2 | 19.6 | 20.9 | 1.3* | 43.3 | 42.7 | −0.6 |
| | | | 3 | 19.9 | 20.6 | 0.7 | 42.5 | 43.4 | 0.9 |
| | | GM_A79934 | 3 | 19.9 | 20.3 | 0.4* | 42.5 | 43.3 | 0.8* |
| | | GM_A79936 | 3 | 19.9 | 21.0 | 1.1* | 42.5 | 42.5 | 0.0 |

Data point with “*” indicate a statistically significant delta (the difference between transgenic and control plants).
Seed protein or oil is measured as a percentage of total seed composition.

1. A plant cell with stably integrated, recombinant DNA comprising a promoter that is functional in plant cells and that is operably linked to DNA from a plant, bacteria or yeast that encodes a protein having at least one domain of amino acids in a sequence that exceeds the Pfam gathering cutoff for amino acid sequence alignment with a protein domain family identified by a Pfam name in the group of Pfam names consisting of FAD_binding_{—}4, MtN3_slv, Homeobox, FAD_binding_{—}6, RWP-RK, PMEI, FAD_binding_{—}7, RRM_{—}1, Transaldolase, RNA_pol_L, WD40, U-box, Cyclin_N, Skp1, Redoxin, DZC, PBP, TPP_enzyme_M, CBFD_NFYB_HMF, TPP_enzyme_N, PFK, Caleosin, Iso_dh, Ribosomal_L18p, Metallophos, zf-A20, Ras, BBE, NAF, PLDc, DUF1242, Pkinase, C2, p450, Pyridoxal_deC, FBD, UPF0005, HEAT_PBS, GST_N, PEP-utilizers, Alpha-amylase, Amino_oxidase, SRF-TF, Phi_{—}1, Malic_M, Tryp_alpha_amyl, GSHPx, Miro, HSF_DNA-bind, DNA_photolyase, Sina, CTP_transf_{—}2, Abhydrolase_{—}3, Chal_sti_synt_C, ACP_syn_III_C, ADH_zinc_N, CSD, Globin, GATase_{—}2, Amidohydro_{—}1, HLH, HALZ, Amidohydro_{—}3, Lactamase_B, HSP20, DAO, DUF296, AT_hook, AWPM-19, Dimerisation, Suc_Fer-like, Methyltransf_{—}2, Aminotran_{—}3, PHD, MMR_HSR1, Aldo_ket_red, zf-AN1, malic, Fasciclin, UPF0057, DUF221, Pkinase_Tyr, DnaJ, Cofilin_ADF, Orn_Arg_deC_N, Skp1_POZ, Asn_synthase, K-box, LRR_{—}2, Ribosomal_L12, Ammonium_transp, Ribosomal_L14, KOW, DUF1336, DS, Aa_trans, CcmH, peroxidase, eIF-5a, Aldedh, PEP-utilizers_C, ADH_N, UIM, NAD_binding_{—}1, zf-C3HC4, Spermine_synth, AUX_IAA, LIM, Anti-silence, X8, Citrate_synt, 14-3-3, RMMBL, efhand, NPH3, CAF1, ICL, FAE1_CUT1_RppA, Orn_DAP_Arg_deC, PPDK_N, Myb_DNA-binding, AP2, F-box, and APS_kinase wherein the Pfam gathering cuttoff for said protein domain families is stated in Table 11; wherein said plant cell is selected from a population of plant cells with said recombinant DNA by screening plants that are regenerated from plant cells in said population and that express said protein for an enhanced trait as compared to control plants that do not have said recombinant DNA; and wherein said enhanced trait is selected from group of enhanced traits consisting of enhanced water use efficiency, enhanced cold tolerance, increased yield, enhanced nitrogen use efficiency, enhanced seed protein and enhanced seed oil.

2. A plant cell of claim 1 wherein said protein has an amino acid sequence with at least 90% identity to a consensus amino acid sequence in the group of consensus amino acid sequences consisting of the consensus amino acid sequence constructed for SEQ ID NO: 194 and homologs thereof listed in Table 7 through the consensus amino acid sequence constructed for SEQ ID NO:386 and homologs thereof listed in Table 7.

3. A plant cell of claim 1 wherein said protein is selected from the group of proteins identified in Table 1.

4. A plant cell of claim 1 further comprising DNA expressing a protein that provides tolerance from exposure to an herbicide applied at levels that are lethal to a wild type of said plant cell.

5. A plant cell of claim 4 wherein the agent of said herbicide is a glyphosate, dicamba, or glufosinate compound.

6. A transgenic plant comprising a plurality of the plant cell of claim 1

7. A transgenic plant of claim 6 which is homozygous for said recombinant DNA.

8. A transgenic seed comprising a plurality of the plant cell of claim 1.

9. A transgenic seed of claim 8 from a corn, soybean, cotton, canola, alfalfa, wheat or rice plant.

10. Non-natural, transgenic corn seed of claim 9 wherein said seed can produce corn plants that are resistant to disease from the Mal de Rio Cuarto virus or the Puccina sorghi fungus or both.

11. A transgenic pollen grain comprising a haploid derivative of a plant cell of claim 1.

12. A method for manufacturing non-natural, transgenic seed that can be used to produce a crop of transgenic plants with an enhanced trait resulting from expression of stably-integrated, recombinant DNA comprising a promoter that is (a) functional in plant cells and (b) is operably linked to DNA from a plant, bacteria or yeast that encodes a protein having at least one domain of amino acids in a sequence that exceeds the Pfam gathering cutoff for amino acid sequence alignment with a protein domain family identified by a Pfam name in the group of Pfam names consisting of FAD_binding_{—}4, MtN3_slv, Homeobox, FAD_binding_{—}6, RWP-RK, PMEI, FAD_binding_{—}7, RRM_{—}1, Transaldolase, RNA_pol_L, WD40, U-box, Cyclin_N, Skp1, Redoxin, DZC, PBP, TPP_enzyme_M, CBFD_NFYB_HMF, TPP_enzyme_N, PFK, Caleosin, Iso_dh, Ribosomal_L18p, Metallophos, zf-A20, Ras, BBE, NAF, PLDc, DUF1242, Pkinase, C2, p450, Pyridoxal_deC, FBD, UPF0005, HEAT_PBS, GST_N, PEP-utilizers, Alpha-amylase, Amino_oxidase, SRF-TF, Phi_{—}1, Malic_M, Tryp_alpha_amyl, GSHPx, Miro, HSF_DNA-bind, DNA_photolyase, Sina, CTP_transf_{—}2, Abhydrolase_{—}3, Chal_sti_synt_C, ACP_syn_III_C, ADH_zinc_N, CSD, Globin, GATase_{—}2, Amidohydro_{—}1, HLH, HALZ, Amidohydro_{—}3, Lactamase_B, HSP20, DAO, DUF296, AT_hook, AWPM-19, Dimerisation, Suc_Fer-like, Methyltransf_{—}2, Aminotran_{—}3, PHD, MMR_HSR1, Aldo_ket_red, zf-AN1, malic, Fasciclin, UPF0057, DUF221, Pkinase_Tyr, DnaJ, Cofilin_ADF, Orn_Arg_deC_N, Skp1_POZ, Asn_synthase, K-box, LRR_{—}2, Ribosomal_L12, Ammonium_transp, Ribosomal_L14, KOW, DUF1336, DS, Aa_trans, CcmH, peroxidase, eIF-5a, Aldedh, PEP-utilizers_C, ADH_N, UIM, NAD_binding_{—}1, zf-C3HC4, Spermine_synth, AUX_IAA, LIM, Anti-silence, X8, Citrate_synt, 14-3-3, RMMBL, efhand, NPH3, CAF1, ICL, FAE1_CUT1_RppA, Orn_DAP_Arg_deC, PPDK_N, Myb_DNA-binding, AP2, F-box, and APS_kinase; wherein the gathering cutoff for said protein domain families is stated in Table 11; and wherein said enhanced trait is selected from the group of enhanced traits consisting of enhanced water use efficiency, enhanced cold tolerance, increased yield, enhanced nitrogen use efficiency, enhanced seed protein and enhanced seed oil, said method for manufacturing said seed comprising:
(a) screening a population of plants for said enhanced trait and said recombinant DNA, wherein individual plants in said population can exhibit said trait at a level less than, essentially the same as or greater than the level that said trait is exhibited in control plants which do not express the recombinant DNA,
(b) selecting from said population one or more plants that exhibit the trait at a level greater than the level that said trait is exhibited in control plants,
(c) verifying that said recombinant DNA is stably integrated in said selected plants,
(d) analyzing tissue of a selected plant to determine the production of a protein having the function of a protein encoded by nucleotides in a sequence of one of SEQ ID NO:1-193; and
(e) collecting seed from a selected plant.

13. A method of claim 12 wherein plants in said population further comprise DNA expressing a protein that provides tolerance to exposure to an herbicide applied at levels that are lethal to wild type plant cells, and wherein said selecting is effected by treating said population with said herbicide.

14. A method of claim 13 wherein said herbicide comprises a glyphosate, dicamba or glufosinate compound.

15. A method of claim 12 wherein said selecting is effected by identifying plants with said enhanced trait.

16. A method of claim 12 wherein said seed is corn, soybean, cotton, alfalfa, wheat or rice seed.

17. A method of producing hybrid corn seed comprising:
acquiring hybrid corn seed from a herbicide tolerant corn plant which also has stably-integrated, recombinant DNA comprising a promoter that is (a) functional in plant cells and (b) is operably linked to DNA that encodes a protein having at least one domain of amino acids in a sequence that exceeds the Pfam gathering cutoff for amino acid sequence alignment with a protein domain family identified by a Pfam name in the group of Pfam names consisting of FAD_binding_{—}4, MtN3_slv, Homeobox, FAD_binding_{—}6, RWP-RK, PMEI, FAD_binding_{—}7, RRM_{—}1, Transaldolase, RNA_pol_L, WD40, U-box, Cyclin_N, Skp1, Redoxin, DZC, PBP, TPP_enzyme_M, CBFD_NFYB_HMF, TPP_enzyme_N, PFK, Caleosin, Iso_dh, Ribosomal_L18p, Metallophos, zf-A20, Ras, BBE, NAF, PLDc, DUF1242, Pkinase, C2, p450, Pyridoxal_deC, FBD, UPF0005, HEAT_PBS, GST_N, PEP-utilizers, Alpha-amylase, Amino_oxidase, SRF-TF, Phi_{—}1, Malic_M, Tryp_alpha_amyl, GSHPx, Miro, HSF_DNA-bind, DNA_photolyase, Sina, CTP_transf_{—}2, Abhydrolase_{—}3, Chal_sti_synt_C, ACP_syn_III_C, ADH_zinc_N, CSD, Globin, GATase_{—}2, Amidohydro_{—}1, HLH, HALZ, Amidohydro_{—}3, Lactamase_B, HSP20, DAO, DUF296, AT_hook, AWPM-19, Dimerisation, Suc_Fer-like, Methyltransf_{—}2, Aminotran_{—}3, PHD, MMR—HSR1, Aldo_ket_red, zf-AN1, malic, Fasciclin, UPF0057, DUF221, Pkinase_Tyr, DnaJ, Cofilin_ADF, Orn_Arg_deC_N, Skp1_POZ, Asn_synthase, K-box, LRR_{—}2, Ribosomal_L12, Ammonium_transp, Ribosomal_L14, KOW, DUF1336, DS, Aa_trans, CcmH, peroxidase, eIF-5a, Aldedh, PEP-utilizers_C, ADH_N, UIM, NAD_binding_{—}1, zf-C3HC4, Spermine_synth, AUX_IAA, LIM, Anti-silence, X8, Citrate_synt, 14-3-3, RMMBL, efhand, NPH3, CAF1, ICL, FAE1_CUT1_RppA, Orn_DAP_Arg_deC, PPDK_N, Myb_DNA-binding, AP2, F-box, and APS_kinase;
(a) wherein the gathering cuttoff for said protein domain families is stated in Table 11;
(b) producing corn plants from said hybrid corn seed, wherein a fraction of the plants produced from said hybrid corn seed is homozygous for said recombinant DNA, a fraction of the plants produced from said hybrid corn seed is hemizygous for said recombinant DNA, and a fraction of the plants produced from said hybrid corn seed has none of said recombinant DNA;
(c) selecting corn plants which are homozygous and hemizygous for said recombinant DNA by treating with an herbicide;
(d) collecting seed from herbicide-treated-surviving corn plants and planting said seed to produce further progeny corn plants;
(e) repeating steps (c) and (d) at least once to produce an inbred corn line;
(f) crossing said inbred corn line with a second corn line to produce hybrid seed.

18. A method of selecting a plant comprising cells of claim 1 wherein an immunoreactive antibody is used to detect the presence of said protein in seed or plant tissue.

19. Anti-counterfeit milled seed having, as an indication of origin, a plant cell of claim 1.

20. A method of growing a corn, cotton or soybean crop without irrigation water comprising planting seed having plant cells of claim 1 which are selected for enhanced water use efficiency.

21. A method of claim 20 comprising providing up to 300 millimeters of ground water during the production of said crop.

22. A plant cell with stably integrated, recombinant DNA comprising a promoter that is functional in plant cells and that is operably linked to DNA from a plant, bacteria or yeast that encodes a protein having at least one domain of amino acids in a sequence that exceeds the Pfam gathering cutoff for amino acid sequence alignment with a protein domain family identified by a MtN3_slv Pfam; wherein the Pfam gathering cuttoff for said protein domain −0.8; wherein said plant cell is selected from a population of plant cells with said recombinant DNA by screening plants that are regenerated from plant cells in said population and that express said protein for an enhanced trait as compared to control plants that do not have said recombinant DNA; and wherein said enhanced trait is enhanced seed oil.

23. A plant cell of claim 22 wherein said protein has an amino acid sequence with at least 90% identity to a consensus amino acid sequence in the group of consensus amino acid sequences consisting of the consensus amino acid sequence constructed for SEQ ID NO: 212 and homologs thereof listed in Table 7.

24. A transgenic plant comprising a plurality of the plant cell of claim 22.

25. The transgenic plant of claim 24 which is homozygous for said recombinant DNA.

26. A transgenic seed comprising a plurality of the plant cell of claim 22.

27. The transgenic seed of claim 26 from a corn, soybean, cotton or canola plant.

28. A transgenic pollen grain comprising a haploid derivative of a plant cell of claim 22.

29. A method for manufacturing non-natural, transgenic seed that can be used to produce a crop of transgenic plants with an enhanced trait resulting from expression of stably-integrated, recombinant DNA comprising a promoter that is (a) functional in plant cells and (b) is operably linked to DNA from a plant, bacteria or yeast that encodes a protein having at least one domain of amino acids in a sequence that exceeds the Pfam gathering cutoff for amino acid sequence alignment with a protein domain family identified by MtN3_slv Pfam; wherein the gathering cutoff for said protein domain is −0.8; and wherein said enhanced trait is enhanced seed oil, said method for manufacturing said seed comprising:
(a) screening a population of plants for said enhanced trait and said recombinant DNA, wherein individual plants in said population can exhibit said trait at a level less than, essentially the same as or greater than the level that said trait is exhibited in control plants which do not express the recombinant DNA,
(b) selecting from said population one or more plants that exhibit the trait at a level greater than the level that said trait is exhibited in control plants,
(c) verifying that said recombinant DNA is stably integrated in said selected plants,
(d) analyzing tissue of a selected plant to determine the production of a protein having the function of a protein encoded by nucleotides in a sequence of one of SEQ ID NO:1; and
(e) collecting seed from a selected plant.

30. The method of claim 29 wherein said selecting is effected by identifying plants with said enhanced trait.

31. The method of claim 29 wherein said seed is corn, soybean, cotton or canola.

32. A method of producing hybrid corn seed comprising:
acquiring hybrid corn seed from a herbicide tolerant corn plant which also has stably-integrated, recombinant DNA comprising a promoter that is (a) functional in plant cells and (b) is operably linked to DNA that encodes a protein having at least one domain of amino acids in a sequence that exceeds the Pfam gathering cutoff for amino acid sequence alignment with a protein domain family identified by MtN3_slv Pfam;
(a) wherein the gathering cuttoff for said protein domain is −0.8;
(b) producing corn plants from said hybrid corn seed, wherein a fraction of the plants produced from said hybrid corn seed is homozygous for said recombinant DNA, a fraction of the plants produced from said hybrid corn seed is hemizygous for said recombinant DNA, and a fraction of the plants produced from said hybrid corn seed has none of said recombinant DNA;
(c) selecting corn plants which are homozygous and hemizygous for said recombinant DNA by treating with an herbicide;
(d) collecting seed from herbicide-treated-surviving corn plants and planting said seed to produce further progeny corn plants;
(e) repeating steps (c) and (d) at least once to produce an inbred corn line;
(f) crossing said inbred corn line with a second corn line to produce hybrid seed.

33. A method of selecting a plant comprising cells of claim 22 wherein an immunoreactive antibody is used to detect the presence of said protein in seed or plant tissue.

34. Anti-counterfeit milled seed having, as an indication of origin, a plant cell of claim 22.

The application's sequence listing, which the Patent Office published only in electronic form, follows.

SEQUENCE LISTING (12607 sequences)

SEQ ID NO: 1 - DNA, 2908 bp, Artificial Sequence
  Chimeric DNA of Arabidopsis thaliana and Zea mays
atgatcgtgcaacccatcgagctacgcgcgtggactgccttccctgggtcggcgcaggaggggatcggaaggatggcggcgtcggtttccagggccatctgcgttcagaagccgggctcaaaatgcaccagggacagggaagcgacctccttcgcccgccgatcggtcgcagcgccgaggcccccgcacgccaaagccgccggcgtcatccgctccgactccggcgcgggacggggccagcattgctcgccgctgagggccgtcgttgacgccgcgccgatacagacgaccaaaaagagggtgttccacttcggcaagggcaagagcgagggcaacaagaccatgaaggaactgctgggcggcaagggcgcgaacctggcggagatggcgagcatcgggctgtcggtgccgccggggttcacggtgtcgacggaggcgtgccagcagtaccaggacgccgggtgcgccctccccgcggggctctgggccgagatcgtcgacggcctgcagtgggtggaggagtacatgggcgccaccctgggcgatccgcagcgcccgctcctgctctccgtccgctccggcgccgccgtgtccatgcccggcatgatggacacggtgctcaacctggggctcaacgacgaagtggccgccgggctggcggccaagagcggggagcgcttcgcctacgactccttccgccgcttcctcgacatgttcggcaacgtcgtcatggacatcccccgctcactgttcgaagagaagcttgagcacatgaaggaatccaaggggctgaagaacgacaccgacctcacggcctctgacctcaaagagctcgtgggtcagtacaaggaggtctacctctcagccaagggagagccattcccctcagaccccaagaagcagctggagctagcagtgctggctgtgttcaactcgtgggagagccccagggccaagaagtacaggagcatcaaccagatcactggcctcaggggcaccgccgtgaacgtgcagtgcatggtgttcggcaacatggggaacacttctggcaccggcgtgctcttcactaggaaccccaacaccggagagaagaagctgtatggcgagttcctggtgaacgctcagggtgaggatgtggttgccggaataagaaccccagaggaccttgacgccatgaagaacctcatgccacaggcctacgacgagcttgttgagaactgcaacatcctggagagccactataaggaaatgcaggatatcgagttcactgtccaggaaaacaggctgtggatgttgcagtgcaggacagggaaacgtacgggcaaaagtgccgtgaagatcgccgtggacatggttaacgagggccttgttgagccccgctcagcgatcaagatggtagagccaggccacctggaccagcttctccatcctcagtttgagaacccgtcggcgtacaaggatcaagtcattgccactggtctgccagcctcacctggggctgctgtgggccaggttgtgttcactgctgaggatgctgaagcatggcattcccaagggaaagctgctattctggtaagggcggagaccagccctgaggacgttggtggcatgcacgctgctgtggggattcttacagagaggggtggcatgacttcccacgctgctgtggtcgcacgtgggtgggggaaatgctgcgtctcgggatgctcaggcattcgcgtaaacgatgcggagaagctcgtgacgatcggaggccatgtgctgcgcgaaggtgagtggctgtcgctgaatgggtcgactggtgaggtgatccttggaaagcagccgctttccccaccagcccttagtggcgatctgggaactttcatggcctgggtggatgatgttagaaagctcaaggtcctggctaacgccgatacccctgatgatgcattgactgcgcgaaacaatggggcacaaggaattggattatgccggacagagcacatgttctttgcttcagacgagaggattaaggctgtcaggcagatgattatggctcccacgcttgagctgaggcagcaggcgctcgaccgtctcttgccgtatcagaggtctgacttcgaaggcattttccgtgctatggatggactcccggtgaccatccgactcctggaccctcccctccacgagttccttccagaagggaacatcgaggacattgtaagtgaattatgtgctgagacgggagccaaccaggaggatgccctcgcgcgaattgaaaagctttcagaagtaaacccgatgcttggcttccgtgggtgcaggcttggtatatcgtaccctgaattgacagagatgcaagcccgggccatttttgaagctgctatagcaatgaccaaccagggtgttcaagtgttcccagagataatggttcctcttgttggaacaccacaggaactggggcatcaagtgactcttatccgccaagttgctgagaaagtgttcgccaatgtgggcaagactatcgggtacaaagttggaacaatgattgagatccccagggccgcgctcattgcagatgagattgcgaaagaggcggagtttttctcgttcgggacaaacgacttgacgcagatgacgtttggatacagtagagacgatgtcggcaagtttctaccgatttacctcgccaaaggaatcttacagcacgacccttttgaggttcttgatcagcaaggtgtagggcaattgatcaagatggcgacagaaaaaggacgagcagctaggcctagcctcaaggttgggatatgtggagaacatggaggagatccatcttctgtgggattctttgctgaagcaggacttgactatgtctcttgttctcctttcagggttccaattgcaaggcttgcagctgctcaagtag

SEQ ID NO: 2 - DNA, 2908 bp, Artificial Sequence; identical to SEQ ID NO: 1
  Chimeric DNA of Arabidopsis thaliana and Zea mays

SEQ ID NO: 3 - DNA, 777 bp, Zea mays
tacgtcctggacagggagctcggccgcggggagttcggggtcacgtacctgtgtatggatcgggacaccaaggagctgctcgcctgcaagtccatctccaagcgcaagctgcggacggccgtcgacgtggaggacgtgcgccgggaggtggccatcatgcgccacctgcccaagagccccagcgtcgtgtccctgcgggaggcgtgcgaggacgacggcgccgtccacctcgtcatggagctctgcgagggcggcgagctcttcgaccgcatcgtcgcgcggggccactacaccgagcgcgccgccgccagtgtcacccgcaccatcctcgaggtcgtccagctctgccaccgccacggcgtcatccaccgcgacctcaagccggagaacttcctcttcgccaataagaaggagaactcgccgctcaaggccatcgacttcggtctctccatcttcttcaagcctggtgaaaagttttcagaaattgtgggaagcccctattacatggctcctgaagtattgaagagaaactatgggccagaaatagacatatggagtgcgggagttatcctgtatattttattatgtggagtccctccattttgggctgagactgaacaaggggtggcgcaggctattcttcgtggaaatatcgattttaagcgggaaccctggcctaatgtttcggaaaatgcaaaagatttagttcgacacatgttggagcctgatccaaagctcaggctaactgcaaagcaggttcttgaacatcattggctt

SEQ ID NO: 4 - DNA, 777 bp, Zea mays
tacgagctgggcggcgagctgggccgcggcgagttcggcgtcacgtacctgtgcacggagtccgccacgggggcgcgctacgcgtgcaagtccatctccaagcgcaagctgcgcacgcccgtggacgtggaggacgtgcgccgggaggtggacatcatgcgccacatgccgccgcaccccaacatcgtcagcctccgcgccgcctacgaggacgaggacgccgtgcacctcgtcatggagctctgcgagggaggcgagctcttcgacaggatcgtcgcccggggccactacaccgagcgcgccgccgccgccgtcacgcgcaccatcgtcgaggtcgtccagatgtgccacaggcatggcgtcatgcaccgggatcttaaaccagagaactttttatatgcaaacaagaaggagagttcccctctgaaagcaatcgattttgggctgtcagtgttcttcaggcctggtgagcgatttactgaaatcgtaggcagtccatactacatggctccagaggttctaaagcgaaactatggccctgaagttgatgtttggagtgctggagtgatactttacatacttctctgtggtgtaccaccattttgggcagaaactgaacagggagtagcacaggcaattatacgatctgtggtagatttcaaaagagaaccatggcccagagtatctgagcctgctaaagatcttgtcaggcggatgctggacccaaatccattgacacggtttactgcagcacaagtacttgagcatccatggtta

SEQ ID NO: 5 - DNA, 777 bp, Glycine max
tatacaataggtaaagagctagggagaggccaatttggtgtcacacatttgtgcacaaacaaagccacggggcaacaatttgcatgcaaaacaattgcaaagaggaagcttgtgaacaaggaggacatagaggacgtgagaagagaggttcaaatcatgcaccatctctcgggtcaacctaacattgtggaacttaagggtgcatatgaggacaaacaatcggtgcatttggtcatggaactttgtgcgggtggtgagctttttgatcgtataattgctaagggacattacactgaacgtgccgcggcttcgttgttaagaaccataatgcaaattattcacactttccactccatgggtgtcattcatagagatcttaagcccgaaaatttcctcatgttgaataaggatgaaaattcacccgtcaaggctacggattttggtctatcagtttttttcaaagaaggagagacgttcaaagacattgttggaagtgcatattacattgctcctgaagtcttgaagaggaaatatgggccagaagttgacatatggagtgttggtgtcatgctatacattcttctaagtggtgtccctccgttttgggcagaatccgaacatggtatattcaatgccatcctaagaggccacgttgattttacaagcgatccatggccttcattgtccagtgcagcaaaggatcttgtaaggaaaatgttgaccacagaccccaaacaaagactgacagcacaagaagttttaaatcatccttggatc

SEQ ID NO: 6 - DNA, 778 bp, Glycine max
ttcactcttgggagaaaacttggacagggtcagttcgggacaacgttcttgtgcgtggaaaaggcaacagggctggagtgcgcctgcaaatctattgcaaagaggaagctcgtcaccgatgatgatgtcgaggatgtgagaagagaaattcagataatgcaccacttggccgggcatcctaatgttatatccatcaaaggtgcatatgaggatgccgtggctgttcatgttgtgatggaattatgtgcaggtggagagcttttcgataggattattcagcgtggccattataccgagagacaggcagccaagcttactaagactatagttggcgttgtggaagcttgccattctcttggtgtgatgcacagagaccttaaacctgagaattttctctttgtcaatcagcacgaggattcccttctcaaaaccattgactttggattatctgtcttctttaagccaggtgatatatttaatgatgtggtgggcagcccatactatgttgccccggatgttttgcgaaagcgttatggtcctgaggcagatgtttggagtgctggtgttatcctttacattcttttgagtggagtacctccattttgggctgaaaacgaacaaggaatatttgaacaagttctgcgtggtgatcttgacttttcttctgatccctggccttcaatttctgaaagtgcaaaagatttagtaagaaaaatgcttgttcgcgaccctagaaggcggttgactgcacatcaagtattatgtcatccttggattc

SEQ ID NO: 7 - DNA, 1383 bp, Oryza sativa
atggagaagaaggcgtccatcctcatgaaccggtatgagctcggccgcatgctcgggcaaggcaccttcgccaaggtgtaccatgcacggaaccttgcatccaaccagagcgtcgccatcaaggtcattgacaaggaaaaggtattgcgtgtcggcatgattgaccagatcaagcgagagatctccatcatgcgcctcgttcgccaccccaacatcgtccagctgcacgaggtcatggccagcaagagcaagatatactttgcaatggagtatgtccggggtggtgagctcttcagcagggtagccagggggcgactcaaggaggatgctgcgaggaagtacttccagcagttgataggggctgtggacttctgtcacagccgcggtgtctaccaccgagacctcaagccagagaacctcctcgtcgacgagaatggcaacctcaaagtgtcggactttgggctgagcgccttcaaggagtgtcagaagcaggacgggctgctccacacgacgtgtggcacacctgcatatgttgcaccagagataatcaataagaggggctatgatggagcaaaagcagacatatggtcttgcggtgtcatactctttgttctgcttgctggctacctcccattccatgactcaaatctaatggagatgtaccggaagataagcaaaggtgatgtcaagttcccacagtggttcactactgatgtccgaaggcttctgtccaggctgcttgatccaaatccaaacattaggatcaccgttgagaagctagttgagcatccatggttcaagaaggggtacaaaccagcagtgatgctatcacagccaaatgaatcaaacaacctcaaggatgtccatactgctttcagtgctgatcacaaggacaatgaaggcaaggcaaaagaaccagcaagctctttgaagccagtgagcttgaatgcatttgacatcatctccctctccaaaggatttgatctgtcaggcctgtttgagaacgacaaagagcagaaggcagactcacggttcatgacacaaaaaccagcatcagcaatagtgtcaaagctagagcagattgctgagacagagagcttcaaggtgaagaagcaggatggactggtgaagctccagggatccaaagaagggaggaaagggcagctcgcgatcgatgcagagatctttgaagtgacaccatccttctttgttgttgaggtgaagaagtctgcaggggacacgttggagtacgaaaaattctgcaacaagggcctaagaccttctctcagggacatctgctgggatggtcagtcagagcatccatcactggcacagtcatcaactctgactcagtcctctaagtcaatctcgagacatgccatt

SEQ ID NO: 8 - DNA, 816 bp, Oryza sativa
atgcttctcggtcgatcctttgaagtacacctccttgatcttgttgtagcacccgagggtcaacagcgagtcagagccggcctggtggcaggtccccacacgcttgacatcaagaagctcaccgagcctgctcaggccgccgtggaggttgctgcagaacctcatgaggtgcttgatgtcgtagagcaccgggaagtagattctgatgaggtcaaagaaggcgggcatgttgtccggcaggttccggccggtgagcagcctgagcaggtaaccgaagtcgtacccgctgtggaaggtgatccactgcacgtcggcgttgagcacgacgcccgacgacatgagcagctcggcgaagcggatcgggtcggccccctcagcggcgaaccgatcgaagtcgatgccgcaggtgcggagcatctggatggagtcggcgttggacgggtcggtccgggggtcgaacccgcggaagttgaactgccagatgcagcgcctgccccccgtcccccgccgcgggaggtcgccgccctcgtcggagagggtgaggccgagctggatgagcttgagcatgttgacgttggcctcgaggttggcgtagttgaactcgtcggtggtgcggaagttgccgacggggcggcacacgatgcccgggaactccgtgtccatggcgacgtacgggtaccggtcgacctcgtcgcggatcgccgcgatctccgcctccaggttccccgcccatacctcccggatctccacgccctcgtcggggctctctacgcaggctgcggcggcggcggccatcggcgcatccagccgacctag

SEQ ID NO: 9 - DNA, 1785 bp, Zea mays
cggcatcatgtgtggcatcttagccgtgctcggttgctccgactggtctcaggcaaagagggctcgcatcctcgcctgctccagaaggttgaagcacaggggccccgactggtcgggcctttaccagcacgagggcaacttcctggcgcagcagcggctcgccgtcgtctccccgctgtccggcgaccagccgctgttcaacgaggaccgcaccgtcgtggtggtggccaatggagagatctacaaccacaagaacgtccggaagcagttcaccggcacacacaacttcagcacgggcagtgactgcgaggtcatcatgcccctgtacgagaagtacggcgagaacttcgtggacatgctggacggggtgttcgcgttcgtgctctacgacacccgcgacaggacctacgtggcggcgcgcgacgccatcggcgtcaacccgctctacatcggctggggcagtgacggttccgtctggatcgcgtccgagatgaaggcgctgaacgaggactgcgtgcgcttcgagatcttcccgccgggccacctctactccagcgccggcggcgggttccggcggtggtacaccccgcactggttccaggagcaggtgccccggacgccgtaccagccgctcgtcctcagagaggccttcgagaaggcggtcatcaagaggctcatgactgacgtcccgttcggggtcctcctctccggcggcctcgactcctcgctagtcgcctccgtcaccaagcgccacctcgtcgagaccgaggccgccgagaagttcggcaccgagctccactcctttgtcgtcggcctcgagggctcccctgacctgaaggccgcacgagaggtcgctgactacctcggaaccatccatcacgagttccacttcaccgtacaggacggcatcgacgcgatcgaggaggtgatctaccacgacgagacgtacgacgtgacgacgatccgggccagcacgcccatgttcctgatggctcgcaagatcaagtcgctgggcgtgaagatggtgctgtccggggagggctccgacgagctcctgggcggctacctctacttccacttcgcccccaacaaggaggagttccacagggagacctgccgcaaggtgaaagccctgcaccagtacgactgcctgcgcgccaacaaggccacgtcggcgtggggcctggaggtccgcgtgccgttcctcgacaaggagttcatcaacgtcgccatgggcatggaccccgaatggaaaatgtacgacaagaacctgggccgcatcgagaagtgggtcatgaggaaggcgttcgacgacgacgagcacccttacctgcccaagcatattctctaccggcagaaagaacagttcagtgacggcgttggctacaactggatcgatggccttaaatccttcactgaacagcaggtgacggatgagatgatgaacaacgccgcccagatgttcccctacaacacgcccgtcaacaaggaggcctactactaccggatgatattcgagaggctcttccctcaggactcggcgagggagacggtgccgtggggcccgagcatcgcctgcagcacgcccgcggccatcgagtgggtggagcagtggaaggcctccaacgacccctccggccgcttcatctcctcccacgactccgccgccaccgaccacaccggcggtaagccggcggtggccaacggcggcggccacggcgcggcgaacggcacggtcaacggcaaggacgtcgcagtcgcgatcgcggtctgacgagagtacgt

SEQ ID NO: 10 - DNA, 1599 bp, Oryza sativa
atggcggcgatttacctgctgatcgccgcgctgatcgcctcctcccatgcactcgccgcgcatggcgccggcggcggcgttccgttggcggcggcggcgcctctcccgttccccggcgacctcgccgcgtccggcaagctccggaccgacccgaacgccaccgtgccggcgtcgatggacttcggcaacatcacggcggcgctgccggcggccgtgctgttcccgggctcccccggcgacgtggcggagctcctgcgcgccgcctacgccgccccggggcggccgttcaccgtctcgttccgcggccgcggccactccaccatgggccaggccctcgccgccggcggcgtcgtcgtccacatgcagtccatgggcggcggcggcgcgccgcggatcaacgtgtcggcggacggcgcgtacgtggacgccggcggcgagcagctgtgggtcgacgtgctccgcgccgcgctggcgcgcggcgtggcgccgcggtcgtggacggactacctccacctcaccgtcggcggcaccctctccaacgccggcgtcagcgggcagacttaccggcacgggccacagatctccaacgtgctcgagctcgacgtcatcaccgggcatggcgagacggtgacgtgctccaaggcggtcaactcggacctgttcgacgccgtcctgggcgggctgggccagttcggcgtgatcacgcgcgcgcgcgtcgccgtcgagccggcgccggcgcgggcgcggtgggtgcgcctcgtgtacgccgacttcgccgccttctccgccgaccaggagcgcctcgtcgcggcgcggcccgacgggtcgcacgggccatggagctacgtggagggcgcggtgtaccttgccggccgcggcctcgccgtggcgctcaagagctccggcgggttcttctccgacgccgacgccgcgcgcgtcgtcgcgctcgccgcggcgaggaacgccaccgccgtgtacagcatcgaggcgacgctcaactacgccgcgaacgcgacgccgtcgtccgtggacgcggcggtggcggcggcgctcggcgatctccacttcgaggaggggttctccttctcccgcgacgtcacctacgaggagttcctcgaccgggtgtacggcgaggaggaggccctcgagaaggccgggctatggcgcgtcccgcacccgtggctcaacctgttcgtcccgggctcccgcatcgccgacttcgaccgcggcgtcttcaagggcatcctccagacggccaccgacatcgccggacctctcatcatctaccccgtcaacaaatccaagtgggatgcggcgatgtcggcggtgacgccggagggggaggaggaggtgttctacgtggtgtcgctgctgttctcggcggtggcgaacgacgtggcggcgctggaggcgcagaacaggaggatactgaggttctgcgacctcgccgggatcgggtacaaggcgtacctggcgcactacgacagccgcggcgactgggtgaggcattttggcgccaaatgggatcgcttcgtgcagaggaaggacaagtacgaccccaagaagctgctctcccctggccaggacatcttcaactag

SEQ ID NO: 11 - DNA, 221 bp, Glycine max
atggctgactcggatcgctcttctagtgaaatttctacacattctactgattcagggaagcgagggtcttccaaagttgaattttctgaagatgaggaaactcttatcatcaggatgtataaactggtaggggagaggtggtctttaattgctggaaggattcctggaagaacagcagaggaaatagagaagtattggacttcaagattctcaggttctag

SEQ ID NO: 12 - DNA, 1539 bp, Zea mays
atggcgacgtgcgcgacggacctggcgccgctgctgggcccggcggcggcgaacgccacaggctacctctgcagccagttcgcggacacggcctccgcggtggacgccacgtacctgctcttctcggcctacctcgtcttcgccatgcagctgggcttcgccatgctgtgcgccggctccgtccgcgccaagaacaccatgaacatcatgctgaccaacgtgctggacgccgccgccggggcgctcttctactacctcttcggcttcgccttcgccttcggcacgccgtccaacggcttcatcggcaggcacttcttcgggctccagcgcctgcccaggaccggcttcgactacgacttcttcctctaccagtgggccttcgccatcgccgccgccggcatcacgtcgggctccatcgccgagaggacccagttcgtcgcctacctcatctactccgcgttcctgacggggttcgtgtaccccgtggcgtcccactggttctggtccgccgacgggtgggccgccgccggccgcacgtccggcccgctgctcttcgggtccggcgccatcgacttcgccggctccggcgtggtccacatggtcggcggcatcgcggggttctggggcgcgctcgtcgagggcccccgtatcgggcgcttcgaccacgccggccgctccgtagcgctcaggggccacagcgcgtcgctcgtggtgctcggcaccttcctgctgtggttcggctggtacgggttcaaccccgggtcgttcaccaccatcctcaagtcgtacggccccgccgggaccgtccacgggcagtggtcggccgtgggccgcaccgccgtcaccaccaccctcgccggcagcgtcgccgcgctgaccacgctattcgggaagcggctccaggcggggcactggaacgtggtggacgtctgcaacgggctcctcggcgggttcgcggccatcacggccgggtgcagcgtggtggagccgtgggcggccgtcgtgtgcgggttcgtgtccgcgtgggtgctcatcggcgccaacgccctcgccgcgcgcctcaggttcgacgacccgctggaggcggcgcagctgcacggcgggtgcggcgcgtggggcgtcctcttcacggggctcttcgcgaggcaagagtacgtggaggagatctacggcgccgggaggccctacgggctgttgatgggcggcggcgggaagctcctggccgcgcagatcgtccagatcgtggtgatcgccgggtgggtgagctgcaccatgggcccgctcttctacgcgctcaagaggctggatctgctgcgcatctcggcggacgacgagatgtccggcatggacctgacgcggcacggtgggttcgcttacgaggaccctggcgacaatgcaggggttggtgagttcacgctcaagtcggcgcagaaccgtgtcgagccgccggcgagcagcaaccgggtgtaaaattcaggaacgaatttaaaaaccgagatgaagttacgtgcttgtagaacccagcggtactcgctgagg

SEQ ID NO: 13 - DNA, 195 bp, Bacillus halodurans
atgcaaggaaaagtaaaatggtttaacgcagaaaaaggtttcggttttatcgagcgcgaagatggtgacgatgtatttgttcatttctctgccattaacacagacggtttcaaaacattagacgaaggtcaatctgttgagtttgatatcgttgaaggagctcgcggacctcaagctgcgaacgtcactaagctt

SEQ ID NO: 14 - DNA, 201 bp, Corynebacterium glutamicum
atggcacagggtactgtgaaatggttcaacggcgaaaagggatttggtttcatcgctcccaacgatggctccgcagatctcttcgtccactactctgagattcagggctccggtttccgtaatcttgaggaaaaccagccagttgaatttgaggtcggcgagggcgccaagggcccacaggctcagcaggttcgtgctctc

SEQ ID NO: 15 - DNA, 636 bp, Zea mays
atgccggactccgacaacgagtccggcgggccgagcaacgcggagttctcgtcgccgcgggagcaggaccggttcctgccgatcgcgaacgtgagccggatcatgaagaaggcgctcccggccaacgccaagatctccaaggacgccaaggagacggtgcaggagtgcgtgtccgagttcatctccttcatcaccggcgaggcctccgacaagtgccagcgcgagaagcgcaagaccatcaacggcgacgacctgctctgggccatgaccacgctcggcttcgaggactacgtcgagccgctcaagctctacctgcacaagttccgcgagctcgagggcgagaaggcggccacgacgagcgcctcctccggcccgcagccgccgctgcacagggagacgacgccgtcgtcgtcaacgcacaatggcgcgggcgggcccgtcgggggatacggcatgtacggcggcgcgggcgggggaagcggtatgatcatgatgatggggcagcccatgtacggcggctccccgccggccgcgtcgtccgggtcgtacccgcaccaccagatggccatgggcggaaaaggtggcgcctatggctacggcggaggctcgtcgtcgtcgccgtcagggctcggcagg

SEQ ID NO: 16 - DNA, 723 bp, Zea mays
atggggaggggaaagatcgtgatccgcaggatcgataactccacgagccggcaggtgaccttctccaagcgccggaacgggatcttcaagaaggccaaggagctcgccatcctctgcgatgcggaggtcggcctcgtcatcttctccagcaccggccgcctctacgagtactctagcaccagcatgaaatcagttatagatcggtacggcaaggccaaggaagagcagcaagtcgtcgcaaatcccaactcggagcttaagttttggcaaagggaggcagcaagcttgagacaacaactgcacaacttgcaagaaaattatcggcagttgacgggagatgatctttctgggctgaatgtcaaagaactgcagtccctggagaatcaattggaaacaagcctgcgtggtgtccgcgcaaagaaggaccatctcttgatagatgagattcacgatttgaatcgaaaggcaagtttatttcaccaagaaaatacagacttgtacaataagatcaacctgattcgccaagaaaatgatgagttacataaaaagatatatgagactgaaggaccaagtggagttaatcgggagtcaccgactccattcaactttgcagtagtagaaaccagagatgttcctgtgcaacttgaactcagcacactgccacagcaaaataacattgagccatctactgctcctaagctaggattgcaattaattccatag

SEQ ID NO: 17 - DNA, 642 bp, Zea mays
atggcttcggtttcacctttggcaaagtttaaactggtgttcttaggagaccaatctgtcggaaaaaccagcatcatcactcgtttcatgtatgacaaattcgacaccacgtaccagcctaccattggaatcgattttctatcgaaaacaatgtacctcgaagatcgaacagttcgtttgcagctatgggatactgctggacaagaaagattcaggagtctaatcccaagttacatcagagattcttctgttgccattgttgtatacgatgtatccaataggcaaacgtttctgaatacctcgaaatggattgaggatgttcacagagaaagaggtcaaagcaatgttatcatcgttcttgttggaaacaaaactgatcttgttgaaaaacggcaagtatcaatcagtgaaggagaagacaagggtaaagagtatggagtgatgttcattgagaccagtgccaaagaaaacttcaacattaaggctttgttccggaagattgctgcagctttacccggggtagactcatattcattggcaacaaaatcagatgacatggttgatgtgaatctaaagaccacttcaaattcatcacaaggtgagcaacaaggaggagcaggtggtggtggaggctgttcttgt

SEQ ID NO: 18 - DNA, 657 bp, Zea mays
atggagggtgtgggcgcgcggctagggcgcacttcggcgcgctacgggccggcgacgacgttcacgggccatgtcaggaagtggcgcaaggagtgggtaccagtggtcgccgccgccgccgccgccgccgccaacgccaacaccagcgccaacggtggcacgacgtcctccacggggatgggatctggcggaggatcccgcgggaataatcttctcctgtttaagtggaccccggtgaacggggctaacgggggaggaggggatggggagcagcagcagcaggctgagacggccacgagacgccggcggtatgtgccggtttctttaatggaagagcaaaggcaagaatctaccaaatctgatgatgagaacaaggctaatgatggagatccatcttcgaatgaaactgagccatcaaatggaaagactgatatcaatgatacacctatggatgaatctcaggcaacagatgaggatggtcgagattctggtaaaaacggcggtggaacagacctaaatttgaatttaggtttgaaagacccggatggtgataatgaagttgagacatcagagaaacatgtagcggcaaacaatccgcagacagagaatagatccaagaggaaatccgtaacccctgaccttgagatgacaatgtag

SEQ ID NO: 19 - DNA, 906 bp, Zea mays
atggctggcctatctttggaacatccttgggcgttcgccttcggtctcctaggcaacgtcatctccttcatgaccttcctggccccgataccgacgttctaccgcatctacaagagcaagtcgacggaaggtttccagtcggttccctacgtggttgcgctgttcagcgccatgctgtggatcttctacgcactgatcaagtccaacgagaccttcctcatcaccatcaacgccgccggctgcgtcatcgagaccatctacatcgtcatgtacttcgtctacgcgcccaagaaagccaagctgttcacggccaagatcatggccctcctcaatggcggcgtctttggggtcatcctcctgctcacccttctcctcttcaagggtagtaagcgcgttgtgctgcttggctggatctgcgtcggcttctccgtcagtgtcttcgtcgcgccactaagcatcatgaggcgcgtgatccagacgaagagcgtagagtacatgcccttctccctctccctctcgctcaccctcagcgccgtcgtctggttcctctacggcctcctcatcaaggacaaatacgtcgcgctaccaaacgtccttgggttcatcttcggcgtggtccagatggtgctctacgtgttctacatgaacaagacgccggtggcggctgccgtgggcaaggatgccggcaagcttccctcagctgcagacgagcacgtcctcgtcaacattgccaagctcaaccccgccctcccggagaggacctccgggatgcacccagtcacccagatggcggccgttcctgccaggagctgcgctgctgaagcaaccgcgccggcgatgctgcccaatagggacgtggtcgacgtcttcgtcagccgacacagccccgctgtccacgtggtctag

SEQ ID NO: 20 - DNA, 825 bp, Zea mays
atggcgcatgcggcggcggccgccgccgtgccgttacgtcgtccgctcctcttcctcaaggaggctcgactcctgtccacactcgcgacccccttacctgggctccgccacccgcgcgccctccgacccacaggccccttgccctccgatgccgaggacaccgacgatccagacgccggcgacggcgccgccgtgtccttcaagaagagccgcaacgaactgaagcgggaggcccgccgcgccgtgaagtggggaatggacctcgccaagttctccccacctcagatcaagcgcatcctcagtgccgcgtcgctggagcgcgaggtgttcgacgcgctaatgctcgtgaagaagtttgggccggatgtgcgggaaggaaggaggagacagttcaattacatcggaagtcttttgcgtgatgcacaaccagaattgatggatactctaatacaagcttctaaggatggagatgagaggaagttatataccttacttagtgaaggtaaactgttggtggaagaagaggaagaggaggaagaggacctacctgatggagaagaggagaatcaagagtatatgaaaattgcagatagatggtttgacggcctcctctgcaaagacatttcagttactaatgaagtttactctgtccatagtgttgaatttgatcgtcaggagctgcggaagcttgtgaagagagcccacatgttccaagaaagcacacaaaataaagatggggaagaatctaatgcgaagctttctggagcaaagaaaccacttatgaggttccttcgttcccttgcaaaggaggcttatgctccatag

SEQ ID NO: 21 - DNA, 1584 bp, Zea mays
atggcgacgccggagctttggtggtactggtggctatgggtgacgacgatgctggccgtcgtcgtctcgaccgtcgtctgctacctgaccaaccagcaccgccgctgggggggctggggctcctcctcagggcgtcgtcggccgccgggcccgcgtcctctcccgctcatcggcaacctgctggacctgcggcgcgcgcccggcagcctccaccacacgctggcgcgcctggcccgcgcgcacggcgcccccgtcatgcgcctcgacctgggcctggtcccggccgtggtcgtctcctcccgcgacgctgcacgggaggcgttcgcggcgcacgaccgccgcatcgcggcacgccccgtcccggacagcaagcgcgcgctcggcttctgcgaccgctccatgctctcgctgcccagctcggccccgctctggcggaccctgcgcggcgtcatggccgcgcacgtcctgtcgccgcgcagcctcgcggcgtcgcgcgccgcgcgggagcgcaaggtcgccgacctgatcgggtacctccgcgcgcgggccgggaccgtggtggatcttaaagaggccgtctatggcggcgtcgccaacctcgtctcgactgccatgttctccatcgacgtcgtcgacgtgggcgccgccgagtcgtcgtcatcgtcgtcggtggcggcccacgggttgcaggagctcctggaggagctcatgcagtgcatggcccagcctaacgtctccgacttcttcccgttcctcagcgcactcgacctccaggggtgtcgtcgccgggtggccgtgcaactgggccaggtcctacaggtcttggacgacatcactgaccgccgtttggcctcctcctcctcctcctccacgtccagcaagggcggggacaggcgcggcgacttcctcgacatcctcctagacctccagtccacgggcaagatcacgcgcgacaacgtgacgctgacgctcttcgacatcttcgcggccgggagcgacaccatggcgctgaccgtggtgtgggcgatggccgagctgctccgcaacccgggcgtgatggccaggctgcgcgcggaggtcagggacgcgctgggcggcagggacgccgtcgaggaggccgacgcggcgggcctgccgttcctgcaggccgtcgtgagggaggccatgcggctgcacccggcggcgcccgtgctgctgccgcacaaggccgtggaggacggggtacagataggcggctacgcggtgcccaggggttgcaccgtgatcttcaactcgtgggcgatcatgcgcgacccggcggcgtgggagaggcccgacgagttcctgccggagcggttcctggccagggacctggacttccgcgggaagcagctggagttcgtcccgttcggctccggccgtaggctgtgcccaggcgtgcccatggcggagcgggtggtgccgctggttctagcgtcgctggtgcacgcgttccagtggcagctgccggccggcatgtcggcggaccaggtcgacgtcagcgacaagttcaccaccaccagtgttttagccttccctcctatcaaagctgtgcctctgctctag

SEQ ID NO: 22 - DNA, 1470 bp, Zea mays
atggtgctctccaaggccgtctccgagagtgacatgtccgtgcactccacgttcgcgtcgcgctacgtccgctcgtctctcccaaggtaccgcatgccggagaactccatccccaaggaggcggcgtaccagatcatcaacgacgagctcatgctcgacgggaacccgcgcctcaacctggcgtccttcgtcaccacctggatggagcccgagtgcgacaagctcatcatggccgccatcaacaagaactacgtcgacatggacgagtaccccgtcaccaccgagctccagaaccggtgcgtgaacatgatcgcgcatctcttcaacgcgccgttgggcgagtccgagacggcggtgggcgtcggcacggtgggctcgtcggaggccatcatgcttgccgggctggccttcaagcgcaggtggcagaacaagcgcagggccgagggcaagccgttcgacaagcccaacattgtcaccggcgccaacgtccaggtttgctgggagaagttcgcgaggtacttcgaggtggagctcagggaggtgaagctgcgcgacggctactacgtgatggaccccgagaaggcggtggagatggtggacgagaacaccatctgcgtcgccgcgatcctgggctccacgctcaacggcgagttcgaggacgtgaagctgctcaacgacctgctccaagccaagaacagggagacccggtgggagacgcccatccacgtggacgcggcgagcggcggcttcatcgcgcccttcctgtacccggacctggagtgggacttccgcctgccgctggtcaagagcatcaacgtcagcggccacaagtacggcctcgtctacgccggcatcggctggtgcatctggcgcagcaaggaggacctgccggaggaactcatcttccacatcaactacctcggcgccgaccagcccacgttcacgctcaacttctccaagggctccagccaagtcatcgcgcagtactaccagctcatccgccacggcttcgaggggtacaggaacatcatggagaactgccacgagaacgccatggtgctcaaggagggcctggagaagacgggccgcttcgacatcgtgtccaaggacgaaggcgtcccgctggtggccttctccctcaaggaccgcagccggcacgacgagttcgagatctcggacatgctgcgccgcttcggctggatcgtgccggcatacaccatgccccccgacgcgcagcacgtcacggtgctccgcgtcgtcatccgggaggagttcagccgcaccctcgccgagcgcctcgttctcgacatcgagaaggtgatgtaccagctggacgcgctcccgtccaggctcccgccccctcccccggcggcgccgctgctcaggaaaaagacggagctggagacgcagaggtcggtcacggaggcgtggaagaagtttgtgctcgccaagaagaccaacggcgtctgc

SEQ ID NO: 23 - DNA, 660 bp, Zea mays
atgggcgaggaggcggtggacgactacgagctccacatggtgtgctacggcagcgacgaggacgagcgcgtgatggagtgggagtcggggctccctggcgccgacgagctgaccccgctctcgcagccgctggtgccgccggggctggccgcggcgttccgcatcccgccggagcccgggcgcaccctgctggacctgcaccgagcgtccgaagccacggtggcgcggctgcggcgcgcgccgccgtcgtcgccgggcacctcctcctccccccacggccaccaggaggcgagggggggcgaaggggcggactcggcggcggcgactaccacgaacagcaacagacggccccggctggtttggacgccgcagctgcacaagcggttcgtggacgtggtggcgcacctggggatcaagaaggcggtgcccaagaccatcatggagctgatgaacgtggaaggtctgacgcgggagaacgtggccagccacctgcagaagtaccggttgtacgtgaagcggatgcgggggcagggtccgtccccgtccgaccacatcttcgcacccacaccggtgcacggcgtcgccgtcggcatggtgcccatggtcagcggccaggcgtaccactacctgtacaacggaggagggggaggagacagatag

SEQ ID NO: 24 - DNA, 660 bp, Zea mays; identical to SEQ ID NO: 23

SEQ ID NO: 25 - DNA, 963 bp, Arabidopsis thaliana
atgggtgagcctaaagacagtctcgctctcttcctctgccacgaatcggagtcttctctaaacgaagacgacgacgagacgattgagagatctgataagcaagaacctcactttactactacgatcgatgatgaagattatgtggcagaccttgttcttaaagagaatctccggttcgaaaccctaccctctaaaacgacgtcgtcttccgatagattgattgccatcgattggattctcactacaagaacaagatttgggttccaacatcaaacagcttacattgcaatctcatacttcgatctgtttctccacaaaagattcatcggtaaagatgaaacatgggcgatgcgattgttatcagtagcttgtttatcattagctgctaaaatggaggaacgtattgttcctggtttatcacaataccctcaagatcatgacttcgttttcaaacccgatgtcattcgtaaaactgaactgttgattctatccacattggactggaagatgaacttgatcactccttttcattacctcaactacttccttgctaaaatctctcaggacaaccattctgtttctaaagacttggtgttgttaagatcctctgattctcttcctgctttaactaaagagataagttttacggagtatcgacagtttgttgttgctgctgtcactacattgctagcttcttcttctacctcatcggatattagattgactagagaagagatagctaacaagtttggttcgatctcttggtggacttctaatgagaatgaaaatgtatatttgtgttatcagagaacgctagagattgaggagaggaaacatatgacacctccaccggaaatagcggtttctcgcgaaccgccggcttcaggaagtggcgctaaacgccgattgtcttttgatgattctgatcaaagttctccaccagccaagagaatgcgtaggcta

SEQ ID NO: 26 - DNA, 1818 bp, Zea mays
atggacacccacatcggatccgtgaacggggcggcgtcgaaccagacggttggctgcccggcgtcggcgccggggtgcccgatggcgtccacgccggcgcagcccgcggcgaccctgtcggcgggggaggcgtcgctggggcgccacctcgcgcgtcgcctcgtgcaggtcggcgtcaacgacgtcttcgcggttccgggggacttcaacctcacgctgctcgaccacctgatcgccgagcccggcctgcgcctcgtcggctgctgcaacgagctcaacgccgggtacgccgccgacgggtacgcgcgcgcgcgcggcgtcggggcctgcgccgtcacgttcacagtcggggggctcagcgtgctcaacgccatcgcgggcgcctacagcgagaacctgcccgtcatctgcatcgccggcgggcccaactccaacgactacgggaccaaccgcatcctccaccacaccatcggcctccccgacttctcgcaggagctccgctgcttccagaccgtcacctgccatcaggcggtggtgaacaatctggatgacgcgcacgagcagatcgacacggccattgccacggcactgagggagagcaagcccgtgtacctcagcatcagctgcaacctccctgggctgcctcatcctaccttcagccgcgacccagtgcccttcttcctcacccccaggacgagcaacaagatggggctagaggctgcagtggaggcaactgtcgaattcctgaacaaggcggtgaagccagtccttgtcgccggccccaaactgcgtgtggcaaaggcaggaaaggcatttgtcgatatggtagatgccagtggctatgcctatgccgtgatgccatcggccaagggtcttgtgccagagactcacccccacttcatcggcacctactggggcgccgtcagcaccgccttctgtgcggagattgttgagtccgcagatgcctacctctttgcaggccccattttcaatgactacagctctgttggctactcattcctcctcaagaaggaaaaggccatcatcgtccagcctgagcgtgtgatagtggggaatgggccggcattcggatgtgtgatgatgaaagagttcttgtctgaattggctaagagggttaataagaacaccactgcctatgagaattacaagaggatctttgtacctgagggccagccgctggaaagcgagccaaatgagccactgcgagtgaatgtgctcttcaagcacgtccagaagatgttgactggtgatagtgcggtgattgctgagactggtgactcctggttcaactgccagaagcttaagctgccagaaggctgtgggtatgaattccaaatgcagtatggttcgattggatggtcagtgggtgcattgctcggatatgctcagggtgcgaaccacaagcgtgtgattgccttcattggtgatgggagcttccaggttacagcacaggatgtgtcaactatgctgcgatgtgagcagaacagcataatcttcctgatcaacaacggtgggtacacgattgaggtggaaatccatgacgggccatacaacgtcatcaagaactggaactacactggctttgtggacgccatccacaatggcttgggcaagtgctggacctccaaggtgaagagcgaggaggagctgacggctgccattgagacagcgctaggggagaaggactgcctgtgcttcatcgaggtgatcgcgcacaaggacgacaccagcaaagagctgctggaatggggctctagggtttctgccgccaactcccgaccaccaaatcctcagtag

SEQ ID NO: 27 - DNA, 1530 bp, Zea mays
atgggggccttcgcgaaggaggagcaccagttcctagccgagctcggcctcgcgcagcgcaacccaggcgcgttcgcatgcggtgcgtggggcggctcaggtcccaccgtcacctccacgagcccgaccaacaatcaggtcatcgcagaggtcgtggaggcgtccgtgcacgactacgaggagggcatgcgcgcctgcttcgatgccgccaagacatggatggcgattcctgctccaaagcgaggagagatcgttaggcaaatcggtgatgcactgagagcaaagctccatcaccttggcaggcttgtgtcacttgagatggggaaaattcttcctgaagggatcggtgaggttcaggaaatcatcgacatgtgtgattatgctgtggggctaagtcgccaactaaatggatccattataccatctgaacgaccaaaccatatgatgatggaggtgtggaatccccttggagttgtgggtgttataacggcatttaatttcccttgtgctgtgcttggttggaatgcttgcattgctttggtctgtggaaattgtgtcgtctggaaaggtgctccaacaactccactgatcactattgcaatgacaaaaatagtggctagtgtattggagaagaacaacttgccaggcgcaatttttacatctttttgtgggggcactgaaattggtcaagcaattgcccttgacattaggatacctttggtttcattcactggaagtacaagggctggtctaatggttcagcaacaagttagtgcaagatttggtaaatgccttcttgaacttagcggaaacaatgccatcattgttatggatgatgcagatatccagctagctgtgcgatctgtcttgttcgctgctgttggtacagcaggacaacgctgcactacatgtcgtaggctgattcttcatgagaacatatatcaaaccttccttgatcagcttgttgaggtatacaaacaagtccgaattggggatccgttggagaaaggcaccttactgggaccactgcacactcctgcttcaaaagagaactttttgaaaggcattcagactatcaaatctcagggagggaaaatcctttttggaggatctgccattgaatcagaaggaaactttgtgcaaccaacaattgtggaaattacaccttctgcaccagttgtgaaagaagaactctttggtcctgtcctttatgttatgaaatttcagtccttgaaggaagcaattgaaatcaataactctgttcctcaaggattgagcagttctatatttacaaagaggccagatattatttttaagtggctcgggccccatggtagtgattgtggtatagtgaatgtgaacatacctactaatggtgctgaaattggtggagcatttggtggagaaaaagcaactggtggtggacgagaagcagggagtgattcctggaagcagtacatgaggagggcgacttgtacaatcaactatgggagcgagctacctctagcccagggaatcaattttggttag

SEQ ID NO: 28 - DNA, 576 bp, Zea mays
atgagtctctgtacaatagcacgacggctatgtctttcaaaaccatcctctggcagtcgtctttcagcaatttgggctcatctatacagcactgaggctgcaaaggacatgggtgctaagaagtacaagtaccccgatgtatacgacccctacgggcctatgccgccgccttcggagaaagtcgtggaactagctgatcgcatcgctgctctccctcccgaggagatcaaacagattgctccagcccttctcctcagactgaaccaggagccgccacaggcggtatctggccagggtttcggtttcggtgcccaggtcggctctggggcaggttctggaaaggctgagaagaaagccgagaagacagtcttcgacgtcaggttggagaagttcgacgctgctgcgaagatcaagatcatcaaggagatcaggacgtttacggatctggggctgaaggaggccaaggagctggtggagaaggccccagtcgttctgaagcaatcgctcacaaaggaggaagcggaagcgatcatagcaaagataaaggcagctggcggtgttgctgtgatggagtag

SEQ ID NO: 29 - DNA, 1326 bp, Zea mays
atggcggggtcgaggttcgggtcgttcaagtcggagaagggcgactccgcctccgcagcggcggcagcgggtggagcggcgcagaggagggacccgtacgaggtgctcggggtgggccgcaccgccaccgaccaggagatcaagagtgcgttccgacgcatggcgctcaagtaccatccggacaagaatggcgatgaccctgttgcatcagacaggttccaggaagtcacattctcctataacatcctgtcagatcccgataagaggcggcagtacgatacatcaggatttgatgcaatcgaatctgatagtcaggaactggagctggacttgtcgagtctcaacactgtaaacacggtgtttgcagctctttttagtaagcttggtgtgccaattaaaacaactgtttcagctacagttttagaggaggcattgaatggttcggttatggtttctcaactccagctaggaaactcagtgcagagaaaggtggaaaagcaatcggcccatttctattctgtggatataactgaaaaacaagctaaaatggggctagtttgtcgtgttcactcaaacgataaaagcaaattcaagttgctatattttgagcttgaagaaaatggcgggcttagtcttgcactacaggaagacagtgtgaaggttgggaaagttactgctgcagggatgtatttccttggttttcctgtgtaccgttttgaacaaaataacctggcagctgctgcaaaagattctgatggtgcattctttaaaagattggatagctttcagccatgtgacatacatgaactgaaacctggaacacacttctttgctgtctacggtgacaacttcttcaagagcgctagttatactatagaggttgtatgtggtgaatcttttcctgccgaaaaggagatgctacgaaatgtggaggccaagatactcacaaaacgagctgaactttccaaatttgagtcagagtatagggaggttttggcgaagttcactgaaatgaccagcaaatacacacaagaaatgcaagcgattgatggtcttttgaaggaaaggaatgagatccatgcttcctataccaacaatccacctctaaaacggagttccagcaggaataaagccaagtcgccttcgaaagtggccaaaactggtacagaaaaacatcatcagaaggaaaagaaggtgaaggatcactgcatggagggatgtggaagtgacagcgataactcaagtgaaaagaaatcaaaagagcggttcccaaggaagaaatggctgaaccttccattcaaacttgacaggagaaagacgtgctag

SEQ ID NO: 30 - DNA, 981 bp, Zea mays
atggccgacaacgcgaaggccgcggcggcgcatgcgaggccggagtcgtcgcaggaggaggaggaggactggaaggaggccgagggggacgtcgccgaagtcgaccgcgccgccaccaatggcgccggcgaggggggcgtgcccacagacaggccgatccgggtctacgccgacggcatctacgacctcttccacttcggccacgccaagtcgctggagcaggccaagaagtcgtttccaaacacatatcttcttgttggatgctgcaatgatgagttgacacataaattcaaaggaagaactgttatgactgaggatgagcgatatgagtcacttcgtcattgcaagtgggttgatgaagtcattccagatgctccatgggtggtgacagaagagttcttggataagcataacattgattttgttgctcatgattctctgccgtatgctgatgctagtggagctggtaacgatgtttatgaacatgtaaaaaagcttggtaagtttaaggagactcagcgcactgatgggatatcaacatcggacattataatgcggattgttaaagattataatgagtatgttatgcggaatctggccaggggctacactagaaaggatcttggtgttagttatgtcaaggaaaaacgactgcgagtgaacatgggacttaaaaacctgcgtgacagagtgaaacagcaccaagaaaaagtaggggagaagtggagcacggttgcaaaactccaggaagagtgggtggaaaatgcagaccgctgggtggctggtttcttagagaagtttgaggaagggtgccactcaatggggacagccatcaaggagaggatccaggagaggctcatcaaggcacaatccagcgactttggcagcctcctacagtacgacagctacgattctgatgaagccaaagaaaacgacgaggacgaagacgaagatgaactctttgaagacgtcaaggaatag

SEQ ID NO: 31 - DNA, 645 bp, Zea mays
atggccgccgtggaggtgtgcgtgaaggccgccgcggggaaccccgacacgctcggcgattgcccgttctcgcagagggtgctgctcacgctggaggagaagaaggtcccgtacgaggtgaagctcgtcgacctcggcaacaagcccgaatggtttctgaacatcagcccagagggtaaggtgcctgtgttcaacggtggagatggcaaatgcattgctgattctgatgtaatcatccaagtcattgaggagaagttcccgactccttctctggtcacccctccagaatatgcatcagtgggatcaaagattttcccagcctttgtcaagttcttgaagagcaaggatggtagtgatgggtcagagaaggcgcttctggatgagctgcaggcactggatgatcatctcaaagctcatggcccctacataaatggggagaacgtgtcagcgactgatcttagcctggggccaaagcttttccacctacagatcgcactggagcatttcaaaggctggaagatcccagaaaacctaaccaatgtccatgcctacaccaaggctcttttcagccgtgaatcttttgtcaagactaagccatccgaggagcacgtgattgcgggatgggcgcccaaggtgaatgcatag

SEQ ID NO: 32 - DNA, 432 bp, Zea mays
atggacgcgagcgcggccaccgccaggcgcaagcgcaagcgccccgacgccgacatcaccgccgccgccgccgccgccgccccggtcgccgtcgacgaggcctcggacgccgaggtcgaggagttctacgccatcctgcggcgcatccgcgacgcctcccgccggctgtgcggcgccggcgcccggcccgccccgcgcgcgccggcgtggcggcccagcttctcctgggaggacttcgcgacgccggcccctggcgcgccggcgcctgagaccccgacccccgcgcagcaggagccagcgcagccgcggcccgacgagcctgtagccgtcgtccgcgctaccgccccgtcgccgcgtgccgggctggacctgaacgcggagccggagccggaggcgccggccacccctcgctcggcgcgcgtccaggcgtag

SEQ ID NO: 33 - DNA, 366 bp, Zea mays
atggccggctgctgcgtgttcctccggtggccgtcggcctcgccgtcgcgcatcggctaccgctccctcgtcgacgcggcggccgacgacgccgccccgccgtcgacggtgacggtcgtggtcgggaaggagcggcgggcgttcgcggtggaccgcctcgtgctcgactcctacccgctccggctgctcctggagacggcggcgcgcagggaggagcgcagggccgggggcggcgccatcttcgtggacgtcgacgccatcctcttcgagcacatcctctggctcgcctgcgacgcccgctccgtctcccagatcctgcacctcgacctcaaggagatcatcgacttctacgcccaggacgcgtag

SEQ ID NO: 34 - DNA, 606 bp, Zea mays
atgtcgtactacggcgaccggcgcgcggagtcgtcgatcgtggaggcgttcacgctgtcgccgctgccgtacccggtgatcctggtgctgctgatggtgacgctgctgctgggcgcctcgtggttcttcacgtacgacgacttcatcgaggaggcgtcgcagcagctgagctgggcgctgctgggcgtgcccatcgcgctcgtcctcctcatccgctggatctcctccgtcgactccttcgagggctacctgggcttctacccgagggagagccgctggaagggccgctacgagcggggccccgccgagggcagctcgccctggggcgtcgccttgctcgtcctcctcctcctcgtgctcgccagggctggctgcgggaaggtcgtgtatgggaaccctgggaggctggggaggaagaggaggggaggggataaggtgaaggagcaagctggggacgaggcggccaagttcccgtggtccgggatgcgcctggctaccgagaaacggaggagggtgagacgctctccatcgaagaagggaatagtcctgaagcaaaaatcacggaaggtatccctgcagcaccgctcaaagaagttgaaagcttag

SEQ ID NO: 35 - DNA, 756 bp, Glycine max
atggaaggagtaccgcacccaatacccagaacagtcgaagaggttttcaccgattttaagggcagacgcgccggtttgatcaaggctctcactaccgatgttgaaaagttttaccagcagtgcgatcctgagaaggagaatttgtgtctatatgggtttccaaatgaaacatgggaagtgaatttgcctgttgaggaagtgcctcctgaacttcctgagccagcattaggtataaactttgccagggacggcatgcaagagaaggactggctatcactggttgcagttcacagtgactcatggctgcttgctgttgctttctattttggtgcccgctttggatttggtaagaatgaaaggaaaaggctttttcagatgataaatgatctgccaacaatcttcgaacttgtgactggaagtgctaggcaatcaaaggatcaaccagctgcccacaacaatggtagcaaatgcaaatcaagtggaaagtcccgtcagtctgagtctcaggccaaggggatgaagatgtctgcaccacccaaagaagaggatgagagtggagaagaagaagaagaagatgatgaacaaggtgcgacatgtggtgcttgcggtgataattatggcactgatgaattctggatctgttgtgatatgtgtgaaagatggttccatggtaaatgtgttaaaattactcctgctaaggctgagcacatcaagcaatacaagtgccctagctgcagtaacaagagggttagagtt

SEQ ID NO: 36 - DNA, 1455 bp, Arabidopsis thaliana
atgtcggaaggagtagaagcgatagtagcaaatgacaacggaacagatcaggtaaacggaaaccgtaccgggaaagataacgaagaacacgacggctccaccggttctaacctaagcaatttcctatggcacggtggctctgtctgggacgcttggttcagctgcgcatctaaccaagtggctcaagtgttattgacattaccgtactcgtttagtcaactaggaatgttatcaggaatagtacttcagatcttctatggtttactaggaagctggactgcttatctcatctctgttctctacgtcgaatacagagctcgtaaagaaaaagaaggcaaaagcttcaaaaaccacgtcattcagtggtttgaagtacttgatggattacttggttcatactggaaagcactaggactcgcatttaattgcactttcctcttgtttggatctgttatccaactcattgcttgtgccagtaacatttattacataaacgatcatctggacaagagaacatggacttacatatttggcgcgtgttgtgcaaccactgtctttataccgtcgtttcacaattaccgaatttggtcattccttggccttggaatgaccacttacaccgcttggtacttagccattgcctccatcatccacggccaggcggaaggtgtgaaacattcaggtccaacaaagctagtgctttattttacgggagccacaaatattttgtacacctttggaggtcacgcggttactgttgagattatgcatgctatgtggaaaccacagaagtttaagtacatttacttgatggcgacgttatacgtgttcacgctaacgattccgtcagctgccgccgtttactgggctttcggagacgcacttctcgaccactccaacgctttctctcttatgcccaagaacgcgtggcgtgacgccgctgttatcctcatgctcattcatcagtttataacgttcgggttcgcttgtacacctttgtactttgtgtgggagaaagtgattgggatgcatgacacaaagagcatttgcttaagggctttggctagattgcctgtggtcatacctatttggttcttagctattatcttcccctttttcggtccaatcaattccgctgtcggtgctcttcttgttagcttcaccgtctatatcatcccatctctcgctcacatgctcacttaccgatctgcctccgctcgtcagaatgcggcggagaagccaccgttctttatgccgagctggacggcgatgtacgtgttgaatgctttcgtggtggtttgggttcttatagtcggatttgggttcggtggatgggctagtgtaaccaactttgttcgtcaagtcgacacttttggtctctttgccaagtgttaccaatgtaaaccagctgcagccgccgcacatgccccggtctccgctttacaccaccgtctt

SEQ ID NO: 37 - DNA, 1572 bp, Arabidopsis thaliana
atgactaatactctctgtttaagcctcatcaccctaataacgctttttataagtttaaccccaaccttaatcaaatcagatgagggcattgatgttttcttacccatatcactcaaccttacggtcctaaccgatcccttctccatctctgccgcttctcacgacttcggtaacataaccgacgaaaatcccggcgccgtcctctgcccttcctccaccacggaggtggctcgtctcctccgtttcgctaacggaggattctcttacaataaaggctcaaccagccccgcgtctactttcaaagtggctgctcgaggccaaggccactccctccgtggccaagcctctgcacccggaggtgtcgtcgtgaacatgacgtgtctcgccatggcggctaaaccagcggcggttgttatctcggcagacgggacttacgctgacgtggctgccgggacgatgtgggtggatgttctgaaggcggcggtggatagaggcgtctcgccggttacatggacggattatttgtatctcagcgtcggcgggacgttgtcgaacgctggaatcggtggtcagacgtttagacacggccctcagattagtaacgttcatgagcttgacgttattaccggaaaaggtgaaatgatgacttgctctccaaagttaaaccctgaattgttctatggagttttaggaggtttgggtcaattcggtattataacgagggccaggattgcgttggatcatgcacccacaagggtgaaatggtctcgcatactctacagtgacttctcggcttttaaaagagaccaagagcgtttaatatcaatgaccaatgatctcggagttgactttttggaaggtcaacttatgatgtcaaatggcttcgtagacacctctttcttcccactctccgatcaaacaagagtcgcatctcttgtgaatgaccaccggatcatctatgttctcgaagtagccaagtattatgacagaaccacccttcccattattgaccaggtgattgacacgttaagtagaactctaggtttcgctccagggtttatgttcgtacaagatgttccgtatttcgatttcttgaaccgtgtccgaaacgaagaagataaactcagatctttaggactatgggaagttcctcatccatggcttaacatctttgtcccggggtctcgaatccaagattttcatgatggtgttattaatggccttcttctaaaccaaacctcaacttctggtgttactctcttctatcccacaaaccgaaacaaatggaacaaccgcatgtcaacgatgacaccggacgaagatgttttttatgtgatcggattactacaatcagctggtggatctcaaaattggcaagaacttgaaaatctcaacgacaaggttattcagttttgtgaaaactcgggaattaagattaaggaatatttgatgcactatacaagaaaagaagattgggttaaacattttggaccaaaatgggatgattttttaagaaagaaaattatgtttgatcccaaaagactattgtctccaggacaagacatatttaat

SEQ ID NO: 38 - DNA, 1474 bp, Leuconostoc mesenteroides
accatggagattcaaaacaaggctatgcttattacttacgctgattctcttggaaagaaccttaaggatgttcatcaagttcttaaggaggatattggagatgctattggaggagttcatcttcttcctttcttcccttctactggagatagaggattcgctcctgctgattacactagagttgatgctgctttcggagattgggctgatgttgaggctcttggagaggagtactaccttatgttcgatttcatgattaaccatatttctagagagtctgttatgtaccaagatttcaagaagaaccatgatgattctaagtacaaggatttcttcattagatgggagaagttctgggctaaggctggagagaacagacctactcaagctgatgttgatcttatttacaagagaaaggataaggctcctactcaagagattactttcgatgatggaactactgagaacctttggaacactttcggagaggagcaaattgatattgatgttaactctgctattgctaaggagttcattaagactactcttgaggatatggttaagcatggagctaaccttattagacttgatgctttcgcttacgctgttaagaaggttgatactaacgatttcttcgttgagcctgagatttgggatactcttaacgaggttagagagattcttactcctcttaaggctgagattcttcctgagattcatgagcattactctattcctaagaagattaacgatcatggatacttcacttacgatttcgctcttcctatgactactctttacactctttactctggaaagactaaccaacttgctaagtggcttaagatgtctcctatgaagcaattcactactcttgatactcatgatggaattggagttgttgatgctagagatattcttactgatgatgagattgattacgcttctgagcaactttacaaggttggagctaacgttaagaagacttactcttctgcttcttacaacaaccttgatatttaccaaattaactctacttactactctgctcttggaaacgatgatgctgcttaccttctttctagagttttccaagttttcgctcctggaattcctcaaatttactacgttggacttcttgctggagagaacgatattgctcttcttgagtctactaaggagggaagaaacattaacagacattactacactagagaggaggttaagtctgaggttaagagacctgttgttgctaaccttcttaagcttctttcttggagaaacgagtctcctgctttcgatcttgctggatctattactgttgatactcctactgatactactattgttgttactagacaagatgagaacggacaaaacaaggctgttcttactgctgatgctgctaacaagactttcgagattgttgagaacggacaaactgttatgtcttctgataaccttactcaaaact

SEQ ID NO: 39 - DNA, 1476 bp, Arabidopsis thaliana
atgggaggttgcgtgtcaacgcctaagagctgtgtaggaggtaaaataaggtcaagcaaaaggagaaagactcggacaagacgaaagattcagaagaagagagttgtttcttcttctcgcttatctgacggatctttcgataataatcccactttcagagcaagtgttgatgaagcatggtttgattccaatctcgcctttgaaaccgattgtgatgatgactttcatagtgttcaggaagatacgttgtcagtgaacggatgtgagcgtatctcagtatcgagtatgtcatctgttaaagactctaaccttggtggttccgctcggaattctctaagcgatgtcatctcacaatcaaaatcagagagtgctttgattgacactaagcaggctgttttcatcgacgagatatcttcaaatgctgatggtagctctaataaagatgaagggttgttggaaaactgcgggattcttccgagtaattgtttgccttgtcttaattcaactgttccttctattgaaaagagaaggtctttaagctctagccctccaagtacgaggaaaaaagctgcggttaaactatctttcaagtggagagaagggcaccctactggtcctttattttctacaacaatgcagttgcagagaccgatggcaggttctcaggttccgttttgtccactcgaaaagaaaatgtttgattcttggtcaattattgagcctggtagtttccgggttcgtagcaaaacttatttcagagataagaagaaagagcttgcaccaaactatgctgcatataatccatttggtgtcgatgtatttttatctcaacgtaaagtaaaccatatagcgcaatacgtggagcttcctgttgttactaccaccccgactaagctcccatcaatccttgttgtaaatgttcagattccattgtatccagctgcaatttttcatggtgaaactgatggagaaggaatgaatttcgttttatactttaaactttcggataactatttaaaggagcttccaccacattttcaagaaagcattcagagattactagatgatgaggttgagaaagttagaggctacactactgacacgaatgtaccctttagagaacggttaaagatattgggtcgtgttgcgaatgtagacgatcttcagttgaatggtgcagagaaaaaactcatgaatgcttataacgaaaaacctgtgctttcacgtccacagcacgagttctactcgggtgaaaattactttgagattgatattgatatgcatagattcagttatatatcgcggaaaggatttgaagcatttttagacaggctaaagaactgtgttcttgatgttggactcacaattcaggggaataaaccggaggagttaccggagcagattttgtgttgcatccggttaaatgggattgattacatgaattatcatcagttagctcttagtcaagaagtccta

SEQ ID NO: 40 - DNA, 1470 bp, Arabidopsis thaliana
atgacaaagataagtcctgaagttgaaatcaggatgccaatggaggcatttccgccagtttcagctgatgtgagctttatttctaatagttttccgaagtacaaactggatgctgataatcaagttctggaagagccagttgaggataaccagggtccttctttgaaggacgttattgaacaagaagcttccaatttgtcagaccaacacaagcgtatctcagttcgtgaccttgccagtaaatttgacaagaacctggctgcagctgctaagttgtctaatgaggcaaagctaagagacgtggcatctttggagggacatgttcttttgaaaaagctaagagatgccttagaatctttaagaggccgttttgcaggaagaaacaaagaggatgtggagaaagctatctctatggtggaagctttagcagttaagttaacccaaaatgaaggagaattgattcaagagaagtttgaagtgaagaagcttgtaaactttctcaaacaggcttctgaagatgctaaaaatttggttaatcaagagaagtcttttgcttgtgccgaaattgaaagtgctagagctgtggtgctgagaattggggaggctcttgaagaacaagaaaaagcttcccaagcttctaaaccacaggatgtggatggactagtcgaagaggttcaagagtctagaagaatcaaattgttgcatcacccaagcaaggtgatggccatggaatatgaactacgtgctcttagggatcaaattcgagagaaatctatattttcaattaagcttcagaaagagctaatcatgagcaagaggaacgaggaaaataaatcttgtttatacatgttagatggttctgaagctttgggttcatatctgcgagtccagccttgctcagatgaagtgccacaggtttcgaaatgttcatttcagtggtaccgcttgtcttctgaaggcagctggagggaagttatttcaggtgccaacaagtcaatatatgctcctgacccctctgatgttgggagaatcttacaagtagatattgtctcaaatgggaaaaagctcaccctaacaactaatcccattcaaactgtttcaggacttggaagccatgtggagacacttctacgaaaatctaatactgattttaatgtagttatttctcaaatgaatggaaaagatcactcatcccattctactcattcatttaatgtggggagaatgaggataaagctatgcagaggttggattacaaaagctagagagatttactccccatcaatgcagctatgtggcgttagaagtgatgtcgtgaatgcagcgaaggtgttgttttggcaagcaagaaagggcctctcatttgtattaacctttgaatcagagagagaccgaaattcagccattatggttgccaggaaatatgctcttgattgcaatgtcgtgcttgccgggccagatgatctagtg

SEQ ID NO: 41 - DNA, 537 bp, Glycine max
atggccagttttggaggaaccacacaaaagtgcatggcttgtgccaaaactgtgtatcttgttgataagttaactgcagatagccgtgtctatcataaggcttgcttccgatgccaccattgccgtaatacccttaagcttagcaactactgttcttttgagggggtgctctactgcagacctcactatgatcaactctacaagcgaactggtagcctggacaaaagttttgaaggaatacccaaaattcagaaaccagagaaaccggtcactggtaatgagaatactaaggtcctcgcaaacgtgttcttgggcaccagagacaaatgtgtgtgttgcaacaagacagtgtatcccactgagagggttacggttaatgggacaccctaccacaagggctgcttcaagtgtacctatggaggttgtactgtaagctcatcaaactttatcacacacgagggaaagccctactgcaaacaccatcacattcaacttttcaaagagaaagggaattacagtcagctcgagaatgaatgc

SEQ ID NO: 42 - DNA, 537 bp, Glycine max; identical to SEQ ID NO: 41

SEQ ID NO: 43 - DNA, 501 bp, Arabidopsis thaliana
atgtacctgattgtgcttggttttgcaagttggtgtctcaataaatacatcaacggccaaactaaccacccaagttttggaggcaatggagcaacaccgttcttcttgacgttttcgatattggcggctgtggtaggagtagcgtcgaagttggccggagcaaatcatattaggttttggaggaatgatagtttagccgctgctggagcttcttccatcgttgcatgggctatcacagctcttgccatggggttggcatgcaaacaaataaacataggaggatggagaggatggagactgaagatgattgaagccttcattatcattttgacgttcacgcagcttctctacctcatgttgatccatgccggttcactcagcagcaaatatggtcctggatacagagaccaagactatgctacaggccaagctcatggtcatggtcatgtaccacacactgtgggagagcacaaggctggtgttggatctaccatggcagtc

SEQ ID NO: 44 - DNA, 681 bp, Arabidopsis thaliana
atgccggtgcacgatgagcaagagcatgaggtgtacggtggagagatcccagaagaggaagaaggtgagatggatacggaagagtacgaagaacacggcggagaagaaggtgccgccgccggagatgaggagcttgaacctggctctagctctagggacttggaggatatgaagaaacgaattaaggagattgaggaagaagctggagctttgcgtgaaatgcaagccaaggctgagaaagatatgggtgctagtcaagacccttcaggtggtgttagtgcggctgagaaggaagaagtggattcgcgttcaatatatgttggcaatgtggactatgcatgtactccagaggaagtccagcagcattttcaatcatgtgggacagtgaatagggttacaattctgacagataagtttggtcaacctaaaggttttgcgtatgtcgaatttgtggaagtagaagctgttcagaattcgcttattttgaacgagtcagaactacatggtcgtcagataaaggtatctgcaaagaggactaatgtacctggaatgaggcaatttcgaggaagagggcgtccctttagaccgatgaggggattcatgccaggagttccattttatcctccatatgcttatgggagagttcccaggttcagacggcctatgcgctacagaccgtac

SEQ ID NO: 45 - DNA, 1116 bp, Arabidopsis thaliana
atgtttgctcagttagcaccatcgccgtctccttctccggcgaacgttagccacttcgttcaccgtcgcaccttccgtcaatgtacatacgccgtctccgcttctcttcccactgcaaattcctctcgtccaccaccaattcagattgttggaggaaaggatttgaatttggatgttacacggaaagatgattcaattgggttcaaattagaggcaaatgaagatgaaattgattggatgaatctagaatctgatattcgtctatggactagagcattacgtcctgttcagtggtatccagggcacataatgaaaactgaaaaggaacttagggaacagcttaagttgatggatgttgtgattgaagtccgtgatgctaggattcctttatcgaccactcatccaaagatggatgcgtggcttgggaataggaaacggatattggtattaaatagagaagatatgatctcgaacgatgatcgaaatgattgggcgagatactttgcaaagcaaggaataaaggtcattttcactaatggcaaacttgggatgggagctatgaagctaggtcggttagccaaaagtttagcaggtgacgtaaatgggaaacggcgagaaaaaggacttctccctagatcagttagagctggaataattggataccctaatgttgggaaatcatctctgatcaatcgtctattgaaacgaaaaatttgcgcagcagctccaagaccaggtgtaactagagaaatgaaatgggtcaagcttgggaaagatcttgatctcttagattcacctggaatgcttcctatgcgtatcgatgatcaagcagctgctataaagctggcaatttgtgatgacattggagagaaagcttatgacttcactgatgttgctggaatccttgtgcagatgttagcacggattccagaagtaggcgcaaaggctctttacaaccgatacaagatccagctagaaggcaactgcgggaaaaaatttgtgaagacgcttggtcttaatttgtttggtggagatagtcatcaagctgcatttagaatactaacggattttcgcaaaggcaaattcgggtatgtctcgttggagagacctccactg

SEQ ID NO: 46 - DNA, 1116 bp, Arabidopsis thaliana; identical to SEQ ID NO: 45

SEQ ID NO: 47 - DNA, 1308 bp, Arabidopsis thaliana
atgaaagcatcgggttcattagatagctggagagaatatttccgacggcgaggagattccgatatattcgggatcatcgatcatgcgatcatggtggctgctactgattgtcctaacaaattcaaatccagaagagacaaaatcgccgagcttttattctcctgtagagtgaatcgttgcgtcggatgcgaccatcttgaattgtctgttcccggagacgacgaggctaaccgtggaaccaccggaaatggtggtggtggtacggcggttgatgaagattatgaggttgctggtggtagtaaagagagcaaagctaatagtagcagaggggataataatcagattgttagcaattatacatttgatgaagctgaggctttgagtgatgagattgaagagttttctgtggtttctaaggaggttgctaggatcaaagagatcttgctcaacaaagaagatgagccaaactcggtgttactcgattctttaagacatcttaagttgatgtctttgaatgtggatattcttaagagtactgagattggaaaggctgttaatggcctcaggaaacattcttctgataagattcgacaactcgctaagactcttatcgcagaatggaaggagttggtggatcaatgggtgaataccacaaaggaaatcactggtgctgaaggtacaccagagtctgcaaacccgtctgtccttgatgaagaagaggcgtttccatcgcttccatatgatgttgatatctttacacctgaaccaaacggatttgaaatctcacacttctttgattccttggactttgatggaaatcctcgtaactctgaagaacacaacacaagccgagagcatgaaagaaggccacaaaatatcgccaagagaaaacctgagggaacacaaatgaggatacaagatgctccttttagatctattaagccatcatcagctactgattttgatgggactagaagacctgtaaagcaaagtacagagcaaaggatgaagaacgaaacggtatctgttcacaagtctgaaaaacccatgatccaaaggaaaccggttgttacagaacagaagcggaaagctcctggacctcaacaagaaaaacttaaaggtcttgatgcagacgcaaagtttgagtttgcaaagaggaaacttcaagaaagctaccagcatcacgagaatgccaagaagcagcgaacgatacaagtacttgagatgatcccaaagcaaggtagtgctcagaaaccgcaactcaagagacctggaatgagcaacaggaattgggctaatgggagaaaa

SEQ ID NO: 48 - DNA, 708 bp, Arabidopsis thaliana
atggatgtttttgctttcaatgcttctttatccatgtgtaaagatgttgccggaatcgcaggcaacatatttgcatttggactcttcgtttcaccaatgccaacgtttaggaggatcatgaggaacaaatcgacggagcaattctccggtttaccatacatttacgctctcttaaactgcttgatctgcctttggtatggcacacctttcatatcacacagcaatgccatgcttatgactgtgaattccgttggagctacgtttcagctttgctacattatcctcttcatcatgcatacagacaagaagaacaagatgaagatgcttggtttgctttttgtggtgtttgctgtggttggagtgattgtagctggaagtttgcagatacctgaccagctcacacggtggtactttgtcgggttcttgagctgcggttctcttgtttcaatgtttgcctcgccgttgtttgttattaacctagtgattcggactaagagcgttgagtttatgccgttttatctctcgctatcgactttcttgatgagtgcttccttccttctttacgggttattcaacagcgatgcctttgtttatacaccaaatggaataggaacgattcttggcattgtgcagctggctttgtactgttactaccacaggaattctatagaagaagaaacaaaagagcctttgattgtttcttacgtg

SEQ ID NO: 49 - DNA, 747 bp, Arabidopsis thaliana
atgacgaagaactacccaaccgtgagcgaagattacaagaaggctgttgagaagtgcaggaggaagctcagaggtttgatcgctgagaagaactgtgcacccatcatggtccgactcgcatggcactctgctggaactttcgattgtcaatcaaggactggaggtccattcggaacaatgaggtttgacgctgagcaagctcatggagccaacagtggtatccacattgctcttaggttgttggaccccatcagggagcaattccctaccatctcttttgctgatttccatcagcttgctggtgttgtggccgttgaagttactggtggccctgacattcctttccaccctggaagagaggacaagccccaaccacctccagagggtcgtcttcctgatgctaccaagggttgtgaccatttgagagatgtctttgctaagcagatgggcttatctgacaaagacattgtcgctttatctggtgcccacactctgggacgatgccacaaggataggtctggcttcgaaggtgcatggacatcaaaccctctaatcttcgacaactcttacttcaaggaactcttgagcggagagaaggaaggccttcttcagcttgtctctgacaaagcactattggacgaccctgttttccgtcctttggtcgagaaatacgctgctgatgaagatgcctttttcgctgattacgctgaggcccacatgaagctttctgagcttgggtacttatcc

SEQ ID NO: 50 - DNA, 942 bp, Arabidopsis thaliana
atgtatttgttagtgtttaaactctttctatttttgtctcttcttcaaatctctgtctctgctagaaacctagcttcacaagaaccaaaccagtttcaactactcaagtaccacaaaggagctcttctctccggcaaaatctccgttaacctaatctggtacggcaaattcaaaccatctcaaagagcaatcatctccgacttcattacctcactcacacacacttctcctacgtccaaaactctccaccaaccatctgttgccacgtggtggaaaaccacagaaaaatactacaaactcgcaacacccagcaaaaactcatcacctctgtctctaactctcgggaaacaaatcatcgacgagtcttgctctctaggaaaatctttaaccgataaaaagattcaaaccctagcttcgaaaggagaccaacgcaacgccatcaacgtcgttttgacttcagctgacgttacggttacaggatttggtatgagtcgttgcgggactcacggacacgctcgtggtttaggtaaacgtggctccaagtttgcttacatttgggttggaaactctgagacacaatgtcctggtcaatgcgcgtggcctttccacgcgccggtgtacggtccacagagtccaccactagtggcaccaaacaatgacgtgggactcgatgggatggttattaacttagctagtcttttagctggaaccgcaacgaacccttttggtaatggttactatcaaggtccacaaaacgcaccgcttgaagctgcttctgcttgtcctggcgtttatggtaaaggagcttatcctggttacgctggagatttgcttgtggatactacaacgggaggtagttttaatgcgtatggtgcaaacggcaggaagtttttgcttcctgctttgtatgatcctacgacgtcggcttgctctactatggtc

SEQ ID NO: 51 - DNA, 1119 bp, Arabidopsis thaliana
atgggataccttttcgaagaaaccttaagctctaaccctaaaaccccaattgttgttgatgatgataacgagttgggtttgatggccgtgagacttgccaatgccgccgcctttccaatggttcttaaagcttccctcgagctcggtgtctttgacactctctacgcggaagcctctcgcactgactcgttcctttcaccctctgagatagcaagtaagctaccaactacaccccgtaaccctggggctccggtcttgttggaccgcatgcttcgtttactcgctagctattccatggtcaagtgtgagaaggtctccgtaggaaagggggagagggtctatcgagctgagccaatttgcaggtttttcttgaagaataacattcaggatattggatcccttgcctctcaagtcattgtcaatttcgacagtgtcttccttaatacctgggcacaactgaaagacgtggtgctagaaggaggagatgcgtttgggcgtgcacatggtggcatgaaactctttgactatatgggtacagatgagagattcagcaagctttttaaccagactggattcacaatcgcggtggtgaagaaggctcttgaagtttaccaaggcttcaaaggtgtgaatgtgttggttgatgtgggaggtggagttggtaacactcttggtgttgttacttctaaatatcccaatattaagggtatcaactttgatctaacttgcgccttggcacaagcaccctcgtatcccggtgtggagcatgttgccggagatatgtttgtggatgtcccaaccggagatgctatgatcttgaaacgtatacttcatgattggaccgacgaagactgtgtgaagattcttaagaattgttggaaatcactaccagagaacggtaaagtggtagtcatagaattagttactcctgatgaggcagagaacggagatatcaacgcaaacattgcctttgacatggacatgttaatgttcactcaatgttctggtggaaaagagagatcaagagctgagtttgaagctttggctgcagcttcttgcttcacccattgcaagtttgtttgccaagcttatcactgctggattattgagttctgtaaa

SEQ ID NO: 52 - DNA, 1119 bp, Arabidopsis thaliana; identical to SEQ ID NO: 51

SEQ ID NO: 53 - DNA, 510 bp, Arabidopsis thaliana
atgcagcagaggaagccgacggcgggtagacccagtggtaccgatggatccgatttctcataccgcatggtcgttgactctcgttacacgaaggtcactaaagaaaaagctcgtctccgtcctttgatctttgttcaggctgcgatttatgtaatcggattatcgtgtgcgtttctaacaacaactaaaaaggatgagaagaacacccttgctattgcagctgctgttgctggcttagtgtgttcattgataggagaattaggttgcagacgtagcagagtaaaccttttgaggctctacacggctgcatcaaccattgttatggttctttctgtgttttgtgctgttaggagcagattaaccatggaggaacgcaatagctctggaacaaccgcgaagcttgagctcgcaggtttcatttgtgctcaattaggagcggtggtgcagatattagcgatcatcgttacagggtcccttgtcaataatatgtctccacctacgaaagcagca

SEQ ID NO: 54 - DNA, 429 bp, Arabidopsis thaliana
atggcgatggctttcaagatggcgacgacggggatgcgtgtgacggatgagtgtacgagttcattcatggacatgaaatggaagaaagttcatagatacatcgttttcaagatcgaagagaagtcacgtaaagtcaccgtcgataaagtcggcggcgccggtgaaagctaccacgatctcgaagattctttaccggtggatgattgtcgctacgctgtctttgatttcgactttgtcaccgtcgataactgccgcaagagcaagatcttcttcattgcatggtcaccggaggcatcaaagataagggcaaagatattgtacgcaacgtcgaaagatgggctgaggagagtgttggaagggattcactatgaacttcaagctactgatccgacggagatgggtttcgatattatccaagaccgtgccaaa

SEQ ID NO: 55 - DNA, 1248 bp, Arabidopsis thaliana
atgtatcagcacatcaaggtgccggcaggcgagaagatcaaggtcaacgccgatctttcgctgaacgtgccggataatccgatcattccctacatcgaaggtgacggcacgggtgtcgatatcaccccggtgatgctgaaagtggtggatgccgccgtggccaaggcgtatggcggcaagcgcaagatctcgtggatggagatctacgcgggcgagaagtcgaccaaggtctatggcccggatgtgtggctgccggaagagaccatggaagtggtcaaggaatacgtggtgtcgatcaagggcccgctgaccacgccggtcggtggtggcatccgctcgctgaacgtggcactgcgtcagcagctcgatctctatgtctgcttgcgcccggtgcgttatttcaaaggcgtgccgtccccggtgcgcgagcccgagaagaccgacatggtgatcttccgcgagaactcggaagacatctatgccggcatcgagtgggaagccgaaagcgaaggcgcgaagaagctgatcgccttcctgcagaacgaaatgggcgtgaagaagatccgcttcccggaaacgtccggcatcggcatcaagcccgtctcgaaggaaggcacgcagcgcctggtgcgcaaggcgctccagtacgcgatcgacaacgacaagccgtcggtgacgctcgtgcacaagggcaacatcatgaagttcaccgaaggcggcttccgcgactggggctatgaactcgcgcagcaggaatttggcgcggaactggtcgatggcggcccgtggtgcaagttcaagaatccgaagactggccgcgatatcgtcgtcaaggacgctatcgccgacgcattcctgcagcagattctgctgcgtccagctgaatattcggtgatcgccacgctgaacctgaacggtgactacatctccgacgccctggccgcccaggtgggtggcatcggcatcgcaccgggcgcgaacatgtccgattcggtcgccatgttcgaagccacgcacggcaccgcgccgaagtatgcaggcaaggactacgtgaatccaggttcggaaatcctctccgcggaaatgatgctgcgccacatgggctggaccgaagcggccgacctgatcatccgctcgatggagaagtcgatccagtcgaagaaggtcacgtacgacttcgcccggctgctagaaggtgcgacgcaggtgtcgtgctcggggtttggtcaggtgatgatcgacaatatg

SEQ ID NO: 56 - DNA, 1080 bp, Arabidopsis thaliana
atggcttcctctatgctctcttccgctactatggttgcctctccggctcaggccactatggtcgctcctttcaacggacttaagtcctccgctgccttcccagccacccgcaaggctaacaacgacattacttccatcacaagcaacggcggaagagttaactgcatgcaggtgtggcctccgattggaaagaagaagtttgagactctctcttaccttcctgaccttaccgattccggtggtcgcgtcaactgcatgcaggccatgggtgaacctaacctcaaccccgcctataccctcgaccaggcgatcgccaatttgcaacaaacagaagatgccagtgcccgttactatgcggcctggtggattggtcgttttcgcgctgctcaaccggaaaccattgctgctttgttggtcgccttggaagatgaaactgatcgctccccggacggtggttatcccctgcggcgtaatgcggctaaagcgttgggaaaattaggcgatcgccaagtggtgccggccctaatcaaagccttggaatgtgaagattactatgtgcgagagtcagcggcccaggcgctggaaggtttgggggatgctagagcgatggcacctctaatggccaagttaacggggggattagcagcggcccagcttgtggagggtaaaccccatttagcccaaccctacgaagcgattattgaagccctgggtactctccaagctgtggagtccattggtttaattgaaccgtttctagagcatttttccccgaaagtccaatacgccgccgccagggccctatttcagttaactggggataaccgttacggcgaccttctcattactgctctgggggggacagacttacaattacgccgttccgccatgatggatttgggagccactggctacttgcccggcgcccaggcgatcgccaaagcctttgcagaaaatagcctcaagttgatcgccctgcgagatttgtgggccacccatcgccaaaggcaagcaagttctgaatcgaaggcgctcagtccagctagccgacaaatattggaattaatggatagtttactc

SEQ ID NO: 57 - DNA, 1080 bp, Arabidopsis thaliana; identical to SEQ ID NO: 56

SEQ ID NO: 58 - DNA, 880 bp, Glycine max
accatgaaaggagaatacgtagagcaacagcaacaacatcctaagagtgaaacaccacctagtatgttctcaaagcttcagcctcagcaccatcctttcccgcaccaccctttccaactctccgccgaggatgccaccaccatcaccccgagcaccgctcagaaggccaactcctccggcggcgacggcgcgaccatcgaggttgttcggcgtcccaggggacgtccgcccgggtccaaaaacaagcccaagccaccggttatcataacccgtgacccggaacccgctatgagtccctacattttagaagtgtctggcggaaacgacgtcgtcgaggccatcgcgcagttcagtcaccgcaagaacatgggaatctgcgtcctcacgggttctggaaccgtcgctaacgtcacgctccgtcaaccttccaccacgcccggcaccaccgttacttttcacggccgtttcgacatcctttctgtttccgccaccttccttccgcagcagtccggcgcttctccggcggttcccaacggattcgccatctcgctcgccggaccgcaggggcagatcgtcggaggacttgttgccggcgggctgatggctgccgggactgtttttgtgatcgctgcctcgttcaacaacccggcataccacaggcttccgccggaggaagagggcgcctccgccggagatggacattcgccgccagtctccggcggcggagacagcgggcatggacaggcggagtcgtgtggaatgtccatgtacagctgtcacttgccctctgatgtgatttgggctccaacggctagaccaccgccgccgccttactaggcgccaggcctggtagtctgattaattaagcgatcgcgggccc

SEQ ID NO: 59 - DNA, 1092 bp, Arabidopsis thaliana
atggggaaaggagggatgtctcaaggagaaggctcaaaggttgaagaagaaaacatggctgcttggttggttggtatcaataccctcaagatccaaccttttcttcttccttccgttggtcctcatgatgtgagagttaggatgaaagctgttggtatttgtggaagtgatgttcattaccttaagaccatgagatgtgcggattttgtggtgaaagagccgatggtgattggacatgaatgtgctgggatcattgaagaagtaggtgaagaagtgaaacatttagtggttggtgaccgtgtagctcttgaacctgggattagttgttggagatgcaatctctgcagggaaggacgatacaacctttgtccagaaatgaagttctttgcaactccaccggttcatggctctttagctaaccaagtggtacaccctgcggacctatgcttcaaattgcctgagaatgtgagtttggaggaaggagcaatgtgtgaaccacttagtgttggtgtccatgcttgtcgccgagctgaggttggtcctgaaacaaacgttttggtaatgggagctggacctattggccttgttacaatgttggctgctcgggctttcagtgtgcctagaattgttattgtggatgttgatgagaaccgtttagccgtagcaaaacagctcggcgcagatgagattgtacaagtgacaacaaacttagaggatgttggttctgaggttgaacagattcagaaagctatggggtcaaacatcgatgtaacattcgactgtgcgggttttaacaaaaccatgtcgacagcattagcagccactcgttgtggcggtaaagtctgtcttgtcggaatgggtcacggtataatgactgtccctctcactcctgcagctgcaagggaggtagatgtggtgggtgtgttcaggtacaagaacacatggccattgtgtcttgagttcctgacaagtggtaagattgatgtaaagccactcataacccacagattcggtttctctcaaaaggaagtggaagatgcctttgaaaccagtgctcgtgggagcaatgccatcaaagttatgttcaatctc

SEQ ID NO: 60 - DNA, 1104 bp, Arabidopsis thaliana
atgaggaagatggtgagagatctcaaggactcttcttctatgattgagcttagagatttccctggtggaccttcgacgtttgaactcaccatgaaattttgctacggcattaatttcgatatcactgcctttaacgtggtctctctccgttgcgctgctggttatcttgagatgactgaggactacaaagaacagaacttgatctttcgagccgagaattacctcgaccagatcgtttttcgcagttttcatgaatctgtcctagtactttgctcctgcgagacgcaagagattgctgaaacatatgaaattcctgaccggtgcgtggaggccatcgccatgaatgcttgcagaaagcagttagtatcaggtttatcagaggagctcaaggggagagattgtctcgagatgtggactgaagaactctctgctctcgggattgattactacgtccaagttgtatctgcgatggcgaggttaagcgtgcggtcagagagtatcgtcgcttctctggtgcattacgctaaaacatcattaaagggtatcatcgatcgaaactgccaggaacagaggaaaatcgttgaagccatggttaaccttttgccgaatgacgaaaaaggatcttactctttatcaattattcctctcggtttcctctttggaatgctcaaggtcggaactataatagatatagagatctcttgcaggctcgagcttgaacgtagaatcgggcatcagttagagaccgcgtctctcgatgatctgcttataccttctgtccaaaacgaagattcaatgtacgatgtggataccgtccacaggatactcacattctttcttgagaggattgaagaggaagatgatgaatgtggttacgattcggattccactggacaacacagttcgttgctgaaagtgggacggatcatggatgcttacttggttgagatcgcaccggatccatacctgagtctacacaagtttacggctattatagagacactacccgaacactcacgtatcgttgacgatgggatctacagagccattgatatgtatctcaaggtaaacaaaaacacaattgaacaaagtctttttatgttt

SEQ ID NO: 61 - DNA, 861 bp, Arabidopsis thaliana
atgtctgaggcattggaagatgttccttcaatgaaaggagggtgtgaagaagaagaagaagggttgaacctgaaggctactgagctgaggcttgggttaccagggtgtgagtcaccagagagggagggtgcgtttaggagtgtggtggtgtctggggccaagaggggtttctctgatgccattgatgaaaactggaatggtggatctgaaaaagatgctgccttgttttctccaaggggtgctgttagtgttagtgctgccaagtctctcactctcactgcaacagactgcaccaaccaaccaactgctttgggtgcttctgttctcaaggaaactgttccacgctctccaaaaccattgcatgagaaaaagccccagatttctgctccagctgctaaggcgcaggttgtgggatggccaccaatccgttcattcaggaagaactcaatggcttctcagcctcaaaagaatgatactgatgcagaagccaagtctggatgcctttatgttaaagtcagcatggaaggcgccccatacttgaggaaagtggatctgaatagttttaccacttacaaggacctctctttggcacttgaaaagatgtttagttgttttacactcagtcaatgtggctcttatggggtttctagtcgagaaaatttaagtgaaagtagattgatggatctccttcatggttcagaatatgttcttacctatgaagacaaggacggagattggatgctagttggtgatgttccgtgggagatgttcactgagtcttgcaagaggctgaggataatgaagagttttgaagcaattgggctagcacctagagccatggaaaagtgcaaaagtcgtaac

SEQ ID NO: 62 - DNA, 357 bp, Arabidopsis thaliana
atgtcaactttcttgataaggatacttcttcctttgcttatcatagcaatgactcttcctcgacgttcagaggcagagtcggaacaatggtgcatagcggatgaacaaacgccagacgatgagttgcaagcagccttagactgggcttgcggaaaaggtggagcagactgcagcaaaatgcagcaggaaaaccagccttgcttcttgcctaacacaatcagagatcatgcctcctttgctttcaacagttactaccaaacttataaaaacaaaggtggttcttgttacttcaaaggagctgccatgatcactgagcttgaccccagccatggttcttgccagtatgagtataacccc

SEQ ID NO: 63 - DNA, 276 bp, Arabidopsis thaliana
atggctttgttcttatctcctaaaaccatcactcttctcttcttctccctctccctcgcactctactgcagcatcgatcctttccacactgcgccatttccgatttccccaatttcgtctctcacgaagttatctctccacgtcccgacgaagttccatgggagagagattcacaaaattcacttcagaaatcaaagattctgttttttaaccaaatccaaggtccagagagcgtcgcctttgattctctcggacgtggtccgtacacggcgttgc

SEQ ID NO: 64 - DNA, 947 bp, Arabidopsis thaliana
ttttttatatggatgttgccgcgatggcgagatgtgtgggaaggtgctacgtttcgccggcgttcggtgagtctgaatcgcaccggttatcggagcggcggtttctgaaattgtctagctccacgaattcggatcccgccggtagtaaaagtttgaagcttcgcgggaaaattcatcggagaatgagctacttccgtccgatcatggcaaaagatgaatccatttcatcgcggtccggtgaaacgaagcaaatcaatggaaagcaaaagaacattgtctggcatgattgtcccgttactaaatccgacaggcaagaattaattaagcaaaagggatgtgtgatttggattactggcttaagtggttcaggtaaaagtagtctggcatgtgctcttagtcgagctttgcacaatcgtggaaagctttcgtatatacttgatggtgacaatgttcgacatggtttaaacagcgatcttagtttcgaagcagatgatcgagctgaaaacattcgaagagttggtgaagtggctaaactgtttgcagattctggtattatctgtattgcaagtttaatatctccttaccggatagaacgagctgcctgccgtgcattattaccacaaggagatttcattgaggtatttatggatgtgccactccatgtttgtgaagctagagatccaaagggcttatacaaacgtgcacgcgctggtaaaatcaaaggttttacaggagtagatgatccatatgaagcgcctttggattgcgagattgtaatacaaaacagtagagacaaggggctttcttcttcatcttcatcttcatcttcaccttcatcttcgtcttcttctctgtgtgaaatggcagatattgttgtgtcgtacttggaccaaaatggatacctgaagaaacactccacaaaatcacgtaattgtatgtaaatgtaa

SEQ ID NO: 65 - DNA, 1611 bp, Arabidopsis thaliana
atgggaatttcaaaaccactccctctattttcgattttagtcctctatttttcactctacaccattacaccaacttcttcattagcctccctccaagatcaattcatcaactgtgtccaaagaaacacacatgtttacttcccacttgagaaaacgttctttgctcctacaaaaaatgtctctatgttcagccaagttcttgaatcgacggctcaaaatctccggttcttgaaaaaatccatgcctaaaccgggattcatattcagccctattcacgagtctcacgtacaagcttccatcatttgttccaagaaactccgaatgcatctccgtgtcagaagcggcggtcacgactacgaaggcttgtcttatgtctctcagatcgataaaccgtttatattgatggatctgtcaaagatgagacaggtcaacattaatattcaagacaacagtgcttgggttcaatctggtgccactgttggtgaactttattacaggattgcggagaagagcaaagtccatgggttcccggcgggtttgtgctcgagcttaggcataggaggacacataacaggcggtgcgtacggttccatgatgcggaaatatggtctaggtgcagacaatgttctagacgcaaagattgttgatgccaacggtaaattactcgatagagccgcgatgggtgaggatacattttgggctattagaggaggcgctggagggagttttgggataattctagcatggaagatcaagcttgttcctgttcctaagaccgtgaccgtctttaccgtcaccaaaacgttacaacaagacgtgggtaacaagattatctcaaagtggcaaagagttgcggacaagcttgttgaagagctattcatcagagtgctcttcaacgtagctggaaccggtgggaacaagactgtgacgacgtcgtacaatgctctgtttcttggcgggaaaggaacgctgatgaacgttatgaagaagagtttccccgagctagggctaacatttaaagattgtatcgaaatgagctggcttgaatccattgcttacatttctggattcccgacccacacgcctactaatgttttgcttcaagggaagtctccgttcccaaaggtcagcttcaaagccaaatcggatttcgtgaaaaccccgattcccgaatccgggcttcaagggatcttcaagaagctacttaaagaagatattccattgatgatatggaatccttacggaggaatgatggcgaaaatccccgaatcccaaatcccttttccgcatcgaaaaggagtcctcttcaaggttcagtacgtaacaagttggctagacagtgacaagagaccgagcagacacatcaactggatcagagatctctatagttacatgacgccttatgtctcaagtaacccacgagaagcttacgtgaactaccgtgatttagacctgggaaggaacacgaaagacgtgaaaacatgcatcaaacaagctcaagtctggggagctaactacttcaaaaacaatttcaacagattgatgatgattaaagcaaaggttgatccagagaacttctttagacacgagcagagcattccacctatgatg

SEQ ID NO: 66 - DNA, 978 bp, Arabidopsis thaliana
atgtctttaaccacagtccctacgctcgccatcagatccggaccatccggtcatcactcgatgccggttcttggttttggaaccgccgcttctccgctaccggaaccaacgatgctgaaagagacggtgattgaggctattaagcttggttatcgccatttcgacacctctccaaggtaccaaacggaggagccgatcggcgaagctttagcggaggcggtttcactcggcttagttcgatctcgatctgaattctttgtcactaccaaactttggtgtgctgatgctcatggtggtctcgtcgtaccggcgatcaaacggagtttgaaaaaccttaaactggactatcttgatctttatataattcattggccggttagctcgaaacctggtaaatacaagtttcctattgatgaagatgattttatgccaatggatttcgaagtagtgtggtctgaaatggaggagtgtcagagacttgggctcgcaaaatgcataggagtaagcaatttttcatgtaagaagcttcaacacatactctctatcgcgacaatcccgcctagcgtcaatcaagttgagatgagtccaatatggcaacaaagaaagctaagggagctttgtagatcgaacgacattgttgtcacagcgtactcggtgttgggatctagaggagctttttggggaactcccaaaattatggaatctgatgttctcaaagaaatagcagaagcaaaggaaaaaacagtggcccaggtgagtatgagatgggcttatgaacaaggagtgagcatggtagtgaagagctttaccaaagagagattagaagagaatctaaagatatttgattggtctttgacagaggatgagacacagagaatttcaactgagattcctcagttcagaaacgtccacggagaggtttatacctctaagaaaggtcccatcaaatctgtcgccgagatgtgggacggggagatc

SEQ ID NO: 67 - DNA, 1140 bp, Arabidopsis thaliana
atgatatgtatcgacaactccgagtggatgcgaaacggagattactctccgtctaggttacaggcgcaaacggaagctgttaatcttctttgcggagccaaaacccagtcgaatccggagaatacggtggggattttgacaatggctggcaaaggagttagagtattgactactcctacctctgatcttggcaaaattctggcctgtatgcacggccttgatgtgggaggagagatcaacttaaccgcagctatccagatcgcccagctagctcttaagcatcgccaaaacaagaatcaacgccaaaggattattgtttttgctggaagtccaatcaagtacgagaagaaggccctagagatagttggaaaaaggctgaagaagaatagtgtctctcttgatattgtcaatttcggggaggatgatgatgaggaaaagcctcagaaactcgaggcgctccttacagctgtgaataacaatgacggtagccacattgttcatgttccttctggagccaatgctctctcagatgtgcttctcagcacacctgtattcacgggtgatgagggtgcaagtggctatgtttctgcggcagctgctgcagcggccgcaggtggggacttcgactttggtgtggacccaaatatcgatccagaacttgctcttgcccttcgggtctccatggaggaggagagagcaagacaagaagctgctgccaagaaggcggccgatgaggcaggtcagaaagacaaagatggggacacagcttccgcctcacaggagacagttgctaggacaactgacaagaacgctgaaccaatggatgaggacagtgcgttgctagatcaggcaattgctatgtctgttggtgatgtgaatatgtcagaagcggctgatgaggaccaggatctggctttagctctgcaaatgtcaatgagtggggaagagtcaagtgaagctacaggtgctggaaacaacctcttgggaaatcaagccttcatatcgtctgttctctcatcgcttcctggggtggatcccaatgatccggcagttaaagaactactagcgtctctgccagacgagtcaaagcgtaccgaggaggaagagagtagtagcaaaaaaggcgaggatgagaagaag

SEQ ID NO: 68 - DNA, 1533 bp, Arabidopsis thaliana
atggagattttgacgagcatagctattacagtagcaacaacgatcttcatcgttttgtgtttcactatctatcttatgatcagaatctttaccgggaaatcaagaaacgacaagagatatgctccagtgcatgccacggtctttgatcttctcttccacagcgacgagttatacgattacgagacagagatcgcgagagagaagccgacttacaggtttttgagtccaggacagagcgagatattaactgcagatcctcgtaacgtggagcatattctcaagacaagattcgataactatagtaaaggacacagtagtagagagaatatggcggatcttctaggacatgggatctttgctgttgatggagagaaatggagacaacagaggaagctttcgagctttgagttctctactagagttttaagagattttagctgctctgtttttaggagaaatgcatctaagcttgttggttttgtctcggagtttgctctctctggaaaagcttttgatgctcaagatttgttgatgagatgtacactggactccatctttaaagttgggtttggtgtggagttaaaatgtttggatgggtttagcaaagaagggcaagagtttatggaagcttttgatgaaggtaacgttgcaactagttccagattcatcgatcctctttggaagctgaaatggtttttcaacattggatcacaatctaagctcaagaagagcattgctactatagataaatttgtctatagtctcattaccactaaaaggaaagagcttgctaaggaacagaacactgttgttagagaggacatactatcgagattcctagtggagagtgagaaagatccggagaacatgaatgataagtacctgagggatataattctgaacttcatgattgctggtaaggacacaaccgctgcactactctcttggttcttgtacatgctctgcaaaaacccacttgttcaggagaaaatcgtacaagaaatcagagatgtgacatttagtcacgagaaaacgaccgatgtaaatggtttcgttgaaagtattaacgaagaggctcttgatgagatgcactacctccatgcagccttgtctgagaccttgaggctctaccctcctgtgcctgtggacatgaggtgtgcagaaaatgatgacgttcttccagatggacatagagtgagcaaaggggataatatctactacatagcctatgcaatgggtaggatgacttacatttggggtcaagatgctgaagaattcaagccagagagatggctcaaggacggcttattccaacccgaatcaccattcaaattcataagctttcatgctggtccaagaatctgtcttggcaaggatttcgcataccggcagatgaagatagtatcaatggcacttcttcacttctttcgcttcaaaatggctgatgagaacagcaaggtgtattacaagagaatgcttactcttcatgtcgatggaggactccatctctgtgcaatcccgaggacaagcact

SEQ ID NO: 69 - DNA, 993 bp, Arabidopsis thaliana
atgacggcaattccaaacgtcgtcgatattgaatcttcttcctcttcgctttgtcaagagacggcaacggagaccgtcaccgttgaaagaggctcgtctgattcatcttcaaagccagacgacgtcgttttactaatcaaggaagaggaggatgacgccgttaacttgtcacttggtttttggaaattgcacgagataggtttaataacaccgttcttgagaaagacgtttgagatcgtcgatgacaaagtaacagacccggttgtatcatggagcccgacccgtaaaagctttatcatttgggattcttacgagttctcagagaatctacttcccaaatacttcaagcacaagaacttctccagttttattcgtcagcttaactcttacggttttaaaaaggtcgattcagataggtgggaatttgctaacgaagggtttcaaggagggaagaaacatttgcttaagaacatcaagaggagaagcaaaaacactaaatgttgtaacaaggaagcgagtaccaccacgacagagactgaggttgagtcattgaaggaggaacagagtccaatgagattggagatgttgaagctgaaacaacaacaagaagaatctcaacatcagatggtcactgtgcaggagaagatccacggagttgataccgaacaacagcatatgcttagtttctttgcaaagttggctaaagatcaaagatttgtagagagactggtgaagaagagaaagatgaaaatacagagagagctagaagcagctgaattcgtgaagaagctcaagttgcttcaggatcaagaaactcaaaagaacttgttagatgtagaaagagaatttatggccatggctgcaacagaacacaatcccgagcctgacattttggtgaacaatcaaagcgggaatacgagatgtcagcttaactcagaggacctacttgttgacggtggctcaatggatgtaaatgggaggatagagatagag

SEQ ID NO: 70 - DNA, 894 bp, Arabidopsis thaliana
atgacggaagagtttgagatcgcaggaatctccaccggagcttggtggagctcgccaacaaacaccgccgcagtattctctggctactcgctgccatgttccactgagattagccctgatgtcacaaatttcggatggcaaaacttcgataacaagattaacgatcataatgatggttgtatgaacatgcataatagtttcttcgaaggactattaatcgatcctaacgatcaattactaccggatccatggtccaaaagtacaattcctaacgctaaatctgagctccttgaaaacttcccattcttagataacatgttcttggtcgattcagaagctgaatctttgttggatcatgaaatcagaaaccataagtcgtctaaggagcaaattacacaagactacaggaatcttacttcaaagaggagtgaagaattagaagagaacagcgatgagtattcaccgcgattactaaaaagaccgagactcgagacactatctccattgccaagcttcaaagttcgtaaagaaaaactcggagatagaatcactgcgcttcagcaactggtttctccatttggcaagacagatacagcttctgttctcaacgaagctgtagagtacataaagtttcttcaagaacaagtcactgtattgagtaatccagaacagaacaccataggatctgttcaacaacagcagtgttcaaacaagaaatctatcaatactcaaggagaagtagaagaagacgaatgtagtccaagaagatatgtagatctttcgagccgtggactatgtctaatgccgatctcagcttcatatcccgtggctgcagctgcggcttcggctgcagagatgaacgtacatctggtttctggcatcttccattctttg

SEQ ID NO: 71 - DNA, 906 bp, Arabidopsis thaliana
atgtcatcaagtggaaccatttggagctatgaggaagaaaaagcatttgagaatgccatagctatgcattggattgaggaatcctcaaaagagcaatgggagaaaattgcttcagcagttcccagcaaaagcatggaagatgtgaagcaacattaccaggttctagtagaggatgtaagtgcaatagaggcaggtcacatatcattcccaaactatgctgcttctgaggaaatcacatcttcaaataaggactttcatggctcttccaaggccacaagctcagataaaagatcaaattgtaattatggacgtggtttttctgggttaggacatgactccaccactcatagtagtggtaaaggaggcttgtcaaggtcatcagaacaagaaagaagaaaaggaatcccatggactgaagaggaacacaggttatttttacttggtctagagaagtttggaaaaggagattggagaagcatttcaaggaactttgtgatatctaggactcccactcaagtggcaagccatgcacaaaagtacttcataaggttgaattcaatgaatagagacaggaggaggtctagtatccatgatatcactagtgtgaacaatggagatgtggctaataaccaagcacctattacagggcagcatagtagcacaattccttcaaacacaatgggtgtaggacaatcccttaagcatagagttcagggtcacataccacctggtttaggcatgtatggaacaccagttggacatcctgtggctgctcctccagggcacatggcatctgcagttggcactcctgtcatgcttcctcctggaccccacccccatgctcatcctcatccaccttatgttcttcctcttgcttacccaatggcacctccaacaatgcatcaa

SEQ ID NO: 72 - DNA, 510 bp, Glycine max
atggctagcgatggcagcgaagagttcaggctagtgtcaccggcgttcaaaaacggggggaagttaccgaggcactacaccgacgatggtcagggtacgaagaagaacatatcccctccattggagtggtataacctcccggaggggacgaagactcttgccctcgtggtggaggatattgatgcgaccgattctggtgggcccatggtgccatggactcactgggtcgtcgcaaacatcttggccacggtgaagggcttgccggagggattttccggcaagtcggccgagatggggggcgactacgcggcgatcaaggaggggaacaatgacctgaaggtgcctgggtggaatgggcccaggctgcccacgcctggacacaggattcagtttaggctctatgctttggatgatgagctcaagcttggtaacaagttgacgaaggagaagttgttggaagataccattgaaggacatgtgttaggagaagcgaccttgatggctatattc

SEQ ID NO: 73 - DNA, 1260 bp, Arabidopsis thaliana
atggcgaacgtaatctcaatttcccattttacccttctcgcattaccttatttacttctcctcctatcttccaccgccgccgcaattaacgtcaccgccgtcctctcctctttccctaatctctcatctttctcaaacctcctcgtctcttccggcatcgctgccgaactctccggtagaaactcattaaccctcctcgccgttcccaattctcaattctcctccgcctccttggacctcacgcgccgcctacctccttccgccctagcagatctcctccgcttccatgtcctcctccagttcctttcagattccgatctccgacgtattccaccgtcaggctccgccgtcactactctctacgaagcttccggtcgtacattctttggatctggatccgttaacgtaacccgtgacccggcttcaggatccgtcacgatcggatctccagccaccaaaaacgtcactgtgttaaagcttctcgagaccaaacctcccaacataaccgtcctcaccgtggactccctcatcgtccccaccggaatcgatatcaccgcatcggagactctcactccaccgccgacgtcaacatctctctcccctccaccggcgggaatcaatctcactcagatactaatcaacggacacaacttcaacgtcgctctatccctcctcgtcgcttccggtgtcataacagaattcgaaaacgacgaacgtggcgccggcatcacagtcttcgtccccaccgactccgccttctccgatctcccttccaacgttaacctccagtcattaccggcggagcaaaaagcattcgtgttaaaattccacgtgctacattcatactacactctcggttcactagaatcaataaccaacccggttcaaccgacattagccactgaagaaatgggagccggttcatacactctcaacatctcccgggttaacgggtcaatcgtaacgatcaattcgggtgtggttttagctgttgtgactcaaacggcttttgatcaaaacccggtttctgttttcggagtatccaaagttcttttgcctaaagaactatttccaaaatcgggtcaacccgttgccacagctcctccacaggagatttctttgtcgccggagagttctagtgaacagccgtcacgactagtatcaccaccgcgtgagatagtttcttccggcgcggttaaaagaccacttggtttcttggtcttgtggtgttggtgtatagcattttgttatgttttggta

SEQ ID NO: 74 - DNA, 1647 bp, Zea mays
atggctcggagggccgcgtcctcgctcgtctcccgctgcctcctggcgagggcccctgccggcgcgccgcccgctgccccctctgcgctgcgcaggacagtgcctgcagatgggatgcacaggctgttgccaggtgtccttcagaggttcagcactgcagcagcagtagaggagcccatcacgccgtcagtccatgtgaactacacaaagctcctcattaatggcaactttgttgattccgcatccggcaagaccttcccaactctggaccctcgtacaggggaggtgattgctcatgtggctgagggtgacgcagaggacattaaccgtgcagtagctgcggctcgcaaggcttttgatgaagggccatggccgaagatgactgcctatgagaggtcccgtatcctactgcggtttgctgatttgatagagaagcacaatgacgagcttgctgctttggagacatgggacaacgggaagccatatgagcaagcagcccagattgaagtacccatggtggcccgtcttatgcgttactatgctggttgggctgataagatccatgggctcattgtgccggctgatggcccacaccatgtacagatcttgcatgagcccattggagttgcaggtcagatcatcccatggaactttcctcttctgatgtttgcctggaaagttggccctgctttggcatgtggaaatactctcgtgctcaagactgctgaacaaacccctctatcggctttgtatatctccaaattgttgcatgaggctggactgcctgagggtgttgtgaacgtcgtttctggttttggccctactgctggtgctgctcttgctagtcacatggatgttgataagatcgcatttactggatctaccgatactggaaaaattattctcgagttggctgcaaagagcaaccttaagacagtgacactggagttaggaggcaagtcccctttcatcataatggacgatgctgatgttgaccatgctgttgagcttgcgcactttgccctgttctttaaccagggacaatgctgctgcgctggatctcgcacgtttgtacatgagcgtgtttatgatgagtttgtggagaaggccaaggctcgtgcattgaagcgcgtcgttggtgatccgttcaggaaaggtgttgaacagggcccgcagattgacgacgagcaattcaacaagatcttgcgctacattaggtatggtgttgacggtggagctacccttgtgacgggtggtgataggttgggtgacaagggtttctacatccagccaacgattttctcagatgtccaggacggcatgaagattgctcaggaggagatatttgggcctgtgcagtcgatcctcaagttcaaagacctcaatgaggttatcaagagggcaaacgcgagccagtatggattggccgccggcgtgttcaccaacagcctggacacggccaacaccctgacgcgcgcgctcagggccgggaccgtctgggtgaactgcttcgacgtcttcgatgctgcgattccgtttggtgggtacaagatgagcggcatcgggagggagaagggcgttgacagcctgaagaactacctgcaggtgaaggcggtcgtcaccccaatcaagaacgccgcgtggttg

SEQ ID NO: 75 - DNA, 1647 bp, Oryza sativa
atggctgccgctgctgcaaggaggggctcatcgctgctctctcgctgcctgctgtccaggcccgccgccgccgcctcgcctgctgtcccctctgcgctccgcagggcagatgggacacaaggattgttgccgggaatccttcagaggttcagcactgcagcagtagcagaggagcccatatcacccccagtccaagtgaactacactcagctcctcattgatggaaaattcgttgattcagcatctggcaaaactttcccaactctggaccctcgtaccggggagctgattgcccatgtggctgaaggcgatgcggaggatattaaccgtgcggttcatgcggcccgcaaggctttcgatgaagggccatggccaaagatgactgcctatgagagatcccggattctgttgcggtttgctgacttgattgagaagcacaacgatgaaattgctgcattggagacatgggacaacggcaagccgtatgcgcaagctgccaacattgaagtgccaatggtggcacggctgatgcggtactatgctggttgggctgacaagatccatgggcttgtcgtgccggctgacggcccacaccatgtacaggtgctgcacgagcccattggtgtcgcaggtcagatcatcccatggaactttccgcttctgatgtttgcgtggaaagttggccctgctttggcttgtggaaacactgttgtgctcaagacggctgagcaaactcctctgtctgctctatttgcttctaagctgttgcatgaggctggactcccagacggtgttgttaacgtggtatctggttttggacctactgctggtgctgctcttgctagtcacatggatgtcgataagattgcattcactggatcgaccgatactggaaaagtcgtccttgagttggctgcaaggagcaaccttaagtcagtgacactggagctaggaggcaagtctcctttcatcatcatggatgatgctgatgttgaccatgctgttgagcttgcgcattttgcactgttctttaaccagggacaatgttgctgtgctgggtctcgtacatttgtgcatgagcgtatctatgatgagttcgtggagaaggccaaggctcgtgctctcaagcgtgtggttggtgatccattcaagaatggtgttgaacagggccctcagattgatgacgagcaattcaacaagatcttgcgctacatcaagtatggtgttgacagtggagccaaccttgtgactggtggcgacagattaggtgacaaaggttactacatccagccaacaattttctcggatgtacaggataacatgaggattgctcaagaagagatatttggccctgtgcagtccattctgaagttcaatgatctgaacgaggtcatcaagagggcaaatgcaagccagtacgggctggctgctggggtcttcaccaacaacctgaacacggccaacaccctgacccgcgcgctcagggtcgggaccgtgtgggtgaactgcttcgacgtcttcgacgccgcgatcccgttcggcggatacaagcagagcggcatcgggagggagaagggcatcgacagcctgaagaactacctgcaggtcaaggccgtcgtcacgccgatcaagaacgccgcgtggttg

SEQ ID NO: 76 - DNA, 165 bp, Oryza sativa
atggcgggaacggcgaactgcatcgacatcctcatcgccatcatcctcccgcccctcggcgtcttcctcaagttcggatgcgggcatgagttctggatctgcctgttgctcaccttcctcggctacatccccggcatcatctacgccatctacgccatcaccaag

SEQ ID NO: 77 - DNA, 165 bp, Saccharomyces cerevisiae
atggattctgccaagatcattaacattatattatcccttttcttaccaccagtcgccgtttttctagcccgtgggtggggtactgactgtatagtggatatcattttgaccattttggcttggttcccaggtatgctatatgccttgtacattgtcctacaagat

SEQ ID NO: 78 - DNA, 1218 bp, Arabidopsis thaliana
atggatccttcatttaggttcattaaagaggagtttcctgctggattcagtgattctccatcaccaccatcttcttcttcatacctttattcatcttccatggctgaagcagccataaatgatccaacaacattgagctatccacaaccattagaaggtctccatgaatcagggccacctccatttttgacaaagacatatgacttggtggaagattcaagaaccaatcatgtcgtgtcttggagcaaatccaataacagcttcattgtctgggatccacaggccttttctgtaactctccttcccagattcttcaagcacaataacttctccagttttgtccgccagctcaacacatatggtttcagaaaggtgaatccggatcggtgggagtttgcaaacgaagggtttcttagagggcaaaagcatctcctcaagaacataaggagaagaaaaacaagtaataatagtaatcaaatgcaacaacctcaaagttctgaacaacaatctctagacaatttttgcatagaagtgggtaggtacggtctagatggagagatggacagcctaaggcgagacaagcaagtgttgatgatggagctagtgagactaagacagcaacaacaaagcaccaaaatgtatctcacattgattgaagagaagctcaagaagaccgagtcaaaacaaaaacaaatgatgagcttccttgcccgcgcaatgcagaatccagattttattcagcagctagtagagcagaaggaaaagaggaaagagatcgaagaggcgatcagcaagaagagacaaagaccgatcgatcaaggaaaaagaaatgtggaagattatggtgatgaaagtggttatgggaatgatgttgcagcctcatcctcagcattgattggtatgagtcaggaatatacatatggaaacatgtctgaattcgagatgtcggagttggacaaacttgctatgcacattcaaggacttggagataattccagtgctagggaagaagtcttgaatgtggaaaaaggaaatgatgaggaagaagtagaagatcaacaacaagggtaccataaggagaacaatgagatttatggtgaaggtttttgggaagatttgttaaatgaaggtcaaaattttgattttgaaggagatcaagaaaatgttgatgtgttaattcagcaacttggttatttgggttctagttcacacactaat

SEQ ID NO: 79 - DNA, 530 bp, Arabidopsis thaliana
ggcgtgcgggcgcgccaccatggatttaggaaggtttccaataatctcaatcctcgaagacatgcttgaagtccccgaagaccacaacaacgagaagacccgcaacaacccttcacgagtttacatgcgagacgctaaggcaatggctgctacacctgctgacgtcatcgagcaccctaacgcatatgcattcgtcgtggacatgcctggaatcaaaggagatgagatcaaggttcaggtcgagaacgacaatgtgcttgtggtgagtggagagaggcagagagagaacaaagaaaacgaaggtgtgaagtatgtgaggatggagagaagaatgggtaagttcatgaggaagtttcagttgcctgaaaatgcagatttggacaagatctctgctgtttgtcatgacggtgtgttgaaggttactgttcagaaacttcctcctccggaaccaaagaaaccaaagacaattcaagttcaagttgcttaggcgccaggcctggtagtctgattaattaagcgatcgcgggccc

SEQ ID NO: 80 - DNA, 492 bp, Zea mays
atggccgacgacggcgggagccacgagggcagcggcggcggcggaggcgtccgggagcaggaccggttcccgcccatcgccaacatcagccggatcatgaagaaggccgtcccggccaacggcaagatcgccaaggacgctaaggagaccctgcaggagtgcgtctccgagttcatatcattcgtgaccagcgaggccagcgacaaatgccagaaggagaaacgaaagacaatcaacggggacgatttgctctgggcgatggccactttaggattcgaggagtacgtcgagcctctcaagatttacctacaaaagtacaaagagatggagggtgatagcaagctgtctacaaaggctggcgagggctctgtaaagaaggatgcaattagtccccatggtggcaccagtagctcaagtaatcagttggttcagcatggagtctacaaccaagggatgggctatatgcagccacagtaccacaatggggaaacc

SEQ ID NO: 81 - DNA, 840 bp, Zea mays
atggactccagcagcttcgtccctgccgccggcgcggagaatggctcggcggcgggcggcgccaacaatggccgcgttgctcagcagcaggcgccggcgatccgcgagcaggaccggctgatgccgatcgcgaacgtgatccgcatcatgcggcgcgtgctgccggcgcacgccaagatctcggacgacgccaaggagacgatccaggagtgcgtgtcggagtacatcagcttcatcacgggggaggccaacgagcggtgccagcgggagcagcgcaagaccatcaccgccgaggacgtgctgtgggccatgagccgcctcggcttcgacgactacgtcgagccgctcggcgcctacctccaccgctaccgcgagttcgagggcgacgcgcgcggcgtcgggctcgtcccgggggccgccccatcgcgcggcggcgaccaccacccgcacccccactccatgtcgccagcggcgatgctcaagtcccgcgggcccgtctccggagccgccatgctaccgcaccaccaccaacaccaccacgacatgcagatgcacggcgccatgtacgggggaacggccgtgcccccgccggccgggcctcctcaccacggcgggttcctcatgccacacccacagggtagtagccactacctgccttacgcgtacgagcccacgtacggcggtgagcacgccatggctgcatactatggaggcgccgcgtacgcgcccggcaacggcgggagcggcgacggcagtggcagtggcggtggtggcgggagcgcgtcgcacacaccgcagggcagcggcggcttggagcacccgcacccgttcgcgtacaag

SEQ ID NO: 82 - DNA, 672 bp, Oryza sativa
atgccggattcggacaacgagtcaggggggccgagcaacgcgggggagtacgcgtcggcgagggagcaggacaggttcctgccgatcgcgaacgtgagcaggatcatgaagagggcgctcccggcgaacgccaagatcagcaaggacgccaaggagacggtgcaggagtgcgtctcggagttcatctccttcatcaccggcgaggcctccgacaagtgccagcgggagaagcgcaagaccatcaacggcgacgacctcctctgggcgatgaccacgctcggcttcgaggactacatcgacccgctcaagctctacctccacaagttccgcgagctcgagggcgagaaggccatcggcgccgccggcagcggcggcggtggcgccgcctcctccggcggctccggctccggctccggctcgcaccaccaccaggatgcttcccggaacaatggcggatacggcatgtacggcggcggcggcggcatgatcatgatgatgggacagcctatgtacggctcgccgccggcgtcgtcagctgggtacgcgcagccgccgccgccccaccaccaccaccaccagatggtgatgggagggaaaggtgcgtatggccatggcggcggcggcggcggcgggccctccccgtcgtcgggatacggccggcaagacaggcta

SEQ ID NO: 83 - DNA, 531 bp, Oryza sativa
atggccgaccaccatggcggccaccacgccgacgggcatcgccggcagcagcagctgcagggggaggcggcggatcaggcggcggcggagatcatcaaggagcaggacaggttgctgccaatcgcgaacgtggggcgaatcatgaagcagatcctcccccccaacgccaagatctccaaggaggccaaggagacgatgcaggagtgcgtctcggagttcatcagcttcgtcaccggcgaggcctccgacaagtgccacaaggagaagcgcaagacggtcaacggcgacgacgtctgctgggccttcggcgccctcggcttcgacgactacgtcgaccccatgcgcaggtacctcaacaagtaccgcgagctcgagggcgaccgcgctgccgccgccgccacctcccgctccggcgccggcgccgccgcgggccccgaccacccttcctcctcctcctccgccgccgccgccaccgccggtcatttcatgttcaacgccatggacaggtcgacggatagctccaggcagttc

SEQ ID NO: 84 - DNA, 279 bp, Oryza sativa
atggcgtccttcgctcgccgtgccatgagcttagctcagatcccatctgctcgtatttcctctggagccgcttctattggtcagcgtcgttgcctcgccggcgccgctgatcaccatggatctaccaaggttgacttctggaaacagcccacgaacccaggaaactggaaagaggagcattttgtgcttatttctctgtctggctggggcttacttttctacagtggatacaagctcgccactgggggaaaaaaagagacgcctgtggagagtacacaa

SEQ ID NO: 85 - DNA, 429 bp, Oryza sativa
atgtcggaggggttcgacgggacggagaacggcggcggcggcggcggaggcggagtagggaaggagcaggaccggttcctgccgatcgccaacatcggccgcatcatgcgccgggccgtgccggagaacggcaagatcgccaaggactccaaggagtccgtccaggagtgcgtctccgagttcatcagcttcatcaccagcgaagcaagcgacaagtgcctcaaggagaagcgcaagaccatcaatggggacgacctgatctggtcaatgggcacgctcggattcgaggactatgtcgagcctctcaagctctacctcaggctctaccgggagacggagggtgacacaaagggttcaagagcttctgaactgccagtaaagaaagatgttgtacttaatggagatcctggatcatcgtttgaaggcatg

SEQ ID NO: 86 - DNA, 888 bp, Oryza sativa
atggatccgatggatatcgtggggaagtccaaggaggacgtctccctccccaaatcaacaatgtttaagattataaaggagatgttgccccctgatgttcgagtggcaagagatgcacaagatcttcttgtggaatgctgtgtagagttcatcaacctcctatcttctgaatccaatgaagtttgcagccgagaggacaagaaaactattgctcctgagcatgttcttagagctctgcaggatcttggctttagggagtacattgaagaggttcaagcggcctacgaacaccataagcatgataccctggattctccaaaagcaagcaaattcactggtgtggagatgacagaggaacaagctgtagctgagcaacagaggatgtttgctgaggcccgagcaaggatgaacaatggtgccgccaaaccgaaggagccagaacctgaagcgcagcaacaaacacaacagccaccacagcctcagctgcaccctcaaccacagcaacccctgcagcctcaacttcagctccatcctcaaccacaacaacagccctcacagctacatcctcaacagctgctgcatcctcaatcgcagcaaactccgcagcctcaacctcaggtccaccctcaaccacagcagcctccacagctgcaaccgcaacctcagcttctccagcaaccgcagctgccccaacagctgcagccgcaatctcagctccccccacaaccgcagcagcccccacagctgcagctgcaatctcagctccacccacaaccgcagcagcccccacagctgcagccgcaacctcagctccatcagcaaccgcagccgcaggcagagctgcaatcacagtcacaaccacaaacagaacatggcttggacagttca

SEQ ID NO: 87 - DNA, 762 bp, Zea mays
atgaggaagaagctcggcacccggttccccgcggctcgaatcaaaaagataatgcaagcagatgaggatgttggaaagattgcactagcagttcctgttttagtttcgaggtctcttgaattgtttttacaagatttaattgaccgtacttatgaaattactcttcaaagtggagcaaagacactgaattccttccacctgaagcaatgtgtgaagaggtacagttcttttgatttcctaactgaagttgtcagcaaggtaccagatcttggtggcgctgattcctgtggagatgaaagaggattacctagaagaagaaagtcaaatggcagtgacccagagaatgatgaatcaagatctagtaaaatggccataagaaatgcaaacatcagccccagaggacgtgggaggggtcgaggcagaggacgaggtcggccaccaaccaagagaaaggaggttggttatgtacaatttgaagatgagagcagcatgtttgctgaacaaggtgagcccttgccaggagaggaaacagttcaagagatcaatggcaacgagaccatgcctcaaagcacgcaacctccagtagaggctccgccaacagcccttgcacaagctacaacaagttctaaggcggaagaagcgaacagtgatcatcagtcagattggcctatgccagatgccattggaagcatcggtgtcgtgccatctggttttggacatctgacagtgcaggttgaagatgaggactacgacaatgaggat

SEQ ID NO: 88 - DNA, 1053 bp, Arabidopsis thaliana
atgtcgccggagatggaattcgtgaaggttttgggaaagggtacttacggctccgtcgagctcttcagccacaaacaaaacgacggatcgttgctctacaacgcagtgaagatcatggactctgagaactacggttctatagaccaagagtttcgaattctgtcggaactcagaggatgtccttgtatcgtgcaattgtgtgggaactctcttgttcaaggaattgattgcaatggaaaaaaagtttacatgatgtcaatggagtatgcagctgctggtactctaactaatttcatcaaaagaaaccgaacgaagttgtcggattctgttattaaagacttcactcgtatgattctacaaggattggtctcgattcataatcatggttatgttcattgtgatcttaaaccggacaatatccttctttttcctctttacgataaagatacgtggaattgttcttacgagttgaagatttcggatttcggaatatcgacaagggccggagacaaatctggttgttggagagtcgatgaaccgtgggtgggaacgtctatctacatgtctcctgagtcagtcagcgacggcaccaccgttgagaaaaccctagatttgtggtcacttggttgcattgtgttgaagatgtataccggtaagcggccatggttagggtttgagaaagatgttaagtctcttcttttgaatcaaaaggcaccagagattccagagactctgccgtgtgatgcaaggctgtttttggagaagtgtttctcaagaaaacctgaggagagaggatcagcttcggagttgctgttgcatccgtttttgaccggagatgagaagaagggttcttccgtcgccggtggagagaggacggggatggtgttgaggctcagaaaacctccgccgatatcgaaagatattccaacgaagccacggaaattgaaggttatttcacaaaagccccaacagttaaagaaagtctcgaataaacccctaaaggtgaagattgttcctccgagacccccaagatccgattttgtccccgttcta

SEQ ID NO: 89 - DNA, 1053 bp, Arabidopsis thaliana; identical to SEQ ID NO: 88

SEQ ID NO: 90 - DNA, 1032 bp, Arabidopsis thaliana
atggcaaccatttccttctctcacaaccaccaatcctccgacaaccgccgtggtggatcccatcaccaccgtcacggccccgtcgtggaagagatcgaaggactcatcaaagttttcaacgacggctgcgtcgaaagacctcccatagttcccatcgtctcaccaaccattcacccatcttctaaagccacagcctttgacatcaaactatccaacgacacatggacacgtgtctacatccccgatgccgcagcagcctcgccgtccgttactctccctctcctcgtttacttccacggcggtggtttctgcgttggctccgccgcttggagttgctaccatgacttcttgaccagccttgccgttaaagcccgttgcgtcatcgtttccgtaaactaccgtttagcccctgaacaccgtctcccggcggcgtacgacgacggcgttaatgtcgtctcgtggctagtcaagcaacaaatatctaccggtggtggatatccttcttggttgagtaaatgtaacctctcaaacgttttcttggccggagatagcgccggagccaacatagcttaccaagtcgccgtaagaatcatggccagtggcaaatacgcaaacactctacacctcaagggcattattctcatccaccctttcttcggcggcgaatcaagaacgtcttcggagaaacaacaacatcacaccaagtcatcggcgcttactctttcagcttccgacgcatattggcgtctagctctgccacgtggagcgagtagagaccatccatggtgtaaccctctgatgagctcggcgggagcgaagttaccgacgacgatggtgttcatggcggagtttgatatactaaaagaacgaaacttggagatgtgtaaagtgatgagaagccatgggaagagagttgaaggtatagttcatggaggtgttggtcacgcttttcatattctcgacaactcgtcggtgtcacgtgatcgaatccacgacatgatgtgtcgtcttcacaacttcatacatccatca

SEQ ID NO: 91 - DNA, 279 bp, Arabidopsis thaliana; identical to SEQ ID NO: 84

SEQ ID NO: 92 - DNA, 882 bp, Arabidopsis thaliana
atggcgatccctacggagacacaacaccaggagaaggaggcttcagatgcttctgcagcagctgcacaaaagagatggactttaagcgatttcgacatcggtaagcctcttggcagaggcaaattcggtcacgtctatctcgccagagaaaaacggagcaatcacgttgtcgctctaaaggttcttttcaagagccagcttcaacaatcccaagttgaacatcagctcagaagagaagttgagattcagtctcatcttcgtcaccccaacatactccggctttatggctatttctatgatcaaaaaagagtttatttgatacttgagtatgctgctagaggcgaactttacaaggatcttcagaaatgcaaatacttcagcgaaagacgagctgctacttatgttgcctcattggcgagggctctcatctattgccatggcaagcatgtgatacacagagatattaaaccagagaatctgctaattggtgctcagggtgagctcaagattgcagactttggttggtcggtacacacatttaaccgaagaaggaccatgtgtggcacactagattaccttcctcctgagatggtcgaaagcgtagaacatgatgctagtgtagatatctggagccttgggattctctgttacgagtttctttatggtgtacctccttttgaagccatggagcactcagacacatacagaaggattgtgcaagtggatctcaagttccctcccaaaccaataatctctgcatctgcaaaggatcttattagccagatgcttgtcaaggagtcttcgcaacgtctgccattgcacaagcttctggagcatccgtggatcgtgcaaaacgctgatccttctggaatctacagagtt

SEQ ID NO: 93 - DNA, 882 bp, Arabidopsis thaliana; identical to SEQ ID NO: 92

SEQ ID NO: 94 - DNA, 1239 bp, Arabidopsis thaliana
atgggtctttgttggggatctccatctgattctcctccaacaacaacaccttcctctactggtaacatcagttcagggacttttaagtcatcaaacaacacgacgactacaggaacatcaaggggaagtaacatatctagcaatagtgggttctctgtggcaagtggtgaagatgcttaccccgatggtcagatacttcccattccgaatttgaggatattcagcttagcagaacttagagcttcaacaaggaatttcaggtctgagaatgttcttggagagggaggatttgggaaagtctttaaaggctggcttgaagacaagactccagggaaacaaagcaacggaactgtgattgctgttaagaaactgaatgcagaaagcttccaaggattcgaagaatggcaatgtgaagtgaattttcttgggagggtttctcatccaaacctcgtgaagctgttgggatactgcttggaaggtgaagagttgcttcttgtgtatgagtatatgcaaaaagggagcttagagaatcatctcttccgaaaggggtctgccgttcagccactctcatgggagataaggcttaagattgcaataggagcagctaaaggcttagcattcttacacgcttcagagaagcaagtaatttatcgagacttcaaagcgtcaaacattctacttgatgggtcatataacgcaaagatatcagattttggattggcgaaattaggaccttccgctagtcaatctcacatcacaacacgggttatgggtacacacggttacgcagctccagagtatgttgctacaggtcacttgtatgtaaagagcgatgtttacgggtttggcgttgttttggctgagatcttaactggtttacatgcgcttgatcctactcgtcctaccgggcaacacaatctaaccgaatggatcaaacctcatctatccgaaagaagaaagctaagaagcataatggaccctcgtctagaaggaaaataccctttcaaatctgctttccgagtagctcaactggctctgaaatgccttggacccgaacccaaaaaccgtccatcgatgaaagaagtggtggaatcgctcgaactcatcgaagctgccaatgagaaaccgttagaacgaaggaccactagagcttccccatccatccgtcaacaacaaggccattatcgcccgcaacaactctcttcgtttcgtcctagacaaaacgtgtctcgagctcac

SEQ ID NO: 95 - DNA, 1239 bp, Arabidopsis thaliana; identical to SEQ ID NO: 94

SEQ ID NO: 96 - DNA, 540 bp, Arabidopsis thaliana
atggcttcttctctcatcttcctcctcctcgttaccctaaccttttcagcatcaaccctaatctcagccaaatccaacacaacaacaataatcgaatcaacttgcaaaaccacaaactactacaaattctgcgtctcagctctcaaatccgacccaagaagtcccacagccgacacaaaaggtctcgcctccattatggtcggcgttggtatgacaaacgccacctccaccgcaaattacatcgctggaaacctatccgccaccgtaaaagacaccgttctcaaaaaggtcttacaagattgctccgagaagtatgctctcgccgctgattctctccggctgacgattcaagatcttgatgatgaagcttatgactatgcctccatgcatgtgttggcggcgcaggattatcctaatgtttgccggaatatttttaggcgggttaaagggttggcttatccggtggagattcgccggcgtgaagctagtctgagacgtatttgtggtgttgtctccgggattcttgatcgccttgttgaa

SEQ ID NO: 97 - DNA, 540 bp, Arabidopsis thaliana; identical to SEQ ID NO: 96

SEQ ID NO: 98 - DNA, 933 bp, Saccharomyces cerevisiae
atgctacgtataactgtcaaaactttgcagcagcgggcatccttccatcatagcttcaaacatattagcgttcctgatcttcatacccgtgctcaaaatgatcaaacaaactgttattgccaagaaataaacgcaaggctgccttcaaaaactgatccattagatcctcatatcaagcttcctcatagaacgcccaattacaataagcatgttttgctgttatcaccgggtgataggtttgctcaaccatggaaggtagcatggaatcataatttggatactaatacaaatcggccatataatgccattagtaaattgcgctcccatttaggtggttctccaggaatactaataaatgcggtgcatttgcaaaatgaatttattccaaggccaaaacaacacgatgaatggctttatttttttgttattcctgacatgaagctttatgtaattaaggaaacggacatcgaggaatttgcatcttttttagatgaaggagctattcaagcaccaaagctatccttccaggattatttaagcggtaaggccaaggcttcccaacaggttcatgaagtgcatcatagaaagcttacaaggtttcagggtgaaacttttctaagagattggaacttagtctgtgggcattataagagggatgctaagtgtggagaaatgggacccgacataattgcagcatttcaagatgaaaagctttttcctgagaataatctagccttaatttctcatattgggggtcatatttttgctggtaatgtcattttctataaactattcggcagagaaaagatgcaaaacaagctggattcattatggtttggtaaagtttacccacacaacttgaagctgttatgtgaaaacttggaaaacggtaaaatcatcgacgaaatgtacagaggtggcatatcgatgaat

SEQ ID NO: 99 - DNA, 933 bp, Saccharomyces cerevisiae
atgctacgtataactgtcaaaactttgcagcagcgggcatccttccatcatagcttcaaacatattagcgttcctgatcttcatacccgtgctcaaaatgatcaaacaaactgttattgccaagaaataaacgcaaggctgccttcaaaaactgatccattagatcctcatatcaagcttcctcatagaacgcccaattacaataagcatgttttgctgttatcaccgggtgataggtttgctcaaccatggaaggtagcatggaatcataatttggatactaatacaaatcggccatataatgccattagtaaattgcgctcccatttaggtggttctccaggaatactaataaatgcggtgcatttgcaaaatgaatttattccaaggccaaaacaacacgatgaatggctttatttttttgttattcctgacatgaagctttatgtaattaaggaaacggacatcgaggaatttgcatcttttttagatgaaggagctattcaagcaccaaagctatccttccaggattatttaagcggtaaggccaaggcttcccaacaggttcatgaagtgcatcatagaaagcttacaaggtttcagggtgaaacttttctaagagattggaacttagtctgtgggcattataagagagatgctaagtgtggagaaatgggacccgacataattgcagcatttcaagatgaaaagctttttcctgagaataatctagccttaatttctcatattgggggtcatatttttgctggtaatgtcattttctataaactattcggcagagaaaagatgcaaaacaagctggattcattatggtttggtaaagtttacccacacaacttgaagctgttatgtgaaaacttggaaaacggtaaaatcatcgacgaaatgtacagaggtggcatatcgatgaat

SEQ ID NO: 100 - DNA, 1605 bp, Arabidopsis thaliana
atggtcattaccgctaacgatttatcaaaatgggaaaattttcctaaaggacttaaggttcttcttctcctcaacggctgtgacagcgacggagatggctcctcagccgccgagactcgatcagagctcgaatcaatggactatatcgttactacattcaccgatgaaactgaagcactctctgcggttgtcaagaacccggagagcttctacattgccatcgtcgaggtgaatatgagcgctgagagtgagagtttcaagtttcttgaggctgccaaagacgttcttcctactataatgatttcaaccgatcattgcatcactactacaatgaaatgcatagcgcttggtgcagttgagttcctacaaaaaccgctctcaccggagaaattaaagaacatttggcagcatgttgttcataaggcattcaatgatggtggaagtaatgtttcgatatcacttaagccagtgaaagaatccgttgtctcgatgcttcatcttgagaccgacatgacaatcgaggagaaagatccagcgccatcaacaccgcaattgaaacaagattcacggttactagacggtgattgccaagagaacataaatttctcgatggaaaatgtaaattcctcgaccgagaaagataacatggaagatcatcaagacatcggtgaatctaaatcagtcgacactacaaaccgcaaattagatgacgacaaagtggttgtcaaagaagagagaggagacagtgaaaaagaagaagaaggtgaaaccggagatctcataagcgagaagacagattcagttgatattcataagaaagaagatgagactaaaccgattaataaatcatccgggatcaagaacgtgtctggtaacaaaactagtcgaaagaaggtggattggacaccagagctgcacaagaagtttgtgcaagcagttgagcaactcggcgttgatcaagcgataccctcgcggattcttgagttgatgaaagtaggcaccttaacaagacacaatgtagctagtcaccttcagaaatttcggcagcataggaagaatattcttccaaaggatgatcataaccatagatggatacaatctagagagaaccatagaccaaatcaacgtaattataacgtttttcaacagcaacaccgtcccgtgatggcttatcccgtttggggtcttcccggtgtttatccgccaggagcgattccacctttgtggccaccgccgctgcagtccattggtcaaccacctccgtggcattggaaaccaccttatccaacggtgagcggtaatgcatggggttgtccggttggaccgcctgtgaccggatcatatattactccttcgaatactaccgccggcggatttcaatatcccaacggagctgaaaccggcttcaaaataatgccggcgagtcagccggacgaggaaatgttagatcaagtggttaaagaagcgataagcaaaccgtggctgccgctaccgctcgggctaaaaccgccgtccgcggagagcgttttggctgagctaacgcgtcaaggcatctcagccgtcccttcttcttcttgtctaatcaacggctctcatcgtctccgc

SEQ ID NO: 101 - DNA, 1423 bp, Arabidopsis thaliana
aattatatgtatatatatacgtacacaaaatcatacgtttttccacaaatggatcaagaagaggaagagatcgagattcctaattactttatctgcccaatctcactagagatcatgaaagatccagtcacgaccgtttctggcatcacttacgaccgtcaaaacatcgttaaatggctcgaaaaggtcccttcttgtcccgtcacgaagcaacctcttcccttagactccgatcttacacctaaccacatgcttcgccgtcttatccaacactggtgcgtcgagaacgagacacgtggcgttgtcagaatctctacacctcgagttcctcctggaaaacttaacgtcgtcgaagagatcaagaatctcaaaaagttcggccaagaagccttaggaagagaagaaacgttgcagaagcttgaagttttggcaatggacggaaataacagaagattgatgtgtgaatgtggcgtacataagtctttgatcttgttcgtagtcaagtgtactagtgaagacgaagacggacgacgtcgtatcaaaggactagatgagtctcttcgtcttcttcacttgatcggtattccatcaaacgacgcaaaaacaatcttgatggaaaacgatcgagttatggaatcgttgacttgggttttacaccaagaagactttctcagtaaggcttatacaattgtgctattgaggaatctaacggaatacacttcctctcatatcgtagagagattgaatcccgagatttttaaagggatcatagggtttctcaaggatgttgtaaatagtgttaatcggacgagccctaccgtgagagaaacggtacagtcatcatcaaggcctagcttgggaaaaacggaaccatcaaaacttgatcatagtttggtcatcaaacaagcggtgactgccgcgctgatgattcttttagagacttcttcgtggagccgaaaccgatcactccttgtggatctcggtgcggtttctgaactcatcgaactcgaaataagctacactggcgagaaaagaatcacagaacttatgttaggagttttatctcgtttatgttgctgtgcgaacggtagagccgagattcttgctcataggggcggaatcgcggttgtgacaaagcggctattgagggtttcacctgcggcagacgatagagctatctctatcctaactacagtgtcaaaattctcgccggaaaacatggtggtggaagagatggttaatgttgggacggtagagaagctctgttccgttctaggaatggattgtggtttgaacttgaaggagaaagcaaaagagatactaaaagatcattttgatgagtggaagaagtttccatgtattgacataactcttctcactaagctgctaagcatctcacccaaagggccaaagatctaagtaa

SEQ ID NO: 102 - DNA, 891 bp, Arabidopsis thaliana
atgaagagtaggaagagctatgggcacttgctgagcccggtgggcagcccgccgttggacaacgagtccggcgaggcggcggcggcggctgcggctggcggcggcggctgcgggagcagcgccgggtatgtcgtctacggcggcggcggcggtggggactcgccggcgaaggagcaggacaggttcctgccgatcgcgaacgtgagccgcatcatgaagcggtcgctgccggcgaacgccaagatctccaaggagtcgaaggagacggtgcaggagtgcgtgtcggagttcatcagcttcgttacaggcgaggcctccgacaagtgccagcgcgagaagcggaagaccatcaacggcgacgacctcctctgggccatgaccacgctggggttcgaggcctacgtcggcccgctcaagtcctacctcaaccgctaccgcgaggccgagggcgagaaggccgacgtgctcggcggcgccggcggcgccgccgcggcgcgccacggcgagggcggttgctgcggcggcggcggcggcggcgccgatggcgtcgtcatcgacgggcattacccgctcgccggcggcctgtcacactcacaccatggtcatcagcagcaggacggcggcggcgacgtcgggctcatgatgggcggcggcgacgccggcgtcgggtacaacgccggggccgggtcgacgacgacggcgttctacgcgccggcggcgacggcggcgtcagggaacaaggcgtactgcggcggcgacgggtcgagggtgatggagttcgagggcatcggcggtgaggaggagagcggaggcggcggcggcggcggcgagagggggttcgccggccacctccatggcgtgcaatggtttagactaaagaggaatactaat

SEQ ID NO: 103 - DNA, 1728 bp, Brassica napus
atggctgcatctttctctgtcccctctatgataatggaagaagaagggagattcgaggcggaagttgcggaagtgcagacttggtggaactcagagaggttcaagctaacaaggcgtccttacacagcccgtgacgtggtggctctacgtggccatctcaagcaaggttatgcttcgaacgagatggctaagaaactgtggagaacactcaagagtcaccaagccaacggcacggcgtctcgcacgtttggtgccttggaccctgttcaggtgacaatgatggctaaacatttggacaccatttatgtctctggttggcagtgctcgtctactcacacctccactaacgagcctggtccggatcttgctgactatccatacgataccgttcctaacaaagtcgaacatctcttcttcgctcagcagtaccatgacagaaaacagagggaggcgagaatgagcatgagcagagaagaaagagcaaaaactccgtttgtggactacttgaagcccatcatcgccgacggagacaccggtttcggtggcactaccgccaccgtcaaactctgtaagctcttcgtcgagagaggcgcagctggggtccacatcgaggaccagtcctccgtcaccaagaagtgtggccacatggccggaaaagtcctcgtggcggtaagtgagcacattaaccgccttgtcgcggctcggctccagttcgatgtgatgggcacagagaccgttctggtcgctagaacggatgcggtggcggctactttgatccagtcgaacattgactcgagggaccatcagttcatcctcggtgtcactaacccgagccttagaggcaagagtttgtcctcgcttctggccgagggaatggctgtaggcaagaacggtccagcgttgcaagcgattgaggatcaatggcttagctccgctcgtctcatgactttctcggacgctgtcgtggaggctctcaagcgcatgaacctaagtgagaatgagaagagccggagagtgaacgagtggctaaaccatgcaaggtacgagaactgcctgtcaaacgagcaaggccgagaattagcagcaaaactcggtgtgactgatcttttctgggactgggacctgcccagaaccagagaaggattctaccggttccaaggctcggtcacagcagccgtggtccgtggctgggcctttgcacagatagctgatctcatctggatggaaaccgcaagccctgacctcaacgaatgcacccaattcgcagaaggagtcaagtccaagacaccagaggtaatgctcgcctacaacctctccccgtccttcaactgggacgcctctggcatgacggatcagcagatgatggagttcattccgcggatcgctaggctcggttattgctggcagttcataacccttgcgggtttccatgcggatgctcttgtggtcgatacgttcgcaaaggattacgcgaggagagggatgctggcttatgtcgagaggatacagagagaagagaggagcaatggggttgacacattggctcatcagaaatggtcaggtgctaattactatgatcgttatcttaagaccgtccaaggtggaatctcctccactgcagcaatgggcaaaggtgttactgaggaacaattcaaagagacctggacgaggccgggagctgctggaatgggcgaagggactagccttgtggtagccaagtccagaatg

SEQ ID NO: 104 - DNA, 1716 bp, Zea mays
atggcgtcgccgttctccgtgccttcgctgatcatggaggaggaagggcggttcgaggcggaggtggcggaggtggagtcgtggtggggcacggagcggttccggctcaccaagcgcccctacaccgcccgcgacgtggtcctcctccggggcacgctccggcagagctacgcgtcgggggagatggccaagaagctgtggcgcacgctcaaggcgcaccaggccggcggcaccgcctcccgcaccttcggcgcgctcgaccccgtccaggtcaccatgatggccaagcacctggacaccatctacgtctccgggtggcagtgctcgtccacgcacacctccaccaacgagcccggcccggacctcgccgactacccctacgacaccgtgcccaacaaggtggagcacctcttcttcgcgcagatctaccacgaccgcaagcagcgggaggcgcgcatgtcgctgccccgcgccgagcgcgcgcgggcgccgtacgtcgacttcctcaagcccatcatcgccgacggcgacacgggcttcggcggcgccacggccaccgtcaagctctgcaagctcttcgtggagcgcggggcggccggggtccacctcgaggaccagtcctccgtcaccaagaagtgcggccacatggcgggcaaggtgctcgtcgccgtctccgagcacgtgaaccgcctcgtcgccgcgcggctccagttcgacgtcatgggcgtcgagaccgtcctcgtcgcgcgcaccgacgccgtcgccgccacgctcatccagaccaacgtcgacgcgcgcgaccaccagttcatagtcggcgccaccaacccgggcctcaggggccagagcctcgcggccgtgctgtcggccggcatgtcggcgggcaagagcggcagggagctccaggccatcgaggacgagtggctggccgcggcgcggctcaagaccttctccgagtgcgtcagggacgccatcgcgggcctcggcgtcgcgggccaggagaagcagcgcaggctccaggagtgggaccgcgccaccggcggctacgacaggtgcgtgtccaacgaccaggcgcgcgacatcgccgccagcctcggcgtcacgtccgtgttctgggactgggacctgccgcggaccagggaagggttctaccgcttcagggggtccgtggcggcggccgtggtccggggccgcgccttcgcgccgcacgccgacgtgctgtggatggagacgtccagccccaacgtggccgagtgcaccgccttcgccgagggcgtcaaggcggcgtgccccgaggcgatgctcgcctacaacctctcgccgtccttcaactgggacgcgtctgggatgacggacgccgagatggccgccttcatcccgagcgtcgcgcgcctcggctacgtctggcagttcatcacgctcgccgggttccacgccgacgcgctcgtcaccgacacgttcgcgcgggacttcgcacgccgcggcatgctggcctacgtggagaggatccagagggaggagaggatcaacggcgtggagacgctggagcatcagaagtggtcgggcgccaatttctacgacagggtgctcaaggctgtgcagggtggcatctcctcgactgcagccatgggcaaaggagttactgaagagcagttcaaggatccacggcccgcaactgggagcagtggcctgcaagttatggccaaatccaggatt

SEQ ID NO: 105 - DNA, 993 bp, Zea mays
atggacgccgccgtctccaccctcaccgctctcgccatcttcgcgagcaccgtcgagcacgccgcctacaggagcgtgcaggggtatagggtggtcgggaggaaaggcggcgggtgggtccgttgggagaggtgggtggagcggcagttcgtcctctccctctccttcccacggtgcgtcgaggttgccctgcccgccgccgcgccgcggatactgccagcggggtggcgcagccggccggtgttccgcgagggacagaccgtcgacacttggcgttgcattgtggcattcgactccgtcgccgccgtcgctccgtcctccccgccgccgcccgtgctctcccccttcgtgaacccacagctgcagtatctgtctaatctgtacaatgacctgctgatggtgtttcggtttcgagaagagaaaacggtcccacaactcgttaattcaaagcaacccatccgttgtggtgaacaggggaaaacttctgatttgggtgatgcatcggagtccgattcggatggggattgtcaatctggcaaagaacttgcaccaccagttcagaagcatacaagagccaaccggaagcatatagatagcattactttagttgatatagctcagtacttccatcttccaatccgagatgcatcaaagacactcaagattggggtcagcatattgaagaggaaatgccgacagtatgggatacctcgttggcctcaccggaagatcaagtcacttgactctctcattcatgaccttgagttcgtgctagcaagagaggatgaggatgaggaggaggagaagcagctgcagaaggacaggctggctgctgcgataaacgccctcacaaaacggaagagcatgctggagagcgagaaggaaaccatacagcagaaaccggccatggacctgatggctgaaaccaagctattcagggaagatgttttcaagaggagatatagggccaaaagttcagtcatggatatggat

SEQ ID NO: 106 - DNA, 623 bp, Glycine max
tgtcctactcctcttcgatatgagtcaactcggcgccgtgttgcggactcagagggagcccaggaggagtaccattctgggtttgttgacggagcaaatggacggcgttgatagtgggacccgcaggaggcgcagcttcaaggaacgcttcggattcatcggcatggggtgctgtggggccacctggggcttccgttccgacgcgctaagtgtcacccaaggagaacagcaacagcaggaaacggatccagagtgcgtgggtccagcaggtttgggttcgggtatgaatctcgcggcggcgttagcggcggagaggcagctccgggggccgcaggaggaggcagtgagagcgccggggacgccgtggagggtgtcgctgatgaggctgctggaggagaccgaggcggagaaggagaaggagaaagagaaagaggagaatgttgtggggaatgattcggtgtgctgcgtgtgcatgggaaggaagaaaggcgcagcgttcatcccatgtggacacactttttgcagggtgtgttccagggaactgtggcttaatcgaggctcttgtcccctttgcaatcgctccatcctcgagattctcgacattttctagaatttcttctaac

SEQ ID NO: 107 - DNA, 696 bp, Arabidopsis thaliana
atgcttcgctcctcaattcgacttctctatataagaagaaccagtcctctgcttcgaagtttatcatcatcatcatcatcatcatcatcaaaacgattcgattctgcgaaaccacttttcaattctcatcggattatttctcttccaatttctacaacgggagctaaactatctagatcggagcattcaatggctgcttcttccgaacccaaatctctttacgatttcaccgtcaaggatgctaagggaaacgatgttgatctaagcatctacaaagggaaggttcttttgattgtgaacgttgcttctcaatgtggcttgactaattcgaattatactgagcttgcgcagctgtatgagaagtacaaaggccatggtttcgagattcttgcgtttccgtgtaaccagtttgggaatcaagagcctggtactaatgaagagattgttcagtttgcttgtactcgtttcaaggctgagtacccgattttcgacaaggttgatgttaacggtgacaaagctgccccagtctacaagtttctgaaatcaagcaaaggcgggctctttggagacggcattaagtggaacttcgcaaagttcttggttgacaaagatggaaatgttgtcgatcgtttcgcaccaactacctcacctctcagcattgagaaggatgtgaagaagttgttgggagttactgct

SEQ ID NO: 108 - DNA, 696 bp, Arabidopsis thaliana; identical to SEQ ID NO: 107

SEQ ID NO: 109 - DNA, 456 bp, Zea mays
atggcagctgaggaagatgtcaagcagaggcagatcattgaaaatcgtgccagaaatataagccacaatgttaggtgcactgagtgtggtagccaatcgattgaagattcacaggctgatgttgctattctcctaaggaagctcattcgtgatgaaataaaagcaggaaagagtgataaagagatctacaagaaactagaggatgattatggggagacagtactatatgcccctaaatttgatcttcagactgctgggatttggctttcgcctgtcattgttggtggtatagcagctggaatctgggcttaccaaaggcataggcaaaggacaaatgttcacattatggctctgaacctggtccgaggggtaccactgactccaagggagaaggagaccatgctagacatccttacacctccaccggctccaaggaaatggtggtggccaggcaaa

SEQ ID NO: 110 - DNA, 1032 bp, Arabidopsis thaliana
atgttttcttgcatagcttgtaccaaagcagacggaggtgaagaagtcgaacatggagcgcgtggaggcaccactcccaatactaaagaagccgtcaaaagcctaaccattcagattaaagatatggctttgaaattctctggtgcttataaacaatgcaagccatgcactggttcctctagtagtcccttgaagaaaggacatagatcatttccggattatgacaatgcctctgaaggtgttccataccctttcatgggtggaagtgctggttcaactcctgcttgggacttcacaaactcctctcatcatccagctggacggttagaatcaaagttcacttcaatatatggaaatgatcgagaatctatctctgcacagtcttgtgatgttgtactggatgatgatggaccaaaagagtggatggctcaagtagaacctggtgttcatatcacatttgcttctcttcccactggaggaaatgatctcaaacggatccgtttcagccgagagatgtttgataagtggcaagctcaacggtggtggggtgagaactatgacaagatcgttgagctttacaatgtacagagatttaaccgccaagctctccaaacgcctgcaagatccgacgatcagtcacagagagattcaacgtactcaaagatggattcagcaagagaaagcaaagactggactccaagacacaatttcagacctccaggatctgtcccgcatcacttttatggcggctctagcaactatggaccaggaagttatcatggaggaccaccgatggatgcagcaagaaccacaacttcttccagagatgatccaccttccatgagcaatgctagtgaaatgcaagctgagtggattgaagaggacgagcctggtgtttacattaccatcagacaattatcagatgggactagagagctacgtcgagtcagattcagccgggaacggtttggggaagtgcatgcaaagacatggtgggagcagaacagagagagaatacaaacacagtacctc

SEQ ID NO: 111 - DNA, 1215 bp, Zea mays
atgctcacgtgcatcgcgtgctccaagcagctcccgggcgacgcgccgccgctgcgcgagccgtcggacgacgatgaccgcgccaacgccggaggcgggggcgaatcggcggcaacgcccggcacgaggcaggccatcagggtgctcaccgcccagatcaaggacatggcgctgaaggcatcgggcgcgtaccggcactgcaagccctgcgccggttcgtcctccccggcggcgtcgcggcggcagcaaccgtactaccacggcgcgtacgcggagtccgggtccgaccgcttccactgcgcgtaccagcgcgccggcagctccgcagcatccacgccggggctgcgcacggggggcgcgatgtccagcggtgacatcacgccatcggtcagcgcgcgcaccgacttcctcgccgacgacgaggaaggggacgatgaagagggaacggcgactggcagcagcgaggaggatgaggagaaggagtgggtcgcccaggtggagcccggggtgctcatcaccttcctctcgctgccgcggggcggcaatggtctgaagcgcatccgattcagccgtgaaatgttcaacaaatggcaagcacaaagatggtggactgaaaattacgagaaggtcatggagctttacaacgttcagaagtctaacagtcaagttgatcctctgccaagcattccaaggtctgacagtgagatctccaaagacgataccccagctacagcaccgcttaacaaggggcaattgctacgtacttcacccagaccactaaaaggcagtgaagccataggctattcatcttcggattgtcctcagcaccaatccagtcattttcgcaacgtttaccgcaaagaccgctaccttgggcaccagttctgtgatccagttgaactggcatcgacgcctgagttatcaagcatcagtggtgcgaagacagagacgtctattggtgcatcagtgaggacaagctcatctcctgaagaggtcgatggatcgggcgaactttcagcctctgtcagcaacgcaagtgacgaagagagggaatgggtagaagaggacgagcctggcgtgtatattactattcgagctttgcctggtagcatcagagaactacgccgcgtcagattcagccgggagagattcagtgagatgcatgccaggttatggtgggaagaaaaccaagcgagaatatatgagcagtatctc

SEQ ID NO: 112 - DNA, 1872 bp, Zea mays
atgaacgccgtcgaaccctccgccgccgccatcgccgaagaccccattactccggccgcctccgcagccccgtaccctggccgcctccgcgaagcacttaccgccctttccgaggcttgcgagtccggcaacttcaatgcttccgaaaccgcctccttcaccatctccgacattcttgacaccgcagccggcgtaagtggcgagctcgatgacgggagcgacgacagccaagacgcgtcgaggtcaggggcctccgaagtgctgcttcgcgaggtgctcgagttcctctctcgcccgtcatcgatctcgaaccagatggcccttgacgcgctctcgcttgtgcttcccaaacccgtggcgaagctaggggctcgaatggggagatgccgggatgttgccgcagctatcctaaagttcttcgtgacgaattgcaatccgagggacatgctctccatcctctgtgaggcattagatgcaccaatggagctaccaaatggcttatccagttttgttcttctactcgatgcacttgctaaagtgtttactttaattcagaggcgacatatcgagcaagtaaaggtggcactgcccgttgtacttaaagttatgcatgctactgtatcagaatgtgttgaggaacatggaagtgctgctgttgatcttttcaatgcagcacatggtgttggcaaggccattcaagaaatgtgcatatcaatgttcaacaaaaacaaagatctctgtgcaattcttggtttatactcccttcagaatatagctcttgtatcacgaagcagacagcaggatattctctctgcttgtggttcagttgtttttcagagtttcagatttcttaaaactagtggattcacctatcgtggcctactaactggcagtgatgtcacagctgcaacggttgaactttccaaagaggaagatgctgattttatggagcatttttcctttgctatggatggtgcagcactttcagttgtgtggacacttatgcatgatgataaagatatgtcaaagtatgctggagaagagttggaattagcagtaaaggaagttcagggcaaccatatggaaaaatgggaagcaattaacatgcttaaatatgtcctatcctcaattcattacccatggataatcaaatcccacagtttaaacttaatgctgattctatccggtgaagatcatgttgaagagatcaataatcatgtagatttcacatgctttgctcatcgcatttttgaaacactcaaggccattgaaagcgttatgattgctgcccctatggcattggtgcggaaaaaagcatttgctgctttgaaaaaggttatttcaatggtgccatcatcccagagatttgacatcttacatggtcttgtaaacaatagtacatctccagctttgactgcaattctccttgatctagtgaggcaggaagtttcgagagagagtcgccaagctgacaatgattgtattgaagacgaaggatttcgaggtaatgggttaccgcgctgggcatctcatgcacttgagttagttgagctgattttgaggcctccagaaggtggtcctccttgccttcctgatcacagtgaacaggtaatatcagctctaaacttgctaagatttattctgataatagattcaagaggacaaagatctgcaaaattgtttcggaaagagacattgcacaaggtgcactcggagtggctgaccccattaagaccaatcgcggagcaaattcagttggaaaatgaaaaggatgctgatgagattacaaaacaaatagtgtgcatgttaaatcttgttcaactggtgctataccgctgcatcgagttggtggaggaaaagatgaaaggctgc

SEQ ID NO: 113 - DNA, 198 bp, Thermotoga maritima MSB8
atgcgcggcaaggtgaagtggttcgactccaagaagggctacggcttcatcacgaaggacgagggcggcgatgtcttcgtgcactggagcgccatcgagatggagggcttcaagacgctcaaggagggtcaagtggtcgagttcgagattcaagagggaaagaaaggtccgcaggccgcgcacgtcaaggtcgtcgaa

SEQ ID NO: 114 - DNA, 198 bp, Thermotoga maritima MSB8
atgaggggcaccgtgaagtggttcgactccaagaagggctacggcttcatcacgatggagaacggcgaggacatcttcgtgcactggagcgccatccagatggacgggttcaagaccctccgcgagaacgagaccgtggagttcgaagtgcaaaagggaacgaagggtccacaggcggtcaacgtcaggcccgtccgg

SEQ ID NO: 115 - DNA, 198 bp, Thermoanaerobacter tengcongensis MB4
atggtgaggggcaaggtgaagtggttcaacgctgagaagggctacggcttcatcgagcgcgaggacggcaccgacgtcttcgtgcactactccgccatcgagggcgagggtttcaagacgctggaggagggacaggccgtcgagttcgaagtcgtccaagccgcgaagggtccacaggcgagcaaggtccggaaactg

SEQ ID NO: 116 - DNA, 198 bp, Bacillus caldolyticus
atgcaacgcggcaaggtgaagtggttcaacaacgagaagggctacggcttcatcgaggtggagggcgggtccgacgtcttcgtgcacttcaccgccattcagggcgagggcttcaagacgctggaggagggtcaagaggtcagcttcgaaatcgtgcaaggaaacaggggtccgcaggccgcgaacgtcgtcaagctg

SEQ ID NO: 117 - DNA, 240 bp, Triticum aestivum
atgcagattactggtaaggtgaagtggttcaacgaatccaaggggttcggcttcatcacccccgacgacggcagcaaggacgtcttcgtccacttcaccgcaatcgctggcaacggcttcaagaccctcgccgagggccagcgtgtcgaattcgaaattcaagacggccaaaaaggcccgtccgccgtcaatgtcaaggccctagagctagaggaggataagagcatttcgagcaaatta

SEQ ID NO: 118 - DNA, 234 bp, Zea mays
atgggcctgtggacattgctggagggttttttgcttcttgcaaatgcgttagcgatattgaacgaagaccgcttccttggtccaaggggatggagcatgtctgaagtatcaggaaacgggcaaaccaagtcgttcaagggccagatcgtggggcttatctacgctacacagtttctgcggatgcccttaattgctctcaacgttctcatcatcgttgtcaaattggtgtctggc

SEQ ID NO: 119 - DNA, 513 bp, Arabidopsis thaliana
atgttgttttttaatcctggcttcacatgtatgcaggaggagtttcaacttgctttgttcaaaagccggaagagggagaatatatttgctaataggatatttgatatgtttgatgttaaacgaaaaggagtcatcgatttcggggactttgtaagatcactcaatgttttccaccccaatgcttctctagaagacaaaatagattttacgtttaggctttacgacatggactgcacgggttacattgaacgacaagaggtcaagcaaatgttgatcgcgcttctctgcgaatctgaaatgaaactggctgatgaaaccatagagataatactcgataagacatttgaagatgcagacgtgaatcaagatggaaaaattgataaattagagtggagtgatttcgtaaacaaaaatccatcattgcttaagatcatgactcttccatatctcagggatattacgacaacgtttccgagttttgtcttccattcggaggtcgatgagattgccaca

SEQ ID NO: 120 - DNA, 2571 bp, Arabidopsis thaliana
atggcggagaaagtatcggaggacgttatgcttctacacggtgacctcgatttgaaaattgttaaggctaggaggttacctaacatggatatgttctcagaacatttgcgccgtctcttcaccgcctgtaacgcctgtgctagacccaccgataccgatgatgtcgatcccagagataaaggcgaattcggtgataaaaacatccgtagccaccgtaaggttatcaccagcgatccttacgtcaccgtcgtcgttcctcaagcgactctagctcgaacacgtgttttgaaaaactcacaagagcctctttgggacgagaaattcaacatttctatagcgcatccgtttgcttatctcgagttccaggtcaaagacgacgatgttttcggtgctcaaatcattggcacggctaagatcccggttcgagacatcgcatcgggagaacgcatttctggttggtttcctgtactcggtgcttcgggaaaaccgcctaaggcagaaactgctattttcatcgatatgaaatttactccgtttgaccagatccatagctaccgatgtggaatcgccggagatccggagcgtaggggtgttagacggacttatttccctgtgaggaaaggaagtcaggtgaggctttaccaggacgctcatgttatggacggaacgttgccggcgattgggttagataacgggaaagtttatgagcatgggaagtgttgggaagatatatgttatgctatatctgaggctcaccatatgatttacattgttggttggtctatcttccataagattaagcttgttagggaaacaaaagttccaagagataaggatatgacgcttggggaattgctcaaatacaaatcccaggaaggtgttcgagttttgctacttgtatgggatgataagacttctcatgataagtttgggataaaaacgcctggagttatggggacacatgatgaggagactaggaagttcttcaagcattcttctgtgatatgcgttttgtcaccccggtatgccagcagtaagcttgggttgttcaaacaacaggttgttggaactctcttcacgcaccatcaaaagtgtgttcttgtagacactcaggctgttggtaataatcgcaaggtcaccgcttttattggaggtctagatctttgtgatggccgttatgacacacctgagcataggatactccacgatcttgacactgtatttaaggatgatttccacaatcctacatttccagctggtaccaaggccccaagacaaccttggcacgatttgcactgtaggatagatgggcctgcggcatatgatgttctcataaactttgagcagcgatggagaaaggcaacacgatggaaggagtttagcttacgtttaaaggggaaaactcactggcaagatgatgctttgatccggatagggcgtatatcatggattctgagtccagtgtttaaatttctgaaggatggtacttcgataattccagaggacgatccatgtgtttgggtttctaaagaagatgatccagagaactggcatgttcagatattccgttctatcgactcaggatccgtgaaaggatttccaaaatatgaagatgaggctgaggcccagcatctggaatgtgccaagcgtcttgttgtagataaaagcatccagactgcatacatccagacaatcagatctgctcagcatttcatatatatcgagaatcagtatttcctgggttcttcttatgcttggccttcttatagagacgcaggagctgacaatcttattcctatggagttggcactaaagattgttagcaaaatcagagctaaggaaagatttgccgtatatgttgtcataccattgtggcctgaaggcgacccaaagtctggccctgtgcaagaaattctatattggcagagccaaactatgcagatgatgtatgatgttatagcaaaagaactgaaagcggtgcaatcagatgctcatcctctcgattaccttaacttttactgccttggtaaacgagagcagcttccagatgatatgccagccaccaatggcagtgtggtatcagattcttataatttccagcgtttcatgatttacgtgcacgcaaaagggatgatagtagatgatgagtatgtactcatgggatctgctaatatcaaccaaagatctatggcaggcaccaaagatactgaaatcgccatgggcgcataccaacctaatcatacatgggctcacaagggaagacacccacgtggccaggtgtatggatacagaatgtcactatgggcagagcatttaggcaaaactggagatgagtttgtggagccatcagatctggaatgtctgaagaaggtgaacacaatctctgaagaaaactggaaaagattcatagacccgaaattctcagagctacaaggtcacttaataaagtatcctctacaagtagacgttgatggtaaagtaagccctcttcctgattacgagaccttcccagatgttggtggtaagatcattggagctcattccatggctcttcctgacactttaaccacg

SEQ ID NO: 121 - DNA, 2133 bp, Arabidopsis thaliana
atgcctgctttagcttgcgttgatacgtcctttgtacctcctgcctacgccttctccgacaccgccggtgatgtttttatcccggcgtcatcaccaacttccgccgccgttgttgttgaccgttggtctccgtcgctctcatcgtctctctatcgaatcgatggatggggagccccttatttcatagccaattcgtctggtaacatctctgttcgtcctcatggctctgaaactttgcctcaccaagacatcgatttgctcaaaatcgttaagaaggtgacgggtccgaaatcttccggtggtttaggattgcagcttccgttgatcgttcgtttccctgatgtgttgaagaaccgtctcgagtgtcttcaatctgcgtttgattacgcgattaaaagtcaaggatatgattctcattaccaaggtgtttatccggtgaaatgtaaccaagatcgattcgttgttgaagatattgtcaagtttggatcttcgtttcgatttggattagaagctggttctaaacctgagatccttcttgctatgagctgcttgtgtaaaggtagccctgatgcctttcttgtgtgcaatggattcaaagatgctgagtatatatcattggctctgcttgggagaaaactggcgttgaatactgtgattgtgcttgagcaagaagaagagcttgatctggttattgagctgagccagaagatgaatgtgaggcctgtcattgggttaagggctaagctgaggactaagcattcgggtcatttcggatcaacttctggtgaaaagggtaaatttggattgactactactcagattgttcgtgtggtgaggaagctgcgtcaatctggtatgcttgattgtctccagcttctgcattttcatattggttcacagattccgtcgacttcgttgctctctgatggtgtcgccgaggctgctcagctttactgtgaacttgtgcgtcttggtgcacatatgaaagttattgatatcggtggtggtttggggattgactacgacgggtctaaatctggagaatcggatctctctgttgcttatagtctcgaggagtatgctgaagctgttgtagcttctgttcgggttgtgtgtgaccggagctcagtgaaacatccggtgatatgcagcgaaagcggtagagcgatagtctctcatcattctgtgctgatctttgaagctgtttcagcagataaaccaatggttcatcaagcaactcccggcgatattcagttcctgcttgaaggtaatgaggaagctcgagccaattatgaggatctttatgctgctgtgatgcgtggagaccacgaaagctgccttctttatgtcgatcagctgaagcagaggtgtgttgaaggtttcaaagaaggtgttttgagcatcgagcagttagcttctgttgatggtttatgcgagtgggtgttgaaggctataggcgcatcggatccggttcatacttacaatatcaatctatcagttttcacttcgattcctgatctctgggggattgatcagctgttccctatagttcctatccataagctcgatcaaaggcccggggctcgcggaatcctttcagatttaacgtgtgatagtgacgggaagatcaacaagttcataggcggtgaatccagcttgccgttgcacgagctggacaagaatggcagtggaggaaggtactttttgggtatgttccttggaggggcttacgaggaggctctcggtggagtccacaatctgtttggtggaccaagcgttgtccgggtctcccagagcgatggaccacacagctttgcagtgacccgagcggtgcctggtcagtcctcagcggatgttctccgagcaatgcagcatgagccggagctaatgtttcagaccctaaagcaccgagcagaggaaatgatgcataccaaaggtggtagcgaaggtgaaaatgaagaggaagaagaagatgatgagttcaacaatgtggcggcttctctcgaccgttcgttccacaacatgccgtatcttgcaactgagcaggcatcgccaagtaactctctttcagctgcgatcagtaaccttgggttttactactgcgacgaagacgtctacgattacatctctgcg

SEQ ID NO: 122 - DNA, 879 bp, Saccharomyces cerevisiae
atggcacaagaaatcactcacccaactattgtagacggctggttcagagaaatttctgataccatgtggccaggccaggccatgactttaaaagtggagaaagttttacaccatgagaagtcaaaatatcaagacgttttgatcttcaaatccactacatatggtaatgttctagttttagataatgtaattcaagccaccgaaagggatgaatttgcctaccaagaaatgattgcccatcttgccttgaattcccatccaaatcctaagaaggttcttgttattggtgggggtgatggtggtgttttgagagaggttgtcaagcatgattccgttgaggaagcctggttatgtgacattgatgaagctgttattagactatcaaaggagtacctaccagaaatggctgcctcttattctcacccaaaggttaagacccacattggtgatggtttccaatttttaagagattaccaaaacacatttgacgtaatcattactgactcttctgacccagaaggtccagctgaaacccttttccaaaaggaatatttccaattgttgaacagtgcgttgacagaaaagggtgtaatcactacacaagcagaaagtatgtggattcacttgccaatcattaaggacttaaagaaagcctgttctgaagttttcccagttgcagaatactctttcgttactattccaacttacccaactggtacgattggttttatggtttgctccaaagataaaacttgcaatgtcaagaagccactacgtgaaatctctgatgagaaggaggctgaattatacagatactataacaagaaaattcacgaagcttcctttgttctaccaacctgggcagccaaggaattaaat

SEQ ID NO: 123 - DNA, 1524 bp, Saccharomyces cerevisiae
atgaatacagtttcaccagccaaaaaaaaggttattataattggtgccggtattgctgggcttaaagctgcatctacgctacaccaaaacggtattcaagattgtcttgttcttgaggccagagatcgggtcggtggtaggttgcaaactgtcacaggctatcaaggtcggaaatatgatataggtgctagctggcaccatgatacgttgacaaaccctttatttttggaagaggctcaactgagtttgaatgatgggagaacgaggtttgtttttgatgacgataattttatttatatcgacgaagaacgtggaagggtagaccatgacaaggaactgcttcttgaaattgtggacaatgaaatgagcaaattcgcagagttagaattccatcaacacttaggagtttcagattgctccttttttcaattagtaatgaaatacttactacaaagacgccaatttctcacaaatgaccaaataagatatttgccacaactctgtcgatatctggaattgtggcacggcttagattggaagcttttgagtgccaaggatacatacttcggtcaccaaggaaggaacgcctttgctttgaactatgattctgtggttcaaagaattgctcaaagctttcctcaaaattggttaaagctaagttgtgaagtgaaatcaattacacgagaaccttcaaaaaatgtgacagtgaactgtgaagatggtactgtgtacaatgctgattatgttattattacagtacctcaaagtgtattgaatttgtctgtacaacctgaaaaaaatttacggggaagaatagaatttcaaccacccttgaaaccagtgattcaagatgcttttgacaagatccattttggagcgctaggtaaagtaatttttgagtttgaagaatgttgttggtcgaacgaaagttcaaaaattgtaactttggctaactctaccaatgaatttgtcgaaatagtacgtaatgcggaaaatttagatgaattagactctatgctagaaagggaagattctcaaaagcatacgagtgttacttgttggagccagcctttatttttcgtaaatttgtcaaaaagcacaggagtagcaagctttatgatgttgatgcaggcaccgcttacaaatcacatagaatccattagagaagataaagagcgtctttttagttttttccaacctgtgctgaacaagattatgaagtgtctagattctgaggatgtcatcgacggaatgaggccgatagaaaacattgcaaacgctaataaaccagtcttaagaaacatcatcgttagcaactggacacgcgatccttactcacgcggtgcttattcggcctgttttccaggagatgatccagttgatatggttgttgcaatgtctaatggtcaagactcccgcataagatttgcaggcgaacatactatcatggacggcgccggctgtgcctatggtgcttgggaaagcggaagacgggaggcgactcgaatctctgacttactgaaa

SEQ ID NO: 124 - DNA, 1518 bp, Zea mays
atggcggcatcggccaagggacggctcgtgcccgtgctcgcggtggcggcggcgctcgcggccgtgctcctctaccgcgcgcccttctccaagagcttgggcggcgaagggtgcagcctcctcccgcacgaccacttctggatcgccagcgaccgcgtcgtcacgctcggacgcgtcggccccgccgcagtagaggtcaaaggagggctcatcaacgccatcgccgtcggggactaccggagcttcgtgctccgccgaccgctccttgactacggggacgccgtcatcatgcccggcctcatcgacgtgcatgcccatctggatgagcctggacgtgccgagtgggaaggcttctccaatggcacaagagcagctgcggcaggtgggataacgacgctggtggatatgccactcaacagcttcccgtcaacagtctctgaagaaactctcaaactgaagctggaagcagctcgggataagctatatgttgatgtggggttttggggaggccttgtgccagagaatgccttcaacccaagtgctttggagggcctcctaaaggcaggcgttttaggactcaagtcttttatgtgcccctcaggcatcaacgactttcccatgacaaattcaactcatatcgaagaaggattggttacactggcaaaatacaagagatctttacttatccatgcagaacgtatacctgaggctgaggatcatgatttgcaagaagatgaattagatcctcggtcctatatgacgtatctgaagtctaggccaccatcatgggaggaagcggctatcagagatctgcaacgtgcaatgaaggatacggagttggggggtcggtccgaaggagctcatattcacattgttcatctatcagatgcaaaaactagcttggaacttatgaaggatgctaaacgcagtggtgcaagtctgtctatagaaacatgccctcattacctggcattttcgtctgaagaagttccagatggagatactcgctttaaatgttctcctcccatacgtgatgacacaaacagagaaaatctttggaaagctctgcttgatggacacatagacatgctaagttcagaccactcaccatccactcctgacctcaaactaatggaggaaggcgactttttaagggcatggggaggcatatcatcattgcagtttgtcctcccggtgacatggtcatatgggcgaaagtatggcgttactctgaatcagctagcctcatggtggagcgaaaggccagccaagcttgcaggccaaaagaataagggagctattctaccaggataccatgctgacattgtagtatggaaacccgaaacagagtttcaacttgacaacaaccatgctatatatcataaacatcagaatatttcagcgtatttaggaaagcaactttctggtaaggtcctgtcgacttttgtgagaggaaatcttgtgtttgctgaagacaagcatgcaaatgctgcttgtggtgttcctatcctcgctaag

SEQ ID NO: 125 - DNA, 387 bp, Zea mays
atggcttgcccaaccaagaaggggatgaccggagagccgagctcgccatgcagctcggcatcagcctcgaccttaccggagcaccaccagacggtgtggacgtcgccgccgaagcggccagcggggcggaccaagttccgggagacgcggcacccggtgttccgcggcgtccggcgccggggcagcgccgggcggtgggtgtgcgaggtgcgcgtgccggggaggcgcggctgcaggctctggctcggcaccttcgacacggccgaggcggcggcccgcgcgcacgacgccgccatgctcgccctcgccggcgcgggcgcctgctgcctcaacttcgccgactcggcctggctcctcgcggtcccggcctcgtgcgccagcctcgcc

SEQ ID NO: 126 - DNA, 411 bp, Zea mays
atggacatgggccggctccagctccagctccagcacgcggcctcctcgtcctccacctcggcgtcgtcctcgtcctcgtccgagcagaacaagctggcctggtccccgtcctccccgcagccgcccaagaagcgccccgcggggcgcaccaagttccgggagacgcggcacccggtgttccgcggcgtgcggcggcggggcgccgcgggccggtgggtgtgcgaggtgcgcgtccccgggcggcgcggcgcgcggctgtggctcggcacctacctcggcgccgaggcggcggcgcgcgcgcacgacgccgcgatgctcgccctgggccgcggcgcggcctgcctcaacttccccgactccgcgtggctgctcgccgtgccgcccccgcccgcgctctcgggcggcctggac

SEQ ID NO: 127 - DNA, 219 bp, Arabidopsis thaliana
atggtgtttccggcgtgtgtacagtgcggaacaagacaaaacccctgtcggtgcaaagtggttggaccaactttagggttcgtggcttttctgataaccggaatcatcgagtggccagttggtgcggtggtgtatatctttaaacacgccaagggtcgtcgtataatgggtcatccggccagaaaagtttatcccaaagtctctcgatctattcccatt

SEQ ID NO: 128 - DNA, 855 bp, Saccharomyces cerevisiae
atggagctaagttcaccatcaaaaaaaaccacaacatcgccaataaatataccaggggggaatagagataacctaataatcggaccacattctcacagcttcaagaccgatccattttcaagtaacaatagtagtttgctgtccaaaatatctactaaccccagtttggaaagccctttctcttcgaaatctttactagattgttctcctgtacaagctgtaaagaagtctttagagtcggaagcaaaaacgcatagcctggacgaggagacaaatgaacagactgatgtaaagatcttaaacatagcagactttcccacagatgaactcatactaatgataagtgcgctacttaacagaattataacagcaaacgatgaaactacagatgtctcacaacaagtgtcggaagagaccgaagacgaactcttaactccaatccttgctttctatggaaagaatgttccagagatagctgttgttcagtacttagagagaattcaaaagtactgtcccaccacaaatgatatttttctttctctccttgtatatttcgatagaatctccaaaaattatgggcattcttctgagcgtaatggttgcgcaaagcaattattcgtcatggactccgggaacattcatagattgctcataacaggtgtcacaatttgcacgaagttcttgagtgattttttttacagtaactctcgatacgccaaggttggaggtatttctttgcaagagttaaaccatttagaattacaattcctgatactatgtgatttcaagttattggtttcagtcgaagaaatgcagaaatatgcaaacttgttatataaattctggaacgaccag

SEQ ID NO: 129 - DNA, 1797 bp, Agrobacterium tumefaciens
atgcagggtgacaaaccggttccgcatcggcccggtcgatcagatggttcaacaggtccgatgctggataaaggtggcgggcgcggcaaattgtcgtcgcctgagcgctttcgtgaatggacaagaaaaacaatggctaaacaggacgaactggtctttgtgccgcttggcggcgttggtgaaatcggcatgaatctggcgctttacggttatgggccggagagcaagcgccaatggatcatggtggattgcggcgtgactttcgccggcccggacctgccgggcgtcgatcttgtgctgcctgacatcagctacatcgccgagcagaaaaagaacctcaagggcatcatcatcacccacgcccatgaggaccattatggtgcaatgaacgatctctggccgggtctcaatgtgccggtctatgcctcgcctttcaccgccggcatgctggaagccaagcgcgcctatgagggtacccgtgccgaaatcccggtgacgattttcaaggccggcgaccgcatcaatgtcgggccgttcgaaatcgaggctgttggcgtcaaccactccattccggagccgatgtcgctgatcattcgcacgccgcttggcaatgtcatccacaccggcgactggaagatcgacgaggccccgtcgcttgggccgttgacggatgaagcccgtttccgcgcgatcggtgaagagggcgtgctggcgctgatgtgcgacagcaccaacgcgctgcgcgacggcgtgtcgccctccgagcatgaggtttccgaaggcctgcgccagatcatcgaaagtgccgaaggccgcgtggccgtcaccactttctcctccaatgtcgggcgcatccgctcgattgcgcaagcggcggaggcggccggccgcgaggtattgctgctcggctcttcgctgaagcgtgtcgtgaatgtctcgcaggatcttggcatcatggaaggcatcaagccgttcctcgccgaagacgaatatggttatattccgcgcgaccgtgtggtggtgatcctgaccggttcgcagggcgaaccgcgcgcagcgctcgccaagctttcccgcgacgagatgcgcaatgtggcgctcgcttcgggagataccgtcgtcttttcctcacgcgccattcccggcaacgaaaaggcgatcatcgagatcaagaacggcctgatcgaacagggcgttcacatcgtgaccgacaatgaagctctggtgcatgtctcgggccatccgcgccgcaacgagcttttgcggatgtatgagtggacgaagccgcagatcctggtgcctgtccacggcgaggcggcgcatctggtggcgcagaaggaactggccgagcaggccggcatctcgcaggtgccgaaggtgcgcaacggcaatgttctgcgcctggcacccggcccggcggaagtcatcaacgatgtgccgcatggacgcgtcttcaaggacggtaatctcgtcggcgatatggacgagatgggcatcagcaatcgccgcaaactgtccttcgccggccatgtcgctgtcaacgtcgtgctggacagccgttacgacttcctcggcgatcccgatgtcgtgccgttcggcctgccggaatttgatgacgaggacgaggcgatggaggacacgctttatgacgccgtactcggcgccgtcgagagcattccgcgcgcccgccgcaaggacctggcactgctgcgcgaatcggtgcgccgcgccgtgcgcgccgctgccaaccagagctggggcaagaagccgatcgtcacggttttcgtaacgaaggtc

SEQ ID NO: 130 - DNA, 648 bp, Arabidopsis thaliana
atggaacctcgaatcaatgaccttcaggtggaatctcgggttcatgagttgctcgattttccggttcatacaaaccagatatcctctgcaatctacgagtgtcccaacgaccacatcgaaaaccctaagaagaaaccgtacaattgtccacactcaggagccaagtgtgatgtcacaggagatattcaaaggctactactgcatctaaggaatgatcacaatgttgaaatgagtgatgggcgtagtttcagtcacagatatgttcatcatgatcctaaacatcttcatcatgctacttggatgttaacacttctcgattgttgtggtcgaaaattctgcttgtacttcgaagcgtttcacctgaggaaaacaccaatgtacatggccttcatgcagtttatgggagatgaagaagaggcaatgagcttcagctatagtttgcaggtcggagggaatggcagaaagctgacatggcaaggcgtgccgaggagcattcgtgacagtcacaagacggttcgtgatagtcaagatggcttaatcatcactcgcaaattggctttgttcttctctaccgacaacaacaccaccgacaaggagctgaagttgaaggtttcaggtcgtgtatggagagaacagcctgtttcgata

SEQ ID NO: 131 - DNA, 648 bp, Arabidopsis thaliana; identical to SEQ ID NO: 130

SEQ ID NO: 132 - DNA, 654 bp, Arabidopsis thaliana
atgagctctatcaatatcactaacgtcaccgtcttggacaatcctgctccgtttgtgaatccattccagttcgagatttcttacgaatgcttgacctctctcaaagacgatttggaatggaagcttatatacgtagggtcagctgaagacgaaacgtatgatcaagttttggaaagtgttcttgttggtcctgttaacgttgggaactatcgatttgtgttgcaggctgactctccagatccgttaaagattcgtgaggaagatattattggtgttactgtgttattgttgacttgctcatacatggatcaagagtttataagagttggctattatgtgaacaatgactatgatgatgaacagctcagggaagagcctcctaccaaggttttgattgataaggtccaaaggaacatactcacagacaaacctagagtaactaagttccctatcaactttcatcctgagaatgagcagactcttggtgatgggcctgcacctactgaaccatttgctgattctgttgtaaatggagaagctccggtgtttcttgagcagccacaaaagcttcaggagatagaacaatttgatgattctgatgtaaatggagaagctatagcgttgcttgatcagccacaaaatctccaggagaca

SEQ ID NO: 133 - DNA, 306 bp, Arabidopsis thaliana
atgcacgggagaaccgccatggcagtggcctgccttctgtgcatgacggctctgctgctagtccaggatgtccagtccaggaggctactgtggacggagcaggagaagaaacaatcccatggtggccttggcaaccatggcgccgctgaccggcgaagcacctccctggaaccgtgcagtggcgctatgggaggaggcggcacaggaagtgcagacaagcagggcgaattcccgtgtgatgatgatacgtcaaaatggacagaactgcacacggattacatatacacccaagacttcaagcaccca

SEQ ID NO: 134 - DNA, 1707 bp, Arabidopsis thaliana
atggctaactccaagaagcaagcatggtttttttataccacaggcttaccaagtgacatagaaatcgaagttgatgatataacatttcatcttcataagtttcctctaatgtcaaaaagcaaaaaacttcaccaactaataacagagcaagaacagagtaaagtttattctcacatcaagctcgagaattttccaggaggttcagagattttcgagatggtgataaagataagctacggtttcaaagtcgacatctctgtttccacagctgttccactccgttgcgccgccgagtatctagaaatgacggaagagtactcaccggagaatctcatttcaaaaacagagaagtttctttcagagttcgtcttcactaacgtacaagaatccatcaaagcgttgaaagcttgtgaatcagtctcgtctttagctgaatcactctgtataacggaacagtgtatagactccatcgtcttccaagcttcctcaaccgatccgtcgtcgttttacggttggccaataaacaacggaggtatattcaccgttgaccggaagaaacagagcaaagattcgaaaacagagctttggttcgaagatctaacggagttgagttttccaatcttcagacgtgtgatcttatccatgaagtcgagtgtcctgagtcctgagattgtagagagatctctacttacttacgcgaagaaacacattccaggaatctcgcgttcatcgtcagcatcttcatcttcttcttcttcttccaccaccatagcttccgagaatcaacaaagagaattattagagacgataacttcagatcttccattaactgcgacgactacgagatctctcttcggtttgttacgagccgcgatcattctcaacgcctccgagaattgcaggaagtttctagagaaaaaaatcggatcgaatcttgagaaagctacgcttgatgatcttctcattccaagttactcgtatctcaacgaaacgttatacgatattgatttggtggagagactcttacgtcgttttctcgaaaacgtcgccgtgtcgtcgtcgtcattgacggtggttgggagattgatcgacggagttctcggtgaaattgcatcggacgctaatcttaaaccggaacagttttataatctggcggttttgcttccggttcaagcacgggtttacgatgatggactatacagagccgtcgatatatatttcaagactcattcatggatattggaggaagagaaggagaagatttgtagcgtgatggattgtagaaaactgactgttgaaggatgcacacacgcggcacaaaacgagcgtttaccactacgagccgtcgtacaagttctgtttttggagcagctacagctccggcaagtaatcactgggactttactgacggaggaagacggtgataaaacggtggtggacttgggtagatggaaggaagcggtgaaggagaatcaggtgcttcgtttggatatggatacgatgaggacacgagtgaaccagctagagaaagaatgcttgtacttgaagaaagtgatcgcgaagatcgacaaagaaagtttgttgaaggcgaagcatggggcggggaaatggtcaatcgggaagaagttcggatgcaaattttcggctcaagtttgtgattcacaggaggcaacgatggtcgatagaagatcacgacgttttcttagt

SEQ ID NO: 135 - DNA, 588 bp, Arabidopsis thaliana
atggcgacagctttagcttccaagctctccaaaggacgttcattgcttggaggtctttgcaatgctttctctggtttgatgaattcctcctccaatggaatgatgaatggaagcatcctctctcagcaacaacataggacattcattcaaatggggacgattctcaaatgcgtggataactcgtgtgctaaagaggtgatgtgcattcaatccctgagaggtaagaaaggagcaagacttggcgatatcattgttggttcagtgaaagaagctaacccaattgttcaaaaaaaagtaaagaaagacgctatcccaaaaggtaaagtgaagaaagggatggtcgtgtacggtgtggttgtgcgtgctgcgatgcctaaaggacgtgctgatggaagccaagtcaagtttgatgacaatgccattgtagttgttggcattaaggaaaagaaagggcagaataattcacatggttccaagaggaaaatggagtacaaccaaccgactggtacccgagtgtttggtcctgtcccgcacgagatgcgcctcaggaaacagctcaagatcctttctttggctcagcacattgtt

SEQ ID NO: 136 - DNA, 1437 bp, Synechocystis sp. PCC 6803
atggcttcctctatgctctcttccgctactatggttgcctctccggctcaggccactatggtcgctcctttcaacggacttaagtcctccgctgccttcccagccacccgcaaggctaacaacgacattacttccatcacaagcaacggcggaagagttaactgcatgcaggtgtggcctccgattggaaagaagaagtttgagactctctcttaccttcctgaccttaccgattccggtggtcgcgtcaactgcatgcaggccatgggtaagaatctcctcgaacaactgcgccaatttacagtggtggtggccgacaccggcgacatccaagccattgaaacctttacccccagggattccaccactaatccttctttgattacggcggcggcccagatgccccagtaccaggaaattgtggacagcaccctgctcaaagctaaggacgaagctggggaaaatgcatctattaaagacattgtccgattggcctttgaccgtttggcggtggcttttggcctcaaaattctgcaaattatccccggccgggtttctacggaagttgatgcccgcctttcctacgacacggaagccaccattgccaaagctcgctacctaattggggaatatgccaaagctggcattgataaaaaacgcattctgatcaaaattgcttccacttgggagggtattaaggctgcagaagtattggaacaagaaggtattcactgtaaccttactctactattcggtctccaccaggcgatcgcctgtgccgaagccaaagtcaccctaatttccccctttgtgggacgcattttggattggtacaaaaaaagtactggcaaggaatatgacagccacgaagacccaggggtacagtctgttacaaccatttacaactactacaaacgctttggttacaaaactgaagtgatgggagccagcttccgtaacattggcgaaatcatcgaactggccggctgtgacctgttgaccatttccccccaactgttggatcaactgcggaacaccgaaggggatttacctcgcaaactcgaccccgccacggtgccccaggacattgaaaaaattgttatggacaaggccaccttcgacaaaatgcatgccgaagatccgatggcctcggaaaaactggccgaaggcattgccggtttcaccaaggctctggaggtgttggaacatttattggaagaaaggttaaaagttctcgatggccaagagcacatcaaacatggggcagaggaaattttccatgcctatgatctagatggggacggttttattaccagggaggaatgggccggcaccgatgtggtttttgatgccctagaccgggaccatgatggcaaaatcaccgccgctgaaatgtccgctgggttgggagccgctttccgtttagcctctgttggt

SEQ ID NO: 137 - DNA, 951 bp, Arabidopsis thaliana
atggatccggcgttgctggacgacgtcatacgccggcttctggaggtgaagaatctcaagcctgggaagaacgcgcagctgtcagagtcggagattaagcagctctgcgctgccgccaaggagatcttcctgcagcagcccaacctgctggagctcgaggcccccatcaaaatctgcggtgatgtccatggccagtactctgatctcctgaggctatttgattatggtggctatccgcctcaggccaactaccttttcttgggtgattatgtggatcgtggaaagcaaagcctagaaacaatatgtcttcttttggcttacaaggtcaagtacccggagaacttctttcttctaaggggcaaccatgaatgcgcatcagtaaatcgcatctatggtttttatgacgagtgcaaacgcagattcagtgtaaagctgtggaaaacattcacagactgttttaactgcttgccagtgtcagcattgatagatgaaaagattctctgtatgcatggtggtctatctccggagttgaacaagcttgagcaaatactcaacctgaatcgccccacagacgtgcctgatactggattgctctgtgatcttctttggtctgatccttccaatgaagcaacaggctgggccatcaatgatcgtggtgtttcattcacatttggtcctgataaagtttctgaatttcttgagaagcatgatttggaccttatctgccgagcacatcaggttgtcgaagatggatacgagtttttcgctagccgtcaactcgtaacaatattttcagcccctaactactgtggagaattcgacaacgctggtgccatgatgagtgtagatgatacattgatgtgctcgttccaaatattgaagcctgcaaggaagatgatgggtggttcaactaataacaaatctggcttcaagtcattcaggggatggtag

SEQ ID NO: 138 - DNA, 998 bp, Desulfitobacterium hafniense
gcaggaccatgaccaataccgtcaggaagatcgctgttcttaccagcgggggggatgctccgggaatgaatgcggccattcgggcagtggttcgcaagggaatttatcatggacttgaggtttttgggattcgcaaggggtatgaaggcctgattcatggggaattcataaccatgcatctgggagcagtagcggatatcattcataggggcggtaccatgctcatgaccgcacgttcccaggagatgctcaccccggagggacaaaaaaacgccgcggctcaattgcgttatcgcggtatcgatgcgctgattgtgatcgggggggatggttcttttcggggagcacagaccttgtctgctcaaggaatagccatcgtcggtataccgggtaccattgataacgatattaccggcacggatttaactatcggatttgatactgccgtcaataatgtggttcaagcggttagtaaaatccgggatacggcaacatcccatgatcgaacctttttagtggaagtcatgggacgggattgcggcaacatcgccttgcaatccggcgtagcctgcggtgcagaatccatccttgtgccggaaatcgaaccggatctggatgatattgtcgcgaaattggaacgcggccaccaacggggcaaacatcacagtatcattatggtggcagaaggggctatgagtgcttggaatctgggggaagaactccgtcagagaaccggctttgaaacccgggtcaccatcttaggccatatccaaaggggcggcaatccaagtgccctcgatgtggtcctggcctcgcaaatgggcgggaaagcagtggagatactctgcgccggggaaaccgatcggatgacagcctgtgtcaaccaggaaatccaatccctgcctttggaggtggcttatggtgagcgcaaacccttcaacaaagttctctatgatctggccaatcaattggctatctgagcaaaagaaatcagcggt

SEQ ID NO: 139 - DNA, 998 bp, Desulfitobacterium hafniense; identical to SEQ ID NO: 138

SEQ ID NO: 140 - DNA, 1263 bp, Arabidopsis thaliana
atggacagtataagtttgttgcccgatgatttcctcttgcgcatactgtcattgcttcctacaaaagacgtgttgaacactagtgttttgtctaaacgatggcggtatctttggaagttggtgccaaaacttcagtacagccttatcgataagaatgctgatcatgggacatttgtgcggtttgtggacagatcgttgctacttagcatggctccggttttagagagtttacatttaaagttaggtcgacaatgcagcgaagtagatatcgggttttgggttagaattgcagtggaaaaaggtttgtgtgagctagatttcgattatgagcattataagactgagccttgcagattgcctcagagcttgttcacatgcggaacactcacggtgctaaaactaaaaaacgtatcgctcaaggatgtacaattcccggtatgttttaagttgctcaaaacgctgcacctggagtatgtgattttcctagacaaggaaactcctcagaagcttttatcaagctgccctattcttgaagtctttgatttgactcgagatgacgacgacgttgataatgttatgagtttctctgttatggtgccttcgttacaaagatttatctattgtggaggatctggtgctgagcttgtgatgaatacgccttctttgaagtacttaaagctttcaggttgtggttacgagtgtatgattgggaatttgcctgagattgtggaagcacatgttgaggttgcatgttccactgatgatatccttacatctcttgcatcagtcaaacgcctcttgctatgtttacccacagagcctgagttacctactggtaccatcttccaccagcttgaacacttggagttttgttcttgttgcacagaatgggatatacttatgtttatgctcaaacattccccgaaacttcgatctctcaagcttaacgagacccacggctacactattgtttctcaaagtgatcctatgtttcattgggaggaaccaagctcggttcctgaaactttgatgtttgttcttgagactttggagtggagaaactacagagggttgaagatggaaaacgaactcgcaagttttctcttgaaacattcaagacgtctgaagattgcaaccttttcgccagcagactgcaaacaagtgagaatcgaattacgtacgacagttggaatgaaatatcgtatactcatggaattggcgcgtttgccaaggggttcagcagagtgtgagcttgtgtttggt

SEQ ID NO: 141 - DNA, 1527 bp, Zea mays
atgatcgcaaacggcctccgcaaatccagtgctgcctcctcccaggttagcaagctggtgaaatacattgctagtgctggaagcttgcaaggggggcacagtttatcagagccgtctgccagacattacagctctgaaccttcacttcaggcgacagaagaaaatgggtttaaggggcacagcatgctggctccattcacagcgggatggcagagcactgatgtacacccattggttatagagagatcagagggttcttatgtctatgacagcaatgggaagaagtatattgatgctcttgcaggactgtggtgcacagctttaggtggtaatgagcctcgactagtcaaagcggcaactgagcaattaaacaaattaccgttctaccattccttttggaaccgtacaaccaaaccctcattggatttcgcaaatgatattctcagcatgttcaccgcaagggagatgggaaaggtgttcttcacaaatagtggttcagaagcaaatgactcccaggttaaactagtgtggtattataataatgcactgggaaggccagacaagaagaaatttattgctcgctcaaaatcgtaccatggatcaaccttgattgcagctagtctatcaggtctgccagcgcttcatcagaagtttgatctaccagcaccttttgtcctgcacacagactgccctcactactggcgattccgtcttcctgatgagacagaagaagagttttcaactagacttgccaataatttggagaatcttgtcctcaaagaaggacctgaaacaattgctgctttcattgctgaacctgtgatgggcgctggtggtgttatccttcctccaaagacctattttgagaagattcaggcagttctgaagaagtatgacatcttgttaattgcggatgaggtcattactgcatttggaagactagggacaatgtttggatgtgatatgtataatattaaaccagatcttgtttccatagccaaggctctttcttctgcatatatgccaattggagcaattctcgttagcccagaaataacggatgtaatctattctcagagcaataaacttggttcttttgctcatggctttacatactcgggacatcctgtttcttgtgccgttgctgtagaaaccttgaagatatataaggaaaggaatattgtagaacacgtcaacaaaattgctccaaggttccaggagggaatcaaggccttctcaggcagcccaattgttggggagatacgcggtctgggactgatacttggaactgaatttgtcgacaacaaatctccaaatgatccatttccagctgaatggggtgttggttcgatatttggcgcggagtgcgagaagcgtgggatgctcatcagggtggctggggacagcatcatgctgtcacccccgctgatcatgactcccaatgaagtcgaagaaatcataagcaaattcggcgatgctctgaaggctacagaggaacggattggagaactgaaatccaggaagaat

SEQ ID NO: 142 - DNA, 1104 bp, Arabidopsis thaliana
atggcgagaagatccgtttcgatatttaatcgccttctggcgaatcctccttctccattcacatcactgtcccgatccatcacctacatgcctagacccggagatggagctccacgaaccgtaaccctaattcccggcgacggaatcggacctttggtgaccggtgcggtggaacaggtcatggaagcgatgcacgcgccagtgcatttcgagagatacgaggttctaggaaacatgagaaaagtccctgaagaagtgatcgagtctgtgaagagaaacaaggtttgtctcaaaggtggattagcgactcctgttggtgggggtgtcagttctttgaatatgcaattgaggaaagaactcgatatcttcgcttctcttgtcaattgcatcaatgtccctggattagtgacgcgacacgaaaatgttgatatcgttgtgataagagagaacactgaaggagagtactcaggtctcgagcatgaggttgttcctggtgttgtcgagagccttaaggtgataacaaagttttgttctgagagaatagcgagatatgcatttgagtatgcgtatctaaacaataggaagaaagtgactgctgttcataaagctaacattatgaagcttgcggatgggctcttccttgaatcttgtagagaggttgctaaacattattcggggattacttacaatgaaataatcgtagacaattgctgtatgcagcttgtcgccaagcctgagcaatttgatgtcatggtgacacctaatttgtatggtaaccttatagcaaacacggcggctggaatagccggtggcactggagtgatgccaggagggaatgttggtgcagaacatgcgatattcgagcaaggtgcatcagcagggaatgtggggaatgataagatggtggaacagaagaaagcgaatccggtggctctacttctctcgtcggctatgatgctaagacatctccggtttcctacttttgctgatcggcttgaaacagcagtgaaacaagtgattaaagaaggaaaatatagaacaaaagatcttggaggagattgtaccacgcaggaagttgttgatgctgtcatagcagctcttgag

SEQ ID NO: 143 - DNA, 543 bp, Arabidopsis thaliana
atggaaaacgacgatatcaccgtggcggagatgaagccaaagaagcgtgctggacggaggattttcaaggagacacgtcacccaatctacagaggcgtgcggcgtagggacggcgacaaatgggtatgcgaagtccgtgaaccgattcatcagcgtcgagtctggctcggaacttatccgacggcagatatggccgcacgtgctcacgacgtggcggttcttgctctgcgcgggagatccgcgtgtttgaatttctccgattctgcttggaggttgccggtgccggcatccactgatccggacacgatcaggcgcacggcggccgaagcagcggagatgttcaggccgccggagtttagtacaggaattacggttttaccctcagccagtgagtttgacacgtcggatgaaggagtcgctggaatgatgatgaggctcgcggaggagccgttgatgtcgccgccaagatcgtacattgatatgaatacgagtgtgtacgtggacgaagaaatgtgttacgaagatttgtcactttggagttac

SEQ ID NO: 144 - DNA, 1482 bp, Zea mays
atggcgccgggatcgtcgtcgtctcgtaaggccaaggccctcaaggcatcgtaccggctcgtcgccgacaacttcctcgccgtcctcgccatggtttctgtcgtcgccgtgctcttcgctgcatggccgatcagcatcgaggaccttgcctgccggctgcacgcggtgcggccactccacgtcctcacggcggcgatcctgacggcggccctcgcgaagctgaggcgcatgagccggccgagcgacgtgtatctcgtggagtacggctgcttctggcccaagccgtgcttccgggcgccgttcgcgacgtgcctggagcacgtgcggctcttgccgtacctggtcaacgaggacgacatcagctggggctggcggctcctccagcggtccgggatcggcgaggagacctgcgtgccgtacgcctaccactacctgcccccggaccgcagctttagggcctccctggacgagaccgagctggtcatcttctccgccgtcgacgatgtgttcgcccggacgacggccgtgacgcccgcggacatcggcgtggtgatcgtgaactgcagcatcttcacgcccacgccggtgttcacggacatgatcgtgaacaggtacaagctgcgcgccgacgtgcggagcgtgaacctgtccgggatggggtgcagcgcggcgctcatctcgatcggtctcgccaggaacatgctgcaggtggcgccgccgggcacgcacgcgctgatcgtgtccacggagatcctctcgtcgcagtactacgtcggcatggaccgctccatgctcctgcccaactgcctcttccgcatgggcgccgccgccatgatcatgtccaacaccgcggcccgaggcgcgcggttccggctcgcccgcgtcgtgcgcacggtggcctccgcgcgggacgccgcctaccggtgcgtgttccaggtggaggacgaggagagcaacacggggatccggctctccaaggacctcgtgcccactgccgcccagaccctgaaaagcaacatcgtcgccttcgggcccctggtcctgcctgcctcggagaagctcctcgtcgctctgtccatcctgaggcggaggctagtacagagcagccgggggagggtgtaccgcccggacttccgcaccgcgttcgagcacttctgcatccacgccggcgggcgcggggtcatcgacgaggtgcagcgcggcctcggcctctccgacgaggacgtggaggcgtcgcggatgacgctgcaccggttcgggaacacgtccagcagttcggtggtgtacgagctggcgtacatcgaggccaagggcagcatgaggaagggagaccgcgtgtggatgatctccttcggcgccggcttcgactgcagcagcgtggcgtgggagtgcatcgagcccgccgccgacgctgctgggccgtgggccgactgtatccaccgctacccagtgcagctccctaaattgatggaggcccttgat

SEQ ID NO: 145 - DNA, 735 bp, Arabidopsis thaliana
atggagaatgagagagaaaagctgatttacttggctaagctcggttgccaagctggaagatatgatgatgtgatgaaatcgatgagaaaagtatgtgagcttgatatagagctaagtgaagaggaaagagacctactaacaactggatacaagaatgtcatggaggctaagagagtttcattgagagtaatatcatccattgaaaaaatggaagactcgaaaggaaacgaccaaaatgtgaaactgataaaaggacaacaagaaatggttaaatatgagtttttcaatgtttgtaatgacattttgtctctcattgattctcatctcataccatcaactactactaatgtcgaatcaattgtcctttttaacagagtgaaaggagattattttcgatatatggcagagtttggttctgatgctgaacgtaaagaaaatgcagataattctctagatgcatataaggttgcaatggaaatggcagagaatagtttagcacccaccaatatggttagacttggattggctttaaatttctcgatattcaattatgagatccataaatctattgaaagcgcatgtaaattggttaagaaagcttacgatgaagcaatcactgaactcgatggccttgacaagaatatatgcgaagagagcatgtatatcatagagatgcttaaatacaatctttctacgtggacttcaggcgatggtaatggtaataagacagacggt

SEQ ID NO: 146 - DNA, 735 bp, Arabidopsis thaliana; identical to SEQ ID NO: 145

SEQ ID NO: 147 - DNA, 624 bp, Arabidopsis thaliana
atggagaagatcgttcgttcttcttcgctgattctacttgttggcctccttctttttatgaattttcacggatttgtccggatcgccgaagcaacgaagcgacggatcgagatctccgatgacctagacgacgttgaagacaatgaagaagacgagtcatggaaagagtgggggaagaaagcaacgaccccggaatttgatccgcctccggatttcaccaatatgggattcgatcagatccaagaggaaatggctaaacggacttttggaaccgtcgtcggtttcgtcaagctccggttaggcgtcccccgtaccaaggatgtggtgattgatattgctatgaaatggacaaaagttttaagaacaggagggataggagtaagattcatggctgtagatcgaagcacagtgatgttcaatatgcaaaatgggaagcttgtgactgagctaagggaattcgtgctgagccaagaagaagcttacgaggtcaagatagggaagcaagagtttagaagacctggagatcctccatttgaagatgtctttgacaaatttcaagctgagcaaaggaaagatcacgaagatggtgatggtaacaagaatgatcttactaaggatgaatta

SEQ ID NO: 148 - DNA, 624 bp, Arabidopsis thaliana; identical to SEQ ID NO: 147

SEQ ID NO: 149 - DNA, 600 bp, Arabidopsis thaliana
atgtcttcgaaaaagattgtgttgacaagctccgatggtgaatctttcaaggttgaagaagtggtggcaagaaaactgcagatcgtaggacacattatcgaagacgactgtgctacaaacaaaatccctattccaaacgttaccggagagattctcgccaaggttatcgagtactgcaagaaacacgttgaagacgatgatgacgtggtggagacgcatgaatcatcgacgaaaggagataaaacagttgaggaggcgaagaagaagcctgatgatgtggccgtacctgaatcaactgaaggagatgatgaagctgaggataagaaggagaagcttaatgagtgggatgcaaagttcatgaaggatttcgatattaagacgatcttcgacattattctggctgctaactatctcaacgtccaaggtctttttgatctctgtagcaagaccattgcagattacataaaagatatgacgccagaggaagttcgagaactctttaacatcgagaatgatttcacacctgaagaagaagaagcaattcgcaatgaaaacgcttggacttttgagcaagatggaaaacaacaagttccaaaaccc

SEQ ID NO: 150 - DNA, 741 bp, Arabidopsis thaliana
atgtataagtggaatcttccttaccgaaaagatgacgtggagaccggccgtgaaggcggtgagagatctctgtatccgactatgcttgagagccccgaactccgatggggtttcatcagaaaggtatattccataatcgcattccagcttttagcaaccatcgccgtcgcctccacggtggtttttgtccgtccgatcgccgtgttcttcgccactactagtgccggtctcgctctctggattgtcttaatcatcacgcctcttatagtaatgtgtcctttgtactattaccaccagaaacatccagtgaattatttgcttctagggattttcacggtagctttggctttcgccgtcggattaacatgtgctttcaccagcgggaaagtgattcttgaggcagcgattttgacaacagtagtggtgctttccttaaccgtctacaccttttgggcagcaaagaaaggatatgactttaacttcctcggtccattcttgtttggtgctctcatcgttctcatggtctttgcccttattcagattttcttcccgttgggacggatctcagtgatgatctatggatgtttggctgcgataatattctgcgggtacatagtttacgatacagacaatctcatcaaacgttacagctacgatgagtatatttgggcagcagtttcgctctacttagatattatcaacctcttcttggctctccttaccattttcagagctgccgag

SEQ ID NO: 151 - DNA, 741 bp, Arabidopsis thaliana; identical to SEQ ID NO: 150

SEQ ID NO: 152 - DNA, 348 bp, Glycine max
atggcgactcttgattccgacgtgcctatggttcccgccggcgagccctcgagcagcgccggtccttcttccaagaagcccaagcgcttcgagatcaagaagtggaacgccgtcgctctctgggcttgggacatcgttgtcgataactgtgctatctgccggaaccacatcatggatctctgcatcgagtgccaagccaaccaggctagcgccactagcgaggaatgcactgtggcttggggagtttgtaaccatgcttttcacttccattgcatcagtcgatggctcaagactcgtcaagtttgtcctctagataacagtgagtgggagtttcagaaatatggccac

SEQ ID NO: 153 - DNA, 1329 bp, Arabidopsis thaliana
atgatggtgtttgtggtttttgttatgtgtaggtataagattttggaagagcttggtgatggtacttgtggtagtgtatataaagcagtaaatttggaaacatatgaagttgttgctgttaagaagatgaagagaaagttttattattgggaagagtgtgtgaatctgcgagaagttaaggctcttcgtaagctaaatcatcctcatatcataaagttgaaggagattgtgagagaacataatgagctttttttcatctttgagtgcatggatcacaatctgtaccatataatgaaagaaagggaacgacctttttctgaaggagaaataagaagttttatgtctcagatgctgcaagggctcgcacacatgcataaaaacggttatttccatcgagacctgaaacctgagaatttgctggtgaccaacaatatcctgaaaattgctgactttgggttggctagagaagttgcatctatgcctccttacactgaatatgtgtccacacgttggtatcgagctccagaagttttgctacagtcttcattatacactcctgcagttgacatgtgggcagttggagcgatactagctgagctttacgctttaactccgttatttcctggtgaaagtgagatagatcaattatacaaaatctgctgtgttcttggcaagccggactggaccacgttccctgaagcgaaaagcatatctcgaattatgagtattagtcacacagagtttccgcagacacgaattgctgatttacttcccaatgctgctcctgaagctattgatttgatcaatcgactttgctcatgggatccattgaaacgaccaactgctgatgaggcactaaatcatccatttttcagtatggctacgcaggcttcatatcctatccatgaccttgagctgaggcttgataatatggcggcgttgcctaatcttgagctaaatctctgggactttaacagagaacctgaagaatgttttcttggcttgacactagctgtgaaaccaagtgctcccaaactagaaatgctccgcaatgtatctcaggacatgagcgagaattttctcttttgccccggggtcaacaatgatcgagaaccatcagttttctggtctctgctctctcctgatgaaaacggcctccacgcgccagttgaatcatctcctttatctttgtctttcagtccaatgcagcaacacacagttggacctccacagtcgagtggcttcacaatgacatcatcaatgcaaccgaatatgttggaccgcccgtggatggccgtgtctgcgccgtttcaacaaagtcattacctc

SEQ ID NO: 154 - DNA, 1013 bp, Arabidopsis thaliana
gcctcgccgtgctctaggttctcggatggaggccgaggcggcggcgaagagggcgcgggagagcggtgacgcggcggcggccggtgccggcgagcaggcgggtatctctgccgtcatccctggatggttctccgagattagccccatgtggcctggtgaggcacactcattgaaggtcgaaaaggtactattccaaggaaagtcggactaccaaaatgtgatggtgtttcagtcctccacgtacggcaaggtgcttgtgctggatggagtgattcaggtcactgagagggatgagtgtgcttaccaagagatgattacccacctccccctttgctctatcaaagatcccaagaaggtgttagttattggaggtggagatggtggtgttttgcgtgaagtttcacgacattcctcggtggagcaaattgacatatgtgaaattgataagatggtggtagatgtctccaaacaattttttcctcatctggctgttggatttgaagacccccgtgtgtcattacacattggagatggcgtggcctttttgaaaaatgctccagagggtacttatgatgcagttattgtggattcctctgatccaataggaccggctcaagagcttttcgagaagcctttcttccagtcagttgccagagctttgcgtcctggtggtgttgtatgtacccaggcagagagcatatggttgcatatgcatattattgaagatattgtagctaattgtcgccaagtttttaaaggctcagtgaattatgcttggacaacagtaccaacataccctagtggtgttattggttttatgctttgctccaccgaggggcctactgttgatttccagcatcctatttttaacattgaggataatgagttctcaacaaaatcgaaaggaccacttaagttctacaattccgagatccactcagcatcattttgtttgccgtcttttgcgaagagagtcattggatccaaggccaactagatcaaagatcactgag

SEQ ID NO: 155 - DNA, 750 bp, Arabidopsis thaliana
atgacgagcgcatcggaactcttctctacacgaagatcacgtccgggtcgatccgacccggctttagaatccgacacttcttcctatcgacaccactcacaccatcatcatcgccgtcacggcgtccatcatcataatcagcgtcatgattccgacggctgtgatcctctccggcgacccactccccgtctccgacgcttctttcaccatccgattcaggaacgtagtagacctattcgtgatgttcaaggcactagtcagtatttaaatacggatagtactgatactgaaactcagagtagcagctttgttaacctaaatggatccgagaggcttcctggagctgttctgcttgcaagggatagacttttcgaaagattgagaggtgtttctttgtctagtaacagtcgaagcaacagagtttcattggatgatcaaagggagtcttcatttcattctatagatggagatccaatttttcaactagcagggcttcaagtgacctatgaatgcaacaagaaaccacaaggtcttactcaagatgctattaactgtttacaccggcaaacttttagctcagccgaggttaaatccgagatgagagattgtagcatatgtttagagagtttcactaaaggtgacatgctaatatccttaccctgtacccatagtttccattcttcttgcttaaacccttggcttagagcttgtggagattgtccttgttgccgtagagccatagcaaaggaa

SEQ ID NO: 156 - DNA, 750 bp, Arabidopsis thaliana; identical to SEQ ID NO: 155

SEQ ID NO: 157 - DNA, 474 bp, Arabidopsis thaliana
atgtccgacgaggagcatcactttgagtccagtgacgccggagcgtccaaaacctaccctcaacaagctggaaccatccgtaagaatggttacatcgtcatcaaaaatcgtccctgcaaggttgttgaggtttcaacctcgaagactggcaagcatggtcatgctaaatgtcattttgtagctattgatatcttcaccagcaagaaactcgaagatattgttccttcttcccacaattgtgatgttcctcatgtcaaccgtactgattatcagctgattgacatttctgaagatggatatgtcagtttgttgactgataacggtagtaccaaggatgaccttaagctccctaatgatgacactctgctccaacagatcaagagtgggtttgatgatggaaaagatctagtggtgagtgtgatgtcagctatgggagaggaacagatcaatgctcttaaggacatcggtcccaag

SEQ ID NO: 158 - DNA, 474 bp, Arabidopsis thaliana
atgtcagacgacgagcatcacttcgaatccagcgacgccggagcttctaagacttatcctcaacaagccggtaacattcgtaaaggtggtcacatcgtcatcaagggacgtccctgcaaggtggttgaggtatcgacttcgaagactgggaagcatggtcacgccaagtgtcactttgttgccattgatatctttacttctaagaagcttgaagatatcgttccttcttcccacaattgtgatgttccacatgtgaatcgtgttgattatcagttgattgatatctctgaagatggctttgttagtcttcttactgataatggtagcactaaggatgatctgaagctgccaacagatgaagctttactcacacagctcaagaatggatttgaggagggtaaggatattgttgtgtctgtcatgtctgcaatgggagaggagcagatgtgtgctctcaaggaagttggtcccaag

SEQ ID NO: 159 - DNA, 591 bp, Arabidopsis thaliana
atgagcgcttcgaggttcgtaaagtgcgtgacggttggtgatggagctgtcggaaaaacttgtttgttgatttcttacacaagcaacactttccctacggattatgtgcctaccgttttcgataatttcagtgccaatgttgtggttaatggaagcactgtgaatcttggattgtgggacactgcagggcaagaggattacaatagattaagaccactgagttaccgtggagcagatgttttcattttggccttctctcttatcagtaaagccagttatgaaaacgtctccaaaaagtggatcccggagttgaaacattacgcgcctggtgtccccatcgtccttgttggaacaaagcttgatcttcgagatgataaacagttctttatcgaccatcctggtgctgttccgattactactgctcagggagaggagctgaggaagcaaataggagcacctacttacatcgaatgcagttccaaaactcaagagaatgtgaaggcggtgtttgacgcagccatccgagtggtgttgcaaccgccaaagcagaagaagaagaagagcaaagcgcagaaggcatgctccattcta

SEQ ID NO: 160 - DNA, 1584 bp, Arabidopsis thaliana
atggtaataggagcagcagcgcgtgtagccatcggcggttgtcgaaagctcatctcgtcacatacctccctcctcctcgtctcttctcagtgtcgccagatgagtatggacgcacaaagcgtttctgaaaagcttaggagttctggtctattacgaactcaaggtctaattggaggcaagtggcttgactcgtatgacaataagacaatcaaggttaacaatccagcaaccggtgaaattatagctgatgttgcatgtatgggaacaaaagagacaaatgatgctattgcttcttcttatgaagcatttacttcttggagcagattgactgctggagagaggagtaaagttttacggagatggtatgacctcctgattgcacacaaggaagaacttggacaacttataactttggagcaaggaaaaccactcaaggaagccatcggagaggtagcatatggggcaagttttattgagtactatgcggaggaggcaaaacgtgtatatggtgatataattcctccgaatctgtctgatcgccgactgttggttctaaaacagcctgtcggtgttgttggtgcaattaccccttggaacttccccttagccatgattactcggaaggtcggccctgctcttgcttctggatgcacggtggttgttaaaccatctgaacttacgcccctaacagcacttgctgcggctgaacttgcacttcaagctggagttcctccgggggcacttaatgtggtcatgggaaatgctcctgaaattggggatgctttgcttacgagtccacaggtgagaaaaatcacgttcacgggatcaacagcagttgggaagaagttgatggcagctgctgcacctaccgtcaagaaggtttctctagaacttggcggcaacgcaccctctatagtatttgatgatgcagacctggatgtagctgtaaaaggaacgcttgcagcgaaatttaggaatagtggtcagacatgtgtttgtgcgaacagagtacttgtgcaagatggtatctatgataaatttgctgaggccttttctgaagcggttcaaaaattagaagtaggagatgggtttagggatgggacaacccagggtccacttataaatgatgcagcagtgcaaaaggtagagacatttgtacaagatgctgtttctaagggagcaaaaatcatcattggtggcaaaaggcacagtctagggatgactttctatgagcctactgttatccgcgatgtttcggataacatgatcatgtctaaggaggagatttttggacctgtagctccccttattcggttcaaaaccgaggaggacgctatcagaattgctaatgacacaattgcaggacttgctgcttatatattcacaaacagtgtccaaagatcttggcgtgtatttgaagcacttgaatatggacttgtaggggtgaacgaaggactcatatcaacagaggtggctccattcgggggagtgaagcagtctggtcttggaagggaaggatccaagtatggtatggacgaataccttgagatcaaatacgtatgcttgggagatatgaatagacac

SEQ ID NO: 161 - DNA, 1413 bp, Arabidopsis thaliana
atgtggcggcgaagtaacttaccggggaatccagattccgatcagagcatatctgaggaagaagaagaaaatgatatttcgccgaaggagaatgcgaaggaacaagagagaggattactacttcaaacaaagctcgaaaaactcataggttgtggtgagctaaattatgctagggaaaccggtgatgtaactctggaagcaactctacggaagatatcatcctctcttgaagatgtggtcgaagttcctgactcccccgaggagagttatatttcttcttccagaagaactggattagcatgcatatctgctcaggaaaatgggtcagatgatgagattacacatgatgaacaagtggcaacttggtctgctataagtaaagaaaccaagtcactaatccatttgaatggtgttgcttcagtcgcatcatcccatctatctggcttcagagccaagaaaagtagtaatggtctcaaagatcatgggaggccaaaattttcatttaactcacatactcatggagaaacgtcatccaagataagtgacatggctgaaatctttgagcctgatgtggaggatcaggctatagaagaggatccaattattgaatgccccaacagttttgatgaaagatcagaaaacaggcagggtgtttctgttgctgagtcgagagaagttttgcacgagtgcactaaagatgcggtacccaagcttcaagaaattcctctagataaaattagactgataaaaagaagctctgaactggacagcagacatgaagcaaaaagtcggaaatttactcataagggaaattcatctaacttccaagatagtgatactgatgatgaacttcctggacctatggatagtggatcatcaagcgatgatgagcctagttatcaaagctcagtgccaaacatttccaaccagaagaaacaatttgttggggaccggtttgatgaagcaataaaagcttcctctttgagcaaagaaggtctcttgttcggttcacctaaattatctggtggctctagcctgtatggcaagctgcaacagatcatgaaacaagaaaaagagacggaaatggaaatcatgaggaaattgcaaagcggaatcggagaagcagattcatcgggctatgttgatgttaaagtcatgtcaagacacttggagggaaagcttgtcgtctgcaaatgctctgtcattgacctctctggggactccctattactcaagaacacacaagctcttgcggcaaaagaaacagaaacaacaattatttttagtccgaaagtttgtgcggatgttgatatcgaaatagggaactttatccgagtatatgcgccatggaaggagttggaagtgcagaaaaccaatgatgtgattattttgtcttcatatttctcaagtttg

SEQ ID NO: 162 - DNA, 210 bp, Zea mays
atgtcggcgctgttcaacttcaactccttcctgaccgtggtgttgctggtgatctgcacctgctcctacatcaagatgcagttcccggcaatcctcaacgaccgcaccggattccgtggtttcttttggaaagctgccaggataggtgagcgattgagcccttgggtatcagtcgggtgcttggctatgggaatatccactattttcttc

SEQ ID NO: 163 - DNA, 948 bp, Arabidopsis thaliana
atgggtgggggaggagctatgaggtcggcggcgaagatagccggaattggcgtgtccaaggcggcgctccggccttcggcgctccctacggagcagacggtccgcaacgcgtcgcgaccaacggcggtctccggagtgtcgtcgcagtcggcgaaatccgcggaggtggcgccgctgcacacggcagctgcctgggacgattgggacttcgccgaggatggcgaattggtcgtgccgaggatggtgttcggttctgtccccactctcgatgaagctaaggaagccaccgcagagttgaaggacgctattgatcaagtatatctttgtcctgagacttctcaatattcatctcccggtggtcaagtctctgctttgtctcccactctctatgggccagtgaacagatcttgtgtcattgatgctatttcagatcctacggccccaaagcatgccattcaggcttttcatttgcttagcactagtcgtgaggcccaggctgttgtggcttcacttgcttgtgacccaaatgtatggaatgcagtcatggaaaattctgctgtcagtagtttcttccaatcacaacagtcagtggctggttttggagcagcagaaaattctgaggaagtggataagttatcaagctgtgcttctgaaacagtcgaatcccctgagaaattggaagggtcggctgagtctcacccggggaacatgtttgacgatttcatgggtcttctgcagaatgtgaagcttacagttattgaattggtaagtaggttgtctggtttccttcagaacatattcccaacacctgatgctatgagagagaaaatgtctttcgatgctgatgggaacactaaagcaagtttcatggatagtaaaattagcatgggaggaaccttcataggtttggcagtgctggtgataatggtgatcgtgacaaagagagct

SEQ ID NO: 164 - DNA, 456 bp, Arabidopsis thaliana
atggcggaggagcagcagcatcagagatggcaggagggccaccgcctgtgcgccaacaattgcggcttcttcggcagccccgcgacgctggacctctgctccaagtgctaccgcgacctataccagcagcagccagcaggcgcggcggcgggcccctccgctcccaccgcgtcggccttccagcattcctcctcggcagtctccggcgcggcggcggtctctcccgatctcgaacctcccgcgacggcccctgctggcgccaaggcgggcaggtgctccagctgccggaagcgcgtgggcctgacggggttcgcgtgccgctgcggagctaccttctgcggcgtgcaccgctacccggagcggcacgcgtgcgccttcgatttccgggccgccggccgcgacgccatcgcgcgcgccaaccccgtcgtcaagggcgataagctcaaggacaagatc

SEQ ID NO: 165 - DNA, 366 bp, Arabidopsis thaliana
atggagcacggttcgttcacgaatgttagtcatgcttcgtttactttatcggaagaagatcacacacttgctaatgctgttagattcgtcttaaaccaagatcccagagtaaccgtggctgcatacaccatcccacatccttcccttgaacaggtcaatatccgggtccagacaacaggtgatccagcaagagaggtttttaaagatgcatgtcaagagctcatgcaaatgaacagacatgtgagaagcgtttttgataaggctgttgctgagtataaggatgaacaaaagcgtaaggaggaggctgaagaagaagagcttaagaggcagagggatctatttgggtccatggacattgaaaacaac

SEQ ID NO: 166 - DNA, 894 bp, Glycine max
atggtgtacgtcaaggctcagaaatcaaaagcctacttcaagagatatcaagtcaagttcaagagaagaagagagggaaaaaccgattaccgtgccaggattcggttgattaatcaggacaagaacaaatataacactccgaaataccgatttgtggttcgctttagcaacaaggacattgttgcacaaataatatctgctagcattgccggcgatttagttcttgctacagcatattcacatgagctgccacgatatggtcttgaagtaggacttacaaattatgcagcagcttattgcactggtctcctgttggcccgaagagtcctcaaaacacttgaaatggatgaggagtatgaaggaaatgttgaggctactggagaggattattcagtggaacctgccgagagcaggaggccattccgtgcactccttgatgttggtcttgttaggactacaacaggaaatcgcgtctttggtgcccttaagggagctctggatgggggtttggatattcctcacagcgacaagaggtttgctgggtttgataaggagaagaaggagcttgatgctgaggttcatcgcaaatatgtttttggtggacatgttgctgcctatatgaagatcttggcagaagatgaaccagagaaataccagtcacacttcagcgaatacatcaaacgtgggatagaggctgatggtattgaggcactttacaagaaggttcatgctgccatccgtgctgatcctactctcaggaaatctgataaggagcccccgaaggagcacaagaggtacaacatgaagaagctgacttatgaggaaaggaaggctaagttgattgcacgcgtggcggctatcaactctgctgctgatagtgatgaagatgatgag

SEQ ID NO: 167 - DNA, 942 bp, Zea mays; identical to SEQ ID NO: 50

SEQ ID NO: 168 - DNA, 1137 bp, Zea mays
atgggtgccgagttgggagaagcgggtgtccctgcccgggacatggtggacgcgctggaaggcgtgcgctccatcctgctgaaaccgtcggagcgcctcgacgacaagcgcttcacgaggatcgccggcgccgacttcgacgacgccggcctcggcctcgccgggttgctcggctcgctcgcgtccacggggttccaggcctccaacctcggcgacgccatcgacgtcgtcaaccagatgttggactggaggttgtcccacgagaagccaagcgacgactgcgctgaagctgaactcgatcctgcgtacagagaatccgtcaagtgcaagatattcctggggttcacttcgaaccttgtgtcttccggtgttcgggagatcatccggtttcttgttcagcatcgcatggtggacgttattgttacgactgctgggggtatagaggaggacctcatcaaatgccttgcgccaacctacagaggcgacttcactctgcccggagcgctgctgcggtccagaggacttaaccggataggaaacctgctggtgcccaatgacaactactgcaagttcgagcactggatcatgccgatcctcgacaagatgctgctggaacagtccacccaaaatgtttggacgccgtccaaggtgattgctcgccttggcaaggaaataaatgacgaaagctcctacctttattgggcgtacaagaacaacatccctgtgttctgcccagcattgactgacggatcaattggggacatgctgttctgtcactcggttcacagtccaggtcttgttgtcgacattgtacaagatgtacggctgatgaacgcggaaaccatccacgcaagcccaaggaagacagggattatactccttggcggaggccttccgaagcatcatatatgcaacgccaatatgctgcgcgacggagctgactatgcggtgtatgtcaacacagctcaggagttcgatggcagtgattccggggcgcggcctgacgaagcggtttcatggggaaagatcaagagctcagcgagaactgtgaaggtgcattgtgatgcgacgattgcctttccacttcttgtggctgcaacatttgcacgcaaggttcacggcactaaatcaacaaac

SEQ ID NO: 169 - DNA, 1500 bp, Oryza sativa
atgagttcctccccgtcctttggtctcctggccttagcagcagtactcctagcactgaacttagcacaacatggctccctcgccgcaaccgtcggccccagggtcatcgtcgtcggcgccggcatgtctgggatctcggcggcgaagaggctgtcggaggccgggataaccgacctgcttattctggaagcgacggaccacatcggcgggcggatgcacaagacgaacttcgccggcatcaacgtcgagttaggcgccaactgggtggagggcgtgaacggcggcaagatgaaccccatctggcccatcgtcaactccaccctcaagctccgcaacttccgctccgacttcgactacctcgctcagaacgtctacaaggaggacggtggcgtctacgatgaagattacgtccagaagagaattgaactggcggacagcgtggaagagatgggggagaagctctctgccactttgcacgccagtggcagagacgacatgtctatccttgccatgcagcgcctcaacgaacaccagccgaacgggccggcgacgccggtggacatggtggtggactactacaagttcgactacgagttcgcggagccgccgcgcgtgaccagcctgcagaacaccgtgcctctcgcgaccttcagcgacttcggcgacgacgtctacttcgtcgccgaccagcggggctacgaggccgtcgtctactacctcgccggccagtacctcaagaccgacgataagtctggaaagatcgtcgacccgcgcctgcagctcaacaaggtggtgcgagagatcaagtattccccgggtggcgtcaccgtcaagacagaggacaactcggtgtacagcgcagattacgtcatggtttctgcgagcctgggtgtcctgcaatccgatctcattcagttcaagcccaagctacctacatggaaggttagggcgatctaccaattcgacatggccgtgtacaccaagatcttcctcaagttccccaggaagttctggcctgaagggaaaggaagggagttcttcctctacgccagcagcaggagaggttactacggagtgtggcaggagttcgagaagcagtaccctgacgccaatgtcctcctggtcaccgtgaccgacgaggagtcgaggcgcatcgagcagcagtcggacgagcagaccaaggcggagatcatgcaggtgctgcggaagatgttccccggcaaggacgtcccggacgccaccgacatccttgtcccgaggtggtggtccgacaggttctacaagggcaccttctccaactggccagttggcgtcaaccgctacgaatacgaccagcttagggcaccggttgggagggtatacttcaccggcgagcacaccagcgagcactacaatggctatgtccatggagcctatctttcaggtatcgactccgctgaaattctcatcaactgcgcccagaaaaagatgtgcaagtaccatgtccagggaaagtatgac

SEQ ID NO: 170 - DNA, 2130 bp, Arabidopsis thaliana
atgtcagcgtcgccgtcgtcgatgagcggcgccggcgccggcgaggcgggggtgcggacggtggtgtggttcaggcgggacctgcgcgtggaggacaacccggcgctggcggcggcggcgcgggcggccggggaggtggtgccggtgtacgtgtgggcgccggaggaggacgggccgtactacccggggcgggtgtcccggtggtggctcagccagagcctcaagcacctggacgcctcgctccggcggctcggcgccagcaggctcgtcacccgccgctccgccgacgccgtcgtcgcgctcatcgagctcgtccgcagcatcggcgccacgcatctcttcttcaaccacctctacgacccgctgtcgctggtgagggaccaccgggtgaaggcgctgctgacggccgagggcatcgccgtgcagtcgttcaacgccgacctgctgtacgagccatgggaggtggtcgacgacgacggctgcccgttcaccatgttcgcgccgttctgggacaggtgcctgtgcatgcccgacccggcggcgccgctgctgccgcccaagaggatcgcgcccggcgagctgccggcgaggaggtgcccctccgacgagctggtgttcgaggacgagtccgagcgggggagcaacgcgctgctggcgagggcgtggtcgcccgggtggcagaacgccgacaaggcgctggccgcgttcctcaacgggccactcatggactactcggtgaaccggaagaaggccgacagcgccagcacgtcactgctgtcgccgtacctgcacttcggcgagctcagcgtacgcaaggtgttccaccaggtgaggatgaagcagctcatgtggagcaacgaggggaaccacgccggcgacgagagctgcgtcctcttcctccggtccatcggcctcagggagtactcgaggtacctcacgttcaaccacccgtgcagcctggagaagccactcctggcgcacctcaggttcttcccctgggtggtcgacgaggtgtacttcaaggtgtggaggcaggggaggacagggtaccctctcgtcgacgccgggatgcgcgagctctgggccaccggctggctgcacgaccggatacgcgtcgtcgtctccagcttcttcgtcaaggtgctccagcttccatggcgctgggggatgaagtacttctgggacaccctgctcgacgccgacctcgagagcgacgcgctcggctggcagtacatctccggctctctccccgatggccgtgagctcgaccgcatcgacaaccctcagcttgaaggatacaagtttgatccgcacggggagtatgtccggcgatggctgccggagctggcaaggctgccgacggagtggatacaccacccatgggacgcaccggagtcggtgctccaggctgcagggattgagctaggctccaactatcctctccccatcgtggagctggacgcggcgaagaccaggctgcaggatgcactgtcagagatgtgggagctcgaggccgcgtcacgcgcagcgatggagaacggaatggaggagggcctcggcgactcctccgacgtgccgccgatcgccttcccaccggagctgcagatggaagttgaccgagcaccggcccagcctactgttcacggaccgacaacggctggccggcgacgagaggatcagatggttcccagcatgacctcctcgctggtcagagctgaaacagaactttcagcggattttgacaacagcatggacagtaggccggaggtgccgtcgcaggtgctcttccagcctcggatggaaagggaagaaacagtggacggcggcggtggcggcggaatggtcggcaggagcaacggcggcggccaccaaggccaacaccagcagcaacagcacaactttcagactacaattcaccgggcacggggcgttgcgccgtctacgtcagaggcatcaagcaactggactgggagagaaggcggcgtggtgcccgtctggtcgcctccggcagcgtcaggcccctcagatcactacgctgccgatgaagctgacattaccagtagaagttatttggacaggcatccacagtcgcatacgttgatgaactggagtcagctctcgcagtcattg

SEQ ID NO: 171 - DNA, 315 bp, Synechocystis sp. PCC 6803
atggaaggtgtaggtgctaggcagaggaggaaccctctgatacccagaccaaacggttcaaagaggcatctgcagcatcagcatcagccaaatgctgccgagaagaagaccgccgcgacatcgaattacttcagtatcgaggcgttcctcgtgctcgtcttcctcaccatgtcattgctcatacttccattggtgcttcccccattgcctccgccgccatcgctgctgctgctgctgccagtctgcctgctcatcctgctggttgtgctggccttcatgccaacggatgtgcggagcatggcttcctcttacttg

SEQ ID NO: 172 - DNA, 888 bp, Arabidopsis thaliana
atggttactgcgacagcatcaactccattttcactctcgtcgtccgtggttttcacgcgccgtcgtaatttcaaacgttttccagtttgcgccagtctttctccggaggtttctcctcttctcagagcagctcatcacactgtggataattatgtaaagagtgggatgattattggtttaggatctggagaagcttcagattttgctatacgttatttgggtcaacaacttggttctggttctttacataatgttgttggtgtaccaatgtctgctcgaagtgcgagtgaagcagcaaagtatggaatccccttggaatattaccgggatggtgttcagattgattttgcatttcatgatgctgatgctgtagaagagaatacgcttattgcagttattggacggcggagaagttcacaggaagatgactatattctgaaacaaaagtctattgtaaaagtagctgatgaggcagtcttcatgataaaggaagaacaatacaaagccggtcttgaaggttctatccctgttttagttcaatctcttaattggttggccatagctgaggagatagatgacttgtatctaggcgatgcagaggtgtggagaagagcttctgttgaaaatgaaggccctcttggaggagactttcctatagttaccagtgatggtcacaacattcttgatgttatatttacaactccgattcgaagcctcgctgacttggctacaagccttgataagattgatggggttgtggaccatggactaattatcaaaactcgatgcacggtggtgattgcagaagaaactgttgtaagaagtgttaccttgcagaccagtgcattggagggtggtgtacgaacctatggacagactttgcaaaag

SEQ ID NO: 173 - DNA, 327 bp, Zea mays
atgtcaggggtttgggtgttcaagaacggggtggtgagattggtggagaagcagcaggcgacggcggggacggcggtggcgggagggaggaggaaggcgctggtgcacacgccgagcgggcaggtggtgtcgtcgtacgcggcgctggaggcgcggctgacggcgctcgggtgggagcgctactacgaggacccctccctcttccagttccacaagcgtggctccctcgacctcatctccctccccgccgacttctccgccttctcctccgtccacatgtacgacatcgtcgtcaagaaccgcgactccttccgcgtcgtcgacgcc

SEQ ID NO: 174 - DNA, 1254 bp, Oryza sativa
atgaccctcaccgacgcccaaatatccatcgtcaaatccaccgcccctgtcctcaagcaacacggcgaagccatcaccaccgtcttctacaacgacctcatcacggagaacccctccctcaaaaacatcttcagccttacctcgcaagccaccggcgcccaaccgcgcgccctcgcccacgccgtcctcgcctatgccacctacatcgacaacctttccgcgctctcggaggcggtcgcgcgcattgcgcacaagcacgtgtctctccaagtcgagccggcgcagtacgctattgtcggccaatacctgatccaagccatcggcaaggttctgggcgatgcggcgactcccgagattgtagacgcttggacggcggcatatggagttttggcgaacgtttttattggcgtcgagggaggcatgtacgaggagaatgaaaagaaagaccactggaaggggtggaggaagttcaggattgcgaggaaggtggaggagagcagttccatttcgagcttttacctgaggcccgtggatggggccactctgcccaagtatctgcctggccagtatgtgtctgtgcaggtgctggtctcgcagttggggtatttgcagagtaggcagtacagcttgagcgaggcgccgaaggagggcgggatggaggaatatcgtattagtgtcaagagggaggaaggggaaaccggtgcgccgggactggtttccaacttgctccatggtatgcaagagggcgcggaggtggaggttagtcatccccagggcgagttcttccttgaccccgcggatgcaagcaaggagggggtgccggctgtgttgatctcggtgggcgtgggcgctactccgatgatggctatcctcaagagcttgcttcaggagaatgtcaagaggagaccggtgtcgtggatccatgcgagcaagtcgagctcgacgcagccgtttggcgaggaggtgaggcgcatcgtcaaggagaaccctgagcaggtgtcggcacatgtgtttctgaagacggtggctggtacggatcaggccggtgtgcattacgattttgcggatacgaggatggacttgaccaagttggatggggagcgggatctgcatttggcggataagaggaccgagtactacatctgcggaccggagacgtttatggtggaaaccaggaaagtgttggttggtcttggagtagataagagcaaggtgcacttggagctttttgctacgggtttcgttgctgatgag

SEQ ID NO: 175 - DNA, 867 bp, Arabidopsis thaliana
atggcgaggaacgggattgggagttcaggagggaagaagaatggggctgggcagtttttcttagcgacgctgcttctttggcttgtctccgtcgtgtttgagattgctttcaatctccggacggagcttctctgggtgatttgcggtggatgcttctttcaattgatgaattgggttgttcgttcatggatttctcgtgaccctatatttgttaatacctctgtctcgcttttgcactcaatcatcacctccgcatcagtggttttcatacttctcaatcaatgcttagccaaaggtttagacgagatgtttgatcattctgagttggttggtgggacttggaaatgggcatatccagctttgtgtttctcatgcggctactttgcatatgaccagtgggatatgcttcagtaccggttatacagcggcttaataccttctattcttgttcaccatctagtcctccttgtttgcttcacattggcactataccgaaatgtaaccatcaactaccttattcttactctcatctgtgagatgcattcgatctttctacacgtgaggaagctaaggagaatggcaggaatccgagacagcaacacagcattggtgaaactggagtgggtattaaactggacagcctttgtgtttgcgagatgcattcctcacattctcatcactatcaagctgatcaaagacgcacacaagtttgggaaaggcgtggagttaccactcgctctgtctggtatggcaggaatgaacattcttaatgttggcctcgggttggatctgtttcatgctttcagaagagagagaagccacagaagaaaccaagagaacggcaaccttcacgaccatggagaataa

SEQ ID NO: 176 - DNA, 2175 bp, Arabidopsis thaliana
atggagtttggatcttttcttgtgtccttagggacatcttttgttatcttcgtcattctcatgcttctcttcacctggctttctcgcaaatctggaaatgctcccatttattacccgaatcggatccttaaagggctggagccatgggaaggcacctccttgactcgaaacccttttgcttggatgcgtgaagctttgacttcctctgaacaagatgtcgttaacttatccggcgtcgatactgctgtccactttgtcttcttgagcactgttctggggatatttgcttgttccagtcttcttctcctaccaactctactgcctctagccgctacagacaacaacataaagaacacaaagaatgcgacagataccacaagcaaaggaacttttagccaacttgataatctatcaatggctaacatcacaaaaaaaagttcgaggctgtgggcgttcctaggagctgtttactggatatctttggtcacatatttcttcttgtggaaagcttataagcatgtctcttcattgagagctcaagctctgatgtctgctgatgtaaaacccgagcaattcgctattcttgttagggatatgcctgcaccacctgacgggcagacacagaaagagtttattgattcttatttcagagaaatataccctgagacattctacagatcgcttgtcgcaacagaaaacagcaaggttaataaaatatgggaaaaattggaaggttacaagaagaagcttgcgcgagcagaagcaatattagcagcaactaataaccgtcccacgaacaaaaccggcttctgtgggctagtcggtaaacaagtagacagcattgagtattacactgagctaatcaacgagtctgtagccaaactggaaacagagcagaaagcggttcttgctgagaagcagcaaaccgcagcagtggttttcttcacaaccagggttgctgctgcatcagcagctcagtctctgcactgccagatggttgataaatggactgtgaccgaagctcctgagccacggcagctcctatggcagaatctcaacatcaagctcttcagcagaataatccggcaatacttcatctacttctttgttgcagtgaccattctgttttacatgataccaatcgcgttcgtctctgccatcaccactcttaagaatcttcagaggattattccgttcataaagccggttgtggagataaccgccataagaaccgttttggagtctttccttcctcagattgcgctcattgttttcttggccatgttgccgaagcttctcttgtttctctccaaagccgaggggattccttcacagagccatgccattagggctgcttcagggaagtacttttacttctcggtctttaatgtcttcattggtgttacccttgctgggactttgttcaacacagtgaaggatatcgcgaaaaatcccaaactcgacatgattattaaccttttggctactagcctccctaagagcgcaactttcttcctgacctacgttgctctcaagttctttatcggttatggccttgagctgtctcggatcatacctttgataatcttccacctgaaaaagaagtatctctgcaaaaccgaagcggaggtcaaagaagcttggtacccgggagacttaagctatgcgactagggttcccggagacatgctcatcctcacaatcacgttctgctattcagtcattgctcctcttatcctcatattcggcatcacctactttggtttaggctggctagtcctcaggaatcaggcgttgaaagtgtacgttccatcatacgagagctatggaagaatgtggccgcatattcaccagcgcatactagcagcgttgtttctattccaagtggtaatgtttggctacttaggagccaagacattcttctacacggcccttgtgatccctctcattatcacctctctcatcttcggatatgtgtgccgccagaaattctacggagggttcgaacacacagctctcgaggtagcttgccgtgagctgaagcagagtccagacctagaggagattttcagagcatacattccgcatagcttgagctctcacaaaccagaagaacacgagttcaaaggcgcaatgtctcgttatcaagatttcaacgcaatagcaggcgtttaa

SEQ ID NO: 177 - DNA, 1344 bp, Arabidopsis thaliana
atggatattttcgacaactctgatcttgaataccttgttgatgaatttcacgctgatttcgatgatgatgagccctttggagaggttgatgtcaccagtgagtctgattccgatttcatggactccgattttgatttcgagctgagtgagagtaagacgaacaatgaaacatcagcgttagaagctaggaatggaaaagatattcaagggattccatgggagagcttgaattacacgagggatagataccgtgagaatagattgctgcactataaaaactttgagagtctgtttcgatccagagaagagcttgataaggaatgcttgcaagtagagaaaggaaagaacttttatgactttcagttcaatacaaggcttgtcaagtccacaatagcgcattttcagctgaggaacttggtatgggcaacatcaaagcacgatgtgtatttcatgaacaactactctctcatgcactggtcatctttgttgcaaaggggcaaagaagtacttaatgtggcaaagcccattgttccttcaatgaagcagcatggatcgttgtcacagtctgtatcaagagtccagataagcaccatggcagttaaagacgatttgaagttgcgggagggttccaaggagagcttatctaaaatcaacgaacctgaggttgctttctgcactaaactaacatcagctgataacgacatcaccaattcggttgacatctacaacgcacctagtggctcgttaagggttatgaccgcgaacaatgactgtactgtccggctatttgatgccacaaactttgccttgctcaacagatttgcctttcactggtctgtaaataacatctccaccagtccagatggtaagctagtggctgttctaggagacagtcctgagtgcttactagcagataccggatctggaaaagtgatccacggactcgaaggccatctcgactactcgttttcatcagcatggcacccaaacggtcaaatcttagccacgggtaaccaagacacaacctgtagactatgggacgtaaggaacctgtctcaatcactcaaagtcttgaaaggaaacatgggagctatcagagccttgaggttcacgtctgatggacggttcttagccatggctgagccagcggactttgtacacttgtttgacacggaagctggttacagtcagtgtcaagagattgatctgtttggagaaatagcgggaatctcgtttagccccgacacggaggcactgttcgtgggagtagctgatcgtacgtacggcagcttgttggagtttaacaggaagcgaaaccactcgtatgttgattccatattctga

SEQ ID NO: 178 - DNA, 690 bp, Arabidopsis thaliana
atggatattttcgacaactctgatcttgaataccttgttgatgaatttcacgctgatttcgatgatgatgagccctttggagaggttgatgtcaccagtgagtctgattccgatttcatggactccgattttgatttcgagctgagtgagagtaagacgaacaatgaaacatcagcgttagaagctaggaatggaaaagatattcaagggattccatgggagagcttgaattacacgagggatagataccgtgagaatagattgctgcactataaaaactttgagagtctgtttcgatccagagaagagcttgataaggaatgcttgcaagtagagaaaggaaagaacttttatgactttcagttcaatacaaggcttgtcaagtccacaatagcgcattttcagctgaggaacttggtatgggcaacatcaaagcacgatgtgtatttcatgaacaactactctctcatgcactggtcatctttgttgcaaaggggcaaagaagtacttaatgtggcaaagcccattgttccttcaatgaagcagcatggatcgttgtcacagtctgtatcaagagtccagataagcaccatggcagttaaagacgatttgaagttgcgggagggttccaaggagagcttatctgtaagaaaatcaacgaacctgaggttgctttctgcactaaactaa

SEQ ID NO: 179 - DNA, 1755 bp, Arabidopsis thaliana
atgtgtggaatacttgccgtgttaggatgttccgatgattctcaggccaagagagttcgtgttcttgagctttctcgcagattgaggcacagaggacctgactggagtggcttatatcagaacggagataattacttggcccatcaacgtcttgccgtcatcgatcctgcttccggtgatcaacctcttttcaacgaggacaagaccattgttgtcacggtgaacggagagatttataaccatgaggagctgagaaaacgtctgaagaatcacaagttccgtactggtagtgattgtgaagtcattgctcacttgtacgaggagtatggtgtggattttgttgatatgttggatggaatattctcctttgtgttgctcgacacacgagataactctttcatggtggctcgtgatgcgattggtgtcacttcgctctacattggttggggactagacggatctgtgtggatatcttcagagatgaaaggcctaaacgatgactgtgagcatttcgaaacgtttcctccaggtcatttttattcaagcaaattaggagggtttaagcaatggtataatcctccttggttcaatgaatctgttccttcaacgccttatgagcctcttgcgataagacgcgcctttgaaaacgctgtgattaagcggttgatgactgatgttccatttggagttttgctctctggtggtcttgattcttcccttgttgcctccatcactgcacgtcacttggccggtactaaggcggctaagcaatggggtcctcagctccattccttttgcgttggtcttgagggctcaccggacttgaaggcagggaaagaggtggcggaatatttggggacggtgcaccacgagttccacttctcggtgcaggacgggattgatgcgatagaggatgtgatttaccatgttgagacctatgatgtgacgactatcagagcgagcacaccgatgttcttgatgtcccggaaaatcaagtctctaggggtcaagatggttctctccggcgaaggtgcggacgagatctttggagggtacctctatttccacaaggcacctaacaagaaagagtttcaccaagaaacttgtcgcaagatcaaggctcttcacaagtatgactgtctaagagccaacaaatctacctctgcctttggactagaggcacgtgttcctttccttgacaaagacttcatcaacacagctatgtctctcgaccctgaatccaagatgatcaagccagaggaaggaaggatcgagaaatgggttctaaggagagcctttgacgacgaagaacgtccttatctaccaaaacacattctctacagacagaaagaacagttcagtgatggtgttggctacagttggatcgatggcctgaaagatcacgctgctcaaaatgtcaatgacaagatgatgtcgaacgcggggcatatcttccctcacaacactccaaacactaaagaagcttactactacagaatgatctttgaaaggttcttcccgcagaactctgcgagactaacggttcctggaggtgccaccgtggcttgttcgactgcaaaggcagtggagtgggatgcaagctggtccaacaatatggatccatcaggaagagccgctatcggagttcacctttcggcctacgatggcaagaacgtggcattgaccataccaccacttaaggcaattgacaacatgccgatgatgatgggtcaaggagttgtgattcagtcataa

SEQ ID NO: 180 - DNA, 1371 bp, Arabidopsis thaliana
atgtgtggaatacttgccgtgttaggatgttccgatgattctcaggccaagagagttcgtgttcttgagctttctcgcagattgaggcacagaggacctgactggagtggcttatatcagaacggagataattacttggcccatcaacgtcttgccgtcatcgatcctgcttccggtgatcaacctcttttcaacgaggacaagaccattgttgtcacggtgaacggagagatttataaccatgaggagctgagaaaacgtctgaagaatcacaagttccgtactggtagtgattgtgaagtcattgctcacttgtacgaggagtatggtgtggattttgttgatatgttggatggaatattctcctttgtgttgctcgacacacgagataactctttcatggtggctcgtgatgcgattggtgtcacttcgctctacattggttggggactagacggatctgtgtggatatcttcagagatgaaaggcctaaacgatgactgtgagcatttcgaaacgtttcctccaggtcatttttattcaagcaaattaggagggtttaagcaatggtataatcctccttggttcaatgaatctgttccttcaacgccttatgagcctcttgcgataagacgcgcctttgaaaacgctgtgattaagcggttgatgactgatgttccatttggagttttgctctctggtggtcttgattcttcccttgttgcctccatcactgcacgtcacttggccggtactaaggcggctaagcaatggggtcctcagctccattccttttgcgttggtcttgagggctcaccggacttgaaggcagggaaagaggtggcggaatatttggggacggtgcaccacgagttccacttctcggtgcaggacgggattgatgcgatagaggatgtgatttaccatgttgagacctatgatgtgacgactatcagagcgagcacaccgatgttcttgatgtcccggaaaatcaagtctctaggggtcaagatggttctctccggcgaaggtgcggacgagatctttggagggtacctctatttccacaaggcacctaacaagaaagagtttcaccaagaaacttgtcgcaagatcaaggctcttcacaagtatgactgtctaagagccaacaaatctacctctgcctttggactagaggcacgtgttcctttccttgacaaagacttcatcaacacagctatgtctctcgaccctgaatccaagatggtaactacaaaactcacatcacaaactcaataccttccttcacaagttaacgttgaacaaattttctatatgggtttttctagatcaagccagaggaaggaaggatcgagaaatgggttctaa

SEQ ID NO: 181 - DNA, 1539 bp, Arabidopsis thaliana
atgtgtggaatacttgccgtgttaggatgttccgatgattctcaggccaagagagttcgtgttcttgagctttctcgcagattgaggcacagaggacctgactggagtggcttatatcagaacggagataattacttggcccatcaacgtcttgccgtcatcgatcctgcttccggtgatcaacctcttttcaacgaggacaagaccattgttgtcacggtgaacggagagatttataaccatgaggagctgagaaaacgtctgaagaatcacaagttccgtactggtagtgattgtgaagtcattgctcacttgtacgaggagtatggtgtggattttgttgatatgttggatggaatattctcctttgtgttgctcgacacacgagataactctttcatggtggctcgtgatgcgattggtgtcacttcgctctacattggttggggactagacggatctgtgtggatatcttcagagatgaaaggcctaaacgatgactgtgagcatttcgaaacgtttcctccaggtcatttttattcaagcaaattaggagggtttaagcaatggtataatcctccttggttcaatgaatctgttccttcaacgccttatgagcctcttgcgataagacgcgcctttgaaaacgctgtgattaagcggttgatgactgatgttccatttggagttttgctctctggtggtcttgattcttcccttgttgcctccatcactgcacgtcacttggccggtactaaggcggctaagcaatggggtcctcagctccattccttttgcgttggtcttgagggctcaccggacttgaaggcagggaaagaggtggcggaatatttggggacggtgcaccacgagttccacttctcggtgcaggacgggattgatgcgatagaggatgtgatttaccatgttgagacctatgatgtgacgactatcagagcgagcacaccgatgttcttgatgtcccggaaaatcaagtctctaggggtcaagatggttctctccggcgaaggtgcggacgagatctttggagggtacctctatttccacaaggcacctaacaagaaagagtttcaccaagaaacttgtcgcaagatcaaggctcttcacaagtatgactgtctaagagccaacaaatctacctctgcctttggactagaggcacgtgttcctttccttgacaaagacttcatcaacacagctatgtctctcgaccctgaatccaagatgatcaagccagaggaaggaaggatcgagaaatgggttctaaggagagcctttgacgacgaagaacgtccttatctaccaaaacacattctctacagacagaaagaacagttcagtgatggtgttggctacagttggatcgatggcctgaaagatcacgctgctcaaaatgtcaatgacaagatgatgtcgaacgcggggcatatcttccctcacaacactccaaacactaaagaagcttactactacagaatgatctttgaaaggttcttcccgcaggtgagagtcttataa

SEQ ID NO: 182 - DNA, 879 bp, Arabidopsis thaliana
atgggagtcatgatcaatcaccatttcctcgcttttatcttcggcatcttaggaaacgtgatatccttccttgtattcctcgctccagtgccaactttttatagaatatacaagagaaaatcgacggaaagtttccagtcgctaccgtaccaagtgtcgctatttagctgcatgctatggctctactacgcattgattaagaaagacgcttttctcctaattaccatcaactcctttggctgcgtcgtggagactctctacatagccatgttcttcgcttacgccaccagggagaaaaggatatcggctatgaagttgttcatagcaatgaacgttgccttcttctcgttgattctaatggtaacacatttcgtggttaaaactcctcccctccaagtctctgtactcggctggatttgtgttgccatttctgtttctgttttcgctgcccctctaatgatcgtggctcgtgtgataaagacaaagagtgtggagtacatgcccttcacgctttctttcttcctcactataagcgccgttatgtggttcgcttatggtttattcctcaatgacatatgcatagcgattccaaacgtggtgggattcgtactagggctgttgcaaatggttttgtacttggtttacaggaactcaaatgagaaaccagagaagattaattcgtcagaacaacaacttaagagtattgtcgtgatgagtccgttaggtgtgtcggaagtgcacccagttgtgacggaatcggtggacccactctctgaagccgttcatcatgaggatctgtccaaagttactaaagtggaggagccgtcaattgaaaacggcaagtgctacgtggaggctactcgtcctgaaaccgtttga

SEQ ID NO: 183 - DNA, 1746 bp, Arabidopsis thaliana
atggagaaagtgaccaactcagacttgaaatcctctgttgatggtggcgttgttgatgtgtatggagaagattcagccaccattgagcacaacataactccttggtctctctctgtttctagtggatattcattgctgagagatcctcgctacaacaaaggacttgctttcactgagaaagagagagacactcattacttgcgtggtcttctccctccagttgttcttgatcaaaagcttcaggagaagaggctgttgaacaatatccgacaatatcaattcccattacaaaagtacatggctctgacagaacttcaggaaagaaacgagagactgttttacaagctattgatagataatgttgaggagctacttcctattgtttatactccaactgttggtgaagcttgtcagaaatttggaagtattttcaggcgacctcagggtttattcatcagtttaaaagacaagggaaagattctagatgtgttaaagaactggcctgaaaggaacatacaggttattgttgttactgacggtgaaaggattttaggattaggagatcttggatgtcaggggatgggtataccggttggtaagttggcgttatattcagcacttggaggtgttcgtccttcagcgtgtttacctgtcaccattgatgtgggaacaaacaatgagaaactgttgaatgatgagttctacataggactcaggcaaaagagagcaacgggacaggaatatagtgaactcttgaatgaattcatgagtgctgtgaaacagaactatggtgaaaaagttcttattcagtttgaagattttgctaatcataatgcctttgagttgcttgcaaaatacagcgatactcatctcgtcttcaacgatgatatacaggggacagcatcagttgttttagcaggattagtttccgcacagaagttaacgaatagcccacttgcagagcataccttcctctttcttggtgctggtgaagctggaactggaatagcagaactcatagctctctatatgtcaaaacagatgaatgcttcggtagaggaaagccgcaagaaaatctggcttgttgattccaagggattgattgttaactcccgcaaagattcacttcaagactttaagaaaccatgggctcatgaacatgaaccagtcaaagacctcttaggtgctatcaaggcaataaaaccgactgttctgattggatcttctggcgttggacggtcttttacaaaagaagtgatagaagccatgtcctccattaatgagagaccactgataatggctctctctaaccccacaacacaatctgaatgtacagccgaagaagcttatacttggagtaagggccgtgccatttttgctagtggaagcccttttgatccagttgagtatgaaggaaaggtgtttgtatctacacaggcgaacaatgcgtacatattcccgggctttggacttggtttggttatctctggagcaatacgggtacatgacgatatgcttctagctgctgctgaggcattagctggacaagtaagcaaagagaactatgagaaaggaatgatatatccttcattctcttccatccggaaaatatcagctcagattgcagccaatgtagcaactaaggcgtatgaactaggattggcagggcggcttccacggccgaaagatattgtcaaatgtgcagagagtagcatgtacagccccacataccgtctctaccgttga

SEQ ID NO: 184 - DNA, 435 bp, Arabidopsis thaliana
atgactaatgttcgccttcctattctcgtctcctcggtcttgttccttgtctttatttcatcgtccctcttgttccctacacctagttttgctgctagagtaagtcattctctggtgcaagaagaggtcaaaaaggttccagaatacacagaacctgaggagccggaagttccagaagagccggagctgccctcaccggaggagcctgagattccagaagagcctgagattccagaagagcctgaggttcctggagaacccgaagttcctgaagagcccgaagaaccagaagagccagaagggtcaacatttgaatttccatcatggtttccgagctttcctattcccggtgttaatggcggtttgccaaagactgaaaagacaaaacctacatcaacagttgaagaggttaacgtttctaacaagaagccatag

SEQ ID NO: 185 - DNA, 1113 bp, Arabidopsis thaliana
atggcactaatgaagaagagtctctctgctgctcttctctcatcaccacttctgatcatatgtcttatcgcattgctcgctgatccgttttcagtcggtgctcgccggttattggaggatcctaaaccggagataccaaaattgcctgagctacctaaattcgaagttcccaagttgccggagttccctaaaccagagttgcccaagttacccgaatttccaaagcctgagttgccaaagatcccggagattccaaagccagagttaccaaaggtaccggagattccaaagcctgaggaaactaaactgccagatattcccaagcttgaattgcccaagtttccggaaattccaaaacctgagctcccaaagatgccagagattccaaaacctgagttaccaaaggtaccggagattcagaagcccgagttaccaaaaatgccggagattccaaagcctgaattaccaaagtttccagagattccaaagcctgatttgccaaagtttccagagaattcaaagcctgaggtgcctaagctaatggagactgaaaagcctgaggctcctaaggtgccagagattccaaagcctgagttgccaaagttgccagaagttcccaagcttgaggctcctaaggtaccagagatccagaagccggagttgcccaaaatgccggagttacctaagatgccggagattcagaaacctgagttgccaaagttgccagaagttcccaagcttgaggctcctaaggtaccggagatccagaagccggagttgcccaaaatgccggagttacctaagatgccggagattcagaaacccgagttgcccaagatgccggagattcagaagcctgagttgccgaaggtgccagaggttccaaagcccgaattgccaacggttccagaggttccaaagtctgaggctcctaagtttccagagattccaaagcctgaactgccgaagattccagaagttccaaaacctgaactgcccaaggttccagaaattacaaaacctgcagttccagagattccaaagccagagctaccgacgatgcctcaacttcccaagttgccggaattcccaaaagttcccggaactccttaa

SEQ ID NO: 186 - DNA, 1530 bp, Arabidopsis thaliana
atggagatatcagagagagttcgagctcgattagctgttctctcaggtcatttatcggaaggaaaacaggattctccagcgatcgagcgatggtgcacgtcggcggatacgagtgtcgcaccgcttggatctttgaagggaacactgacgatcgtcgacgaacgcaccggaaaaaattataaagttccggtctcagatgatggtaccgttaaagccgttgatttcaaaaagatagtgacggggaaggaagacaaggggcttaagttatacgatccaggttacttgaacacggctcctgttcgatcttcgatttcttacatcgatggagatgaagggatccttcgttaccgtggctacccaattgaggaaatggctgagaacagtacttttctggaggtggcttatcttctcatgtatgggaatctgccctctgaaagtcagctatctgattgggagtttgcagtttctcagcattcagctgtgccacaaggtgtattagatattatacagtctatgcctcatgatgcacacccaatgggagttcttgtgagtgcaatgagtgcgctttccatctttcatcctgatgctaatcctgctcttaggggccaggatatttacgattcaaaacaagttagagataaacaaattatccgcattattggaaaggcaccaacaattgcagcagctgcttatctgaggatggcaggaaggcctcctgttcttccttcaggaaaccttccttatgcagataatttcctctatatgcttgattccctgggaaatagatcctacaaacctaatcctcggctggctcgggtgttggacatcctcttcatactgcatgcagagcatgaaatgaactgctccaccgctgctgctcggcatcttgcctctagcggtgttgatgtctacactgctgttgctggagctgtgggagcgctttatggtccacttcatggtggtgcaaacgaggctgtgcttaagatgttgtcagagattgggactgttgaaaatattccagagttcattgagggtgtgaagaacaggaagaggaagatgtctggttttggacaccgtgtgtacaaaaactatgaccctcgagctaaagtcatcaagaacctggctgatgaagtattttccattgttggaaaggatcctctaattgaggttgctgttgcacttgagaaggcagctctctctgacgattactttgttaagagaaagctgtatccaaatgttgacttctactctggattaatatacagggcaatgggatttccaccggagttcttcacggtcttattcgcgattcctcgcatggctggatacttgtcacattggaaagagtcactggatgatcctgacaccaagatcatgagaccacaacaggtgtacacaggcgtgtggctgaggcattacacaccagtgagagagagaatagtgacggatgactcgaaagagtcagacaaattgggtcaagtcgcgacttcaaatgcatcaagaagacgtttggctggatcttcagtttag

SEQ ID NO: 187 - DNA, 1308 bp, Arabidopsis thaliana
atgacaccacagatcaaaactcatctcttgccgaagcaagaaccttcttcgtctgagaaccatggatcatcaacctccggcatcgttttcaacgtgtcaacgagtataatcggagccggaataatgtcgatgccggcggcgtttaaagttcttggaatagttccagcgtttttgattatcacgatcatagcttggctttccacaatttccgttggatttctgatgaaatcaactctcgccggagaatcaactacttacgccggagttatgaaagagtcgtttggtaaaacaggatccatcgctgtacagattgctacgatggttgctacttttggttgtatgattatattttcgattattataggagatgtgctttctggtaatgaaaatggtggtcctgaacatattggagttttgcaagaatggtttggttcttactggtggaacacgagaatcttcgctttgttatttgtctacggctttgtcttgcttccattggtcctgcgtagacgagtcgaaagactggcaattagttccgctgtatcgtttcttcttgcggttctatttgttgtcataagctcggtgctggcgatttccgcgctggtgaatggacaaacgaagaatccaagactgtttccggagttgagcaatggaggatcgttctggcaactcttcacagcttcccctgttatagttacagccttcacgtttcacttcaatgttcatccaattggattcgagctcaaagatccattacaagtgatcccagcaactaagatctctgtcatcttgtgtgctgctatctacttcgcaactggactctttggttaccttctctttggagatgcaactatgtcggatattctagtgaactttgaccagagctctggttcttccattggttctcttctcaacgacattgtcagactcagctacgtgcttcacctcatgctggtctttcctctcctgaacttctcattgagagcaaatctcgacgaactcttgtaccccaagaagccgtccttggaaaaagacacaaaaagattcatcggactcactctggctctactgatttgctgtttcttgtctgcaatcgctgtaccagacatttggtacttctttcagttcatgggatcaaccatcacagtctccatagcattcatatttccagccgccattgttctaaggaatatccatggtgtatcaacctcaagagagaagatcgtagctgcaataatgcttgttcttgctgttgccactagcattattgctatctcgacaaatttatacagcctcgcagcaaactag

SEQ ID NO: 188 - DNA, 729 bp, Arabidopsis thaliana
atgcgaaaatcgttcaaggattcactcaaggctcttgaagctgatatccagttcgccaacactctggcgtcagagtacccagaggagtatgatggtggctacgttcagatgagattatcttacagcccggcggctcatctctttctcttccttcttcagtggactgattgtcatttcgctggcgctttgggcttgcttaggatccttatttataaggcatatgttgatgggaagaccacaatgtcgctacatgaacgcaaaactagtatcagagaattctatgatgtgttgtttccttcgctattgcaacttcatggagggatcaccgatgtagaagaaaggaaacagaaggagatatgcgacaaaagataccgtaaaaaggacagaacagataaaggaaagatgtcggagatcgatttggagagggaagaagagtgtggaatctgcttggagattcgaaacaaagttgttcttcctacgtgcaatcactccatgtgtataaactgctacagaaactggcgtgcacggtcacagtcgtgcccgttctgtcgaggcagcttgaaaagagtgaattctggtgatctatggatatacacttgtagcgccgagattgcagatttaccagcgatttacaaggagaatctgaagaggttgttgatatacattgacaagttgcctctcgttacttctgatccaaatcttgtcccttatgctcctcttcctcggtga

SEQ ID NO: 189 - DNA, 519 bp, Arabidopsis thaliana
atgcgaaaatcgttcaaggattcactcaaggctcttgaagctgatatccagttcgccaacactctggcgtcagagtacccagaggagtatgatggtggctacgttcagatgagattatcttacagcccggcggctcatctctttctcttccttcttcagtggactgattgtcatttcgctggcgctttgggcttgcttaggatccttatttataaggcatatgttgatgggaagaccacaatgtcgctacatgaacgcaaaactagtatcagagaattctatgatgtgttgtttccttcgctattgcaacttcatggagggatcaccgatgtagaagaaaggaaacagaaggagatatgcgacaaaagataccgtaaaaaggacagaacagataaaggaaagatgtcggagatcgatttggagagggaagaagagtgtggaatctgcttggagattcgaaacaaagttgttcttcctacgtgcaatcactccatgtgtataaactgctacagaaactga

SEQ ID NO: 190 - DNA, 366 bp, Arabidopsis thaliana
atgatcaacgcttttaagactatccgatcactgccctcgaataccaccgtctcgttctgctcaacaccatctcgattaggccggaaagtcactggagttagttttgccaccacttctgatcagcaaaagatggataaaaagcctgaaaatccaaacgagaaaaccggtgacgtgatgtcgcattcttatggagaagggtacgcaacaaggtctgacgaagaagggtttggaggaatctatggaggaaatcaaacacttcagaaggaaaacgagatccatgagaatcaccctgattacgacaaaacgcaaggtagcgaatcgaaggagaaggagaaagcaaggaaccagacacaatcccactgctaa

SEQ ID NO: 191 - DNA, 348 bp, Arabidopsis thaliana
atggctttcgctttgaggttcttcacatgccttgttttaacggtgtgcatagttgcatcagtcgatgctgcaatctcatgtggcacagtggcaggtagcttggctccatgtgcaacctatctatcaaaaggtgggttggtgccaccttcatgttgtgcaggagtcaaaactttgaacagtatggctaaaaccacaccagaccgccaacaagcttgcagatgcatccagtccactgcgaagagcatttctggtctcaacccaagtctagcctctggccttcctggaaagtgcggtgttagcattccatatccaatctccatgagcactaactgcaacaacatcaagtga

SEQ ID NO: 192 - DNA, 777 bp, Arabidopsis thaliana
atgacagaaggtggagaatattctccggcgatgatgtcagcagagccattcttgaccatgaagaagatgaagaagagcaaccacaacaagaacaatcagagaaggtttagcgacgagcagatcaagtcactggagatgatgtttgagtctgagacaaggcttgagccaaggaagaaggttcaattagctagagagctagggttgcagccgaggcaagtggctatatggtttcagaacaagagggctcgttggaaatccaagcagctcgagactgagtacaacattctcagacaaaactacgacaacttggcttctcagttcgagtccttaaagaaagaaaaacaagctttagtctctgagttgcagaggctaaaagaggcgacgcaaaagaagacacaggaggaggaaaggcagtgtagtggagatcaagcggtggttgctctaagcagcacacatcatgaatcagaaaacgaagagaaccggaggcgtaaaccggaagaggttagaccggagatggagatgaaagatgataagggtcatcatggggttatgtgtgatcatcatgattatgaagatgatgataatggttatagtaacaacatcaagagagagtattttggtgggtttgaggaagaaccagatcacttaatgaacattgttgaaccagctgatagttgtttgacatcatctgatgattggagaggtttcaaatcagatactactactctcttggaccaatccagcaacaattacccttggcgggatttttggtcatga

SEQ ID NO: 193 - DNA, 711 bp, Arabidopsis thaliana
atggcaggagaggcagaggctttggccacgacggcaccgttagctccggtcaccagtcagcgaaaagtacggaacgatttggaggaaacattaccaaaaccatacatggcaagagcattagcagctccagatacagagcatccgaatggaacagaaggtcacgatagcaaaggaatgagtgttatgcaacaacatgttgctttcttcgaccaaaacgacgatggaatcgtctatccttgggagacttataagggatttcgtgaccttggtttcaacccaatttcctctatcttttggaccttactcataaacttagcgttcagctacgttacacttccgagttgggtgccatcaccattattgccggtttatatcgacaacatacacaaagccaagcatgggagtgattcgagcacctatgacaccgaaggaaggtatgtcccagttaacctcgagaacatatttagcaaatacgcgctaacggttaaagataagttatcatttaaagaggtttggaatgtaaccgagggaaatcgaatggcaatcgatccttttggatggctttcaaacaaagttgaatggatactactctatattcttgctaaggacgaagatggtttcctatctaaagaagctgtgagaggttgctttgatggaagtttatttgaacaaattgccaaagagagggccaattctcgcaaacaagactaa

SEQ ID NO: 194 - protein, 969 aa, Artificial Sequence
  Chimeric protein of Arabidopsis thaliana and Zea mays
MIVQPIELRAWTAFPGSAQEGIGRMAASVSRAICVQKPGSKCTRDREATSFARRSVAAPRPPHAKAAGVIRSDSGAGRGQHCSPLRAVVDAAPIQTTKKRVFHFGKGKSEGNKTMKELLGGKGANLAEMASIGLSVPPGFTVSTEACQQYQDAGCALPAGLWAEIVDGLQWVEEYMGATLGDPQRPLLLSVRSGAAVSMPGMMDTVLNLGLNDEVAAGLAAKSGERFAYDSFRRFLDMFGNVVMDIPRSLFEEKLEHMKESKGLKNDTDLTASDLKELVGQYKEVYLSAKGEPFPSDPKKQLELAVLAVFNSWESPRAKKYRSINQITGLRGTAVNVQCMVFGNMGNTSGTGVLFTRNPNTGEKKLYGEFLVNAQGEDVVAGIRTPEDLDAMKNLMPQAYDELVENCNILESHYKEMQDIEFTVQENRLWMLQCRTGKRTGKSAVKIAVDMVNEGLVEPRSAIKMVEPGHLDQLLHPQFENPSAYKDQVIATGLPASPGAAVGQVVFTAEDAEAWHSQGKAAILVRAETSPEDVGGMHAAVGILTERGGMTSHAAVVARGWGKCCVSGCSGIRVNDAEKLVTIGGHVLREGEWLSLNGSTGEVILGKQPLSPPALSGDLGTFMAWVDDVRKLKVLANADTPDDALTARNNGAQGIGLCRTEHMFFASDERIKAVRQMIMAPTLELRQQALDRLLPYQRSDFEGIFRAMDGLPVTIRLLDPPLHEFLPEGNIEDIVSELCAETGANQEDALARIEKLSEVNPMLGFRGCRLGISYPELTEMQARAIFEAAIAMTNQGVQVFPEIMVPLVGTPQELGHQVTLIRQVAEKVFANVGKTIGYKVGTMIEIPRAALIADEIAKEAEFFSFGTNDLTQMTFGYSRDDVGKFLPIYLAKGILQHDPFEVLDQQGVGQLIKMATEKGRAARPSLKVGICGEHGGDPSSVGFFAEAGLDYVSCSPFRVPIARLAAAQV

SEQ ID NO: 195 - protein, 969 aa, Artificial Sequence; identical to SEQ ID NO: 194
  Chimeric protein of Arabidopsis thaliana and Zea mays

SEQ ID NO: 196 - protein, 259 aa, Zea mays
YVLDRELGRGEFGVTYLCMDRDTKELLACKSISKRKLRTAVDVEDVRREVAIMRHLPKSPSVVSLREACEDDGAVHLVMELCEGGELFDRIVARGHYTERAAASVTRTILEVVQLCHRHGVIHRDLKPENFLFANKKENSPLKAIDFGLSIFFKPGEKFSEIVGSPYYMAPEVLKRNYGPEIDIWSAGVILYILLCGVPPFWAETEQGVAQAILRGNIDFKREPWPNVSENAKDLVRHMLEPDPKLRLTAKQVLEHHWL

SEQ ID NO: 197 - protein, 259 aa, Zea mays
YELGGELGRGEFGVTYLCTESATGARYACKSISKRKLRTPVDVEDVRREVDIMRHMPPHPNIVSLRAAYEDEDAVHLVMELCEGGELFDRIVARGHYTERAAAAVTRTIVEVVQMCHRHGVMHRDLKPENFLYANKKESSPLKAIDFGLSVFFRPGERFTEIVGSPYYMAPEVLKRNYGPEVDVWSAGVILYILLCGVPPFWAETEQGVAQAIIRSVVDFKREPWPRVSEPAKDLVRRMLDPNPLTRFTAAQVLEHPWL

SEQ ID NO: 198 - protein, 259 aa, Glycine max
YTIGKELGRGQFGVTHLCTNKATGQQFACKTIAKRKLVNKEDIEDVRREVQIMHHLSGQPNIVELKGAYEDKQSVHLVMELCAGGELFDRIIAKGHYTERAAASLLRTIMQIIHTFHSMGVIHRDLKPENFLMLNKDENSPVKATDFGLSVFFKEGETFKDIVGSAYYIAPEVLKRKYGPEVDIWSVGVMLYILLSGVPPFWAESEHGIFNAILRGHVDFTSDPWPSLSSAAKDLVRKMLTTDPKQRLTAQEVLNHPWI

SEQ ID NO: 199 - protein, 259 aa, Glycine max
FTLGRKLGQGQFGTTFLCVEKATGLECACKSIAKRKLVTDDDVEDVRREIQIMHHLAGHPNVISIKGAYEDAVAVHVVMELCAGGELFDRIIQRGHYTERQAAKLTKTIVGVVEACHSLGVMHRDLKPENFLFVNQHEDSLLKTIDFGLSVFFKPGDIFNDVVGSPYYVAPDVLRKRYGPEADVWSAGVILYILLSGVPPFWAENEQGIFEQVLRGDLDFSSDPWPSISESAKDLVRKMLVRDPRRRLTAHQVLCHPWI

SEQ ID NO: 200 - protein, 461 aa, Oryza sativa
MEKKASILMNRYELGRMLGQGTFAKVYHARNLASNQSVAIKVIDKEKVLRVGMIDQIKREISIMRLVRHPNIVQLHEVMASKSKIYFAMEYVRGGELFSRVARGRLKEDAARKYFQQLIGAVDFCHSRGVYHRDLKPENLLVDENGNLKVSDFGLSAFKECQKQDGLLHTTCGTPAYVAPEIINKRGYDGAKADIWSCGVILFVLLAGYLPFHDSNLMEMYRKISKGDVKFPQWFTTDVRRLLSRLLDPNPNIRITVEKLVEHPWFKKGYKPAVMLSQPNESNNLKDVHTAFSADHKDNEGKAKEPASSLKPVSLNAFDIISLSKGFDLSGLFENDKEQKADSRFMTQKPASAIVSKLEQIAETESFKVKKQDGLVKLQGSKEGRKGQLAIDAEIFEVTPSFFVVEVKKSAGDTLEYEKFCNKGLRPSLRDICWDGQSEHPSLAQSSTLTQSSKSISRHAI

SEQ ID NO: 201 - protein, 265 aa, Oryza sativa
MAAAAAACVESPDEGVEIREVWAGNLEAEIAAIRDEVDRYPYVAMDTEFPGIVCRPVGNFRTTDEFNYANLEANVNMLKLIQLGLTLSDEGGDLPRRGTGGRRCIWQFNFRGFDPRTDPSNADSIQMLRTCGIDFDRFAAEGADPIRFAELLMSSGVVLNADVQWITFHSGYDFGYLLRLLTGRNLPDNMPAFFDLIRIYFPVLYDIKHLMRFCSNLHGGLSRLGELLDVKRVGTCHQAGSDSLLTLGCYNKIKEVYFKGSTEKH

SEQ ID NO: 202 - protein, 588 aa, Zea mays
MCGILAVLGCSDWSQAKRARILACSRRLKHRGPDWSGLYQHEGNFLAQQRLAVVSPLSGDQPLFNEDRTVVVVANGEIYNHKNVRKQFTGTHNFSTGSDCEVIMPLYEKYGENFVDMLDGVFAFVLYDTRDRTYVAARDAIGVNPLYIGWGSDGSVWIASEMKALNEDCVRFEIFPPGHLYSSAGGGFRRWYTPHWFQEQVPRTPYQPLVLREAFEKAVIKRLMTDVPFGVLLSGGLDSSLVASVTKRHLVETEAAEKFGTELHSFVVGLEGSPDLKAAREVADYLGTIHHEFHFTVQDGIDAIEEVIYHDETYDVTTIRASTPMFLMARKIKSLGVKMVLSGEGSDELLGGYLYFHFAPNKEEFHRETCRKVKALHQYDCLRANKATSAWGLEVRVPFLDKEFINVAMGMDPEWKMYDKNLGRIEKWVMRKAFDDDEHPYLPKHILYRQKEQFSDGVGYNWIDGLKSFTEQQVTDEMMNNAAQMFPYNTPVNKEAYYYRMIFERLFPQDSARETVPWGPSIACSTPAAIEWVEQWKASNDPSGRFISSHDSAATDHTGGKPAVANGGGHGAANGTVNGKDVAVAIAV

SEQ ID NO: 203 - protein, 532 aa, Oryza sativa
MAAIYLLIAALIASSHALAAHGAGGGVPLAAAAPLPFPGDLAASGKLRTDPNATVPASMDFGNITAALPAAVLFPGSPGDVAELLRAAYAAPGRPFTVSFRGRGHSTMGQALAAGGVVVHMQSMGGGGAPRINVSADGAYVDAGGEQLWVDVLRAALARGVAPRSWTDYLHLTVGGTLSNAGVSGQTYRHGPQISNVLELDVITGHGETVTCSKAVNSDLFDAVLGGLGQFGVITRARVAVEPAPARARWVRLVYADFAAFSADQERLVAARPDGSHGPWSYVEGAVYLAGRGLAVALKSSGGFFSDADAARVVALAAARNATAVYSIEATLNYAANATPSSVDAAVAAALGDLHFEEGFSFSRDVTYEEFLDRVYGEEEALEKAGLWRVPHPWLNLFVPGSRIADFDRGVFKGILQTATDIAGPLIIYPVNKSKWDAAMSAVTPEGEEEVFYVVSLLFSAVANDVAALEAQNRRILRFCDLAGIGYKAYLAHYDSRGDWVRHFGAKWDRFVQRKDKYDPKKLLSPGQDIFN

SEQ ID NO: 204 - protein, 73 aa, Glycine max
MADSDRSSSEISTHSTDSGKRGSSKVEFSEDEETLIIRMYKLVGERWSLIAGRIPGRTAEEIEKYWTSRFSGS

SEQ ID NO: 205 - protein, 489 aa, Zea mays
MATCATDLAPLLGPAAANATGYLCSQFADTASAVDATYLLFSAYLVFAMQLGFAMLCAGSVRAKNTMNIMLTNVLDAAAGALFYYLFGFAFAFGTPSNGFIGRHFFGLQRLPRTGFDYDFFLYQWAFAIAAAGITSGSIAERTQFVAYLIYSAFLTGFVYPVASHWFWSADGWAAAGRTSGPLLFGSGAIDFAGSGVVHMVGGIAGFWGALVEGPRIGRFDHAGRSVALRGHSASLVVLGTFLLWFGWYGFNPGSFTTILKSYGPAGTVHGQWSAVGRTAVTTTLAGSVAALTTLFGKRLQAGHWNVVDVCNGLLGGFAAITAGCSVVEPWAAVVCGFVSAWVLIGANALAARLRFDDPLEAAQLHGGCGAWGVLFTGLFARQEYVEEIYGAGRPYGLLMGGGGKLLAAQIVQIVVIAGWVSCTMGPLFYALKRLDLLRISADDEMSGMDLTRHGGFAYEDPGDNAGVGEFTLKSAQNRVEPPASSNRV

SEQ ID NO: 206 - protein, 65 aa, Bacillus halodurans
MQGKVKWFNAEKGFGFIEREDGDDVFVHFSAINTDGFKTLDEGQSVEFDIVEGARGPQAANVTKL

SEQ ID NO: 207 - protein, 67 aa, Corynebacterium glutamicum
MAQGTVKWFNGEKGFGFIAPNDGSADLFVHYSEIQGSGFRNLEENQPVEFEVGEGAKGPQAQQVRAL

SEQ ID NO: 208 - protein, 212 aa, Zea mays
MPDSDNESGGPSNAEFSSPREQDRFLPIANVSRIMKKALPANAKISKDAKETVQECVSEFISFITGEASDKCQREKRKTINGDDLLWAMTTLGFEDYVEPLKLYLHKFRELEGEKAATTSASSGPQPPLHRETTPSSSTHNGAGGPVGGYGMYGGAGGGSGMIMMMGQPMYGGSPPAASSGSYPHHQMAMGGKGGAYGYGGGSSSSPSGLGR

SEQ ID NO: 209 - protein, 240 aa, Zea mays
MGRGKIVIRRIDNSTSRQVTFSKRRNGIFKKAKELAILCDAEVGLVIFSSTGRLYEYSSTSMKSVIDRYGKAKEEQQVVANPNSELKFWQREAASLRQQLHNLQENYRQLTGDDLSGLNVKELQSLENQLETSLRGVRAKKDHLLIDEIHDLNRKASLFHQENTDLYNKINLIRQENDELHKKIYETEGPSGVNRESPTPFNFAVVETRDVPVQLELSTLPQQNNIEPSTAPKLGLQLIP

SEQ ID NO: 210 - protein, 214 aa, Zea mays
MASVSPLAKFKLVFLGDQSVGKTSIITRFMYDKFDTTYQPTIGIDFLSKTMYLEDRTVRLQLWDTAGQERFRSLIPSYIRDSSVAIVVYDVSNRQTFLNTSKWIEDVHRERGQSNVIIVLVGNKTDLVEKRQVSISEGEDKGKEYGVMFIETSAKENFNIKALFRKIAAALPGVDSYSLATKSDDMVDVNLKTTSNSSQGEQQGGAGGGGGCSC

SEQ ID NO: 211 - protein, 218 aa, Zea mays
MEGVGARLGRTSARYGPATTFTGHVRKWRKEWVPVVAAAAAAAANANTSANGGTTSSTGMGSGGGSRGNNLLLFKWTPVNGANGGGGDGEQQQQAETATRRRRYVPVSLMEEQRQESTKSDDENKANDGDPSSNETEPSNGKTDINDTPMDESQATDEDGRDSGKNGGGTDLNLNLGLKDPDGDNEVETSEKHVAANNPQTENRSKRKSVTPDLEMTM

SEQ ID NO: 212 - protein, 301 aa, Zea mays
MAGLSLEHPWAFAFGLLGNVISFMTFLAPIPTFYRIYKSKSTEGFQSVPYVVALFSAMLWIFYALIKSNETFLITINAAGCVIETIYIVMYFVYAPKKAKLFTAKIMALLNGGVFGVILLLTLLLFKGSKRVVLLGWICVGFSVSVFVAPLSIMRRVIQTKSVEYMPFSLSLSLTLSAVVWFLYGLLIKDKYVALPNVLGFIFGVVQMVLYVFYMNKTPVAAAVGKDAGKLPSAADEHVLVNIAKLNPALPERTSGMHPVTQMAAVPARSCAAEATAPAMLPNRDVVDVFVSRHSPAVHVV

SEQ ID NO: 213 - protein, 274 aa, Zea mays
MAHAAAAAAVPLRRPLLFLKEARLLSTLATPLPGLRHPRALRPTGPLPSDAEDTDDPDAGDGAAVSFKKSRNELKREARRAVKWGMDLAKFSPPQIKRILSAASLEREVFDALMLVKKFGPDVREGRRRQFNYIGSLLRDAQPELMDTLIQASKDGDERKLYTLLSEGKLLVEEEEEEEEDLPDGEEENQEYMKIADRWFDGLLCKDISVTNEVYSVHSVEFDRQELRKLVKRAHMFQESTQNKDGEESNAKLSGAKKPLMRFLRSLAKEAYAP

SEQ ID NO: 214 - protein, 527 aa, Zea mays
MATPELWWYWWLWVTTMLAVVVSTVVCYLTNQHRRWGGWGSSSGRRRPPGPRPLPLIGNLLDLRRAPGSLHHTLARLARAHGAPVMRLDLGLVPAVVVSSRDAAREAFAAHDRRIAARPVPDSKRALGFCDRSMLSLPSSAPLWRTLRGVMAAHVLSPRSLAASRAARERKVADLIGYLRARAGTVVDLKEAVYGGVANLVSTAMFSIDVVDVGAAESSSSSSVAAHGLQELLEELMQCMAQPNVSDFFPFLSALDLQGCRRRVAVQLGQVLQVLDDITDRRLASSSSSSTSSKGGDRRGDFLDILLDLQSTGKITRDNVTLTLFDIFAAGSDTMALTVVWAMAELLRNPGVMARLRAEVRDALGGRDAVEEADAAGLPFLQAVVREAMRLHPAAPVLLPHKAVEDGVQIGGYAVPRGCTVIFNSWAIMRDPAAWERPDEFLPERFLARDLDFRGKQLEFVPFGSGRRLCPGVPMAERVVPLVLASLVHAFQWQLPAGMSADQVDVSDKFTTTSVLAFPPIKAVPLL

SEQ ID NO: 215 - protein, 490 aa, Zea mays
MVLSKAVSESDMSVHSTFASRYVRSSLPRYRMPENSIPKEAAYQIINDELMLDGNPRLNLASFVTTWMEPECDKLIMAAINKNYVDMDEYPVTTELQNRCVNMIAHLFNAPLGESETAVGVGTVGSSEAIMLAGLAFKRRWQNKRRAEGKPFDKPNIVTGANVQVCWEKFARYFEVELREVKLRDGYYVMDPEKAVEMVDENTICVAAILGSTLNGEFEDVKLLNDLLQAKNRETRWETPIHVDAASGGFIAPFLYPDLEWDFRLPLVKSINVSGHKYGLVYAGIGWCIWRSKEDLPEELIFHINYLGADQPTFTLNFSKGSSQVIAQYYQLIRHGFEGYRNIMENCHENAMVLKEGLEKTGRFDIVSKDEGVPLVAFSLKDRSRHDEFEISDMLRRFGWIVPAYTMPPDAQHVTVLRVVIREEFSRTLAERLVLDIEKVMYQLDALPSRLPPPPPAAPLLRKKTELETQRSVTEAWKKFVLAKKTNGVC

SEQ ID NO: 216 - protein, 219 aa, Zea mays
MGEEAVDDYELHMVCYGSDEDERVMEWESGLPGADELTPLSQPLVPPGLAAAFRIPPEPGRTLLDLHRASEATVARLRRAPPSSPGTSSSPHGHQEARGGEGADSAAATTTNSNRRPRLVWTPQLHKRFVDVVAHLGIKKAVPKTIMELMNVEGLTRENVASHLQKYRLYVKRMRGQGPSPSDHIFAPTPVHGVAVGMVPMVSGQAYHYLYNGGGGGDR

SEQ ID NO: 217 - protein, 219 aa, Zea mays; identical to SEQ ID NO: 216

SEQ ID NO: 218 - protein, 321 aa, Arabidopsis thaliana
MGEPKDSLALFLCHESESSLNEDDDETIERSDKQEPHFTTTIDDEDYVADLVLKENLRFETLPSKTTSSSDRLIAIDWILTTRTRFGFQHQTAYIAISYFDLFLHKRFIGKDETWAMRLLSVACLSLAAKMEERIVPGLSQYPQDHDFVFKPDVIRKTELLILSTLDWKMNLITPFHYLNYFLAKISQDNHSVSKDLVLLRSSDSLPALTKEISFTEYRQFVVAAVTTLLASSSTSSDIRLTREEIANKFGSISWWTSNENENVYLCYQRTLEIEERKHMTPPPEIAVSREPPASGSGAKRRLSFDDSDQSSPPAKRMRRL

SEQ ID NO: 219 - protein, 605 aa, Zea mays
MDTHIGSVNGAASNQTVGCPASAPGCPMASTPAQPAATLSAGEASLGRHLARRLVQVGVNDVFAVPGDFNLTLLDHLIAEPGLRLVGCCNELNAGYAADGYARARGVGACAVTFTVGGLSVLNAIAGAYSENLPVICIAGGPNSNDYGTNRILHHTIGLPDFSQELRCFQTVTCHQAVVNNLDDAHEQIDTAIATALRESKPVYLSISCNLPGLPHPTFSRDPVPFFLTPRTSNKMGLEAAVEATVEFLNKAVKPVLVAGPKLRVAKAGKAFVDMVDASGYAYAVMPSAKGLVPETHPHFIGTYWGAVSTAFCAEIVESADAYLFAGPIFNDYSSVGYSFLLKKEKAIIVQPERVIVGNGPAFGCVMMKEFLSELAKRVNKNTTAYENYKRIFVPEGQPLESEPNEPLRVNVLFKHVQKMLTGDSAVIAETGDSWFNCQKLKLPEGCGYEFQMQYGSIGWSVGALLGYAQGANHKRVIAFIGDGSFQVTAQDVSTMLRCEQNSIIFLINNGGYTIEVEIHDGPYNVIKNWNYTGFVDAIHNGLGKCWTSKVKSEEELTAAIETALGEKDCLCFIEVIAHKDDTSKELLEWGSRVSAANSRPPNPQ

SEQ ID NO: 220 - protein, 509 aa, Zea mays
MGAFAKEEHQFLAELGLAQRNPGAFACGAWGGSGPTVTSTSPTNNQVIAEVVEASVHDYEEGMRACFDAAKTWMAIPAPKRGEIVRQIGDALRAKLHHLGRLVSLEMGKILPEGIGEVQEIIDMCDYAVGLSRQLNGSIIPSERPNHMMMEVWNPLGVVGVITAFNFPCAVLGWNACIALVCGNCVVWKGAPTTPLITIAMTKIVASVLEKNNLPGAIFTSFCGGTEIGQAIALDIRIPLVSFTGSTRAGLMVQQQVSARFGKCLLELSGNNAIIVMDDADIQLAVRSVLFAAVGTAGQRCTTCRRLILHENIYQTFLDQLVEVYKQVRIGDPLEKGTLLGPLHTPASKENFLKGIQTIKSQGGKILFGGSAIESEGNFVQPTIVEITPSAPVVKEELFGPVLYVMKFQSLKEAIEINNSVPQGLSSSIFTKRPDIIFKWLGPHGSDCGIVNVNIPTNGAEIGGAFGGEKATGGGREAGSDSWKQYMRRATCTINYGSELPLAQGINFG

SEQ ID NO: 221 - protein, 191 aa, Zea mays
MSLCTIARRLCLSKPSSGSRLSAIWAHLYSTEAAKDMGAKKYKYPDVYDPYGPMPPPSEKVVELADRIAALPPEEIKQIAPALLLRLNQEPPQAVSGQGFGFGAQVGSGAGSGKAEKKAEKTVFDVRLEKFDAAAKIKIIKEIRTFTDLGLKEAKELVEKAPVVLKQSLTKEEAEAIIAKIKAAGGVAVME

SEQ ID NO: 222 - protein, 441 aa, Zea mays
MAGSRFGSFKSEKGDSASAAAAAGGAAQRRDPYEVLGVGRTATDQEIKSAFRRMALKYHPDKNGDDPVASDRFQEVTFSYNILSDPDKRRQYDTSGFDAIESDSQELELDLSSLNTVNTVFAALFSKLGVPIKTTVSATVLEEALNGSVMVSQLQLGNSVQRKVEKQSAHFYSVDITEKQAKMGLVCRVHSNDKSKFKLLYFELEENGGLSLALQEDSVKVGKVTAAGMYFLGFPVYRFEQNNLAAAAKDSDGAFFKRLDSFQPCDIHELKPGTHFFAVYGDNFFKSASYTIEVVCGESFPAEKEMLRNVEAKILTKRAELSKFESEYREVLAKFTEMTSKYTQEMQAIDGLLKERNEIHASYTNNPPLKRSSSRNKAKSPSKVAKTGTEKHHQKEKKVKDHCMEGCGSDSDNSSEKKSKERFPRKKWLNLPFKLDRRKTC

SEQ ID NO: 223 - protein, 326 aa, Zea mays
MADNAKAAAAHARPESSQEEEEDWKEAEGDVAEVDRAATNGAGEGGVPTDRPIRVYADGIYDLFHFGHAKSLEQAKKSFPNTYLLVGCCNDELTHKFKGRTVMTEDERYESLRHCKWVDEVIPDAPWVVTEEFLDKHNIDFVAHDSLPYADASGAGNDVYEHVKKLGKFKETQRTDGISTSDIIMRIVKDYNEYVMRNLARGYTRKDLGVSYVKEKRLRVNMGLKNLRDRVKQHQEKVGEKWSTVAKLQEEWVENADRWVAGFLEKFEEGCHSMGTAIKERIQERLIKAQSSDFGSLLQYDSYDSDEAKENDEDEDEDELFEDVKE

SEQ ID NO: 224 - protein, 214 aa, Zea mays
MAAVEVCVKAAAGNPDTLGDCPFSQRVLLTLEEKKVPYEVKLVDLGNKPEWFLNISPEGKVPVFNGGDGKCIADSDVIIQVIEEKFPTPSLVTPPEYASVGSKIFPAFVKFLKSKDGSDGSEKALLDELQALDDHLKAHGPYINGENVSATDLSLGPKLFHLQIALEHFKGWKIPENLTNVHAYTKALFSRESFVKTKPSEEHVIAGWAPKVNA

SEQ ID NO: 225 - protein, 143 aa, Zea mays
MDASAATARRKRKRPDADITAAAAAAAPVAVDEASDAEVEEFYAILRRIRDASRRLCGAGARPAPRAPAWRPSFSWEDFATPAPGAPAPETPTPAQQEPAQPRPDEPVAVVRATAPSPRAGLDLNAEPEPEAPATPRSARVQA

SEQ ID NO: 226 - protein, 121 aa, Zea mays
MAGCCVFLRWPSASPSRIGYRSLVDAAADDAAPPSTVTVVVGKERRAFAVDRLVLDSYPLRLLLETAARREERRAGGGAIFVDVDAILFEHILWLACDARSVSQILHLDLKEIIDFYAQDA

SEQ ID NO: 227 - protein, 201 aa, Zea mays
MSYYGDRRAESSIVEAFTLSPLPYPVILVLLMVTLLLGASWFFTYDDFIEEASQQLSWALLGVPIALVLLIRWISSVDSFEGYLGFYPRESRWKGRYERGPAEGSSPWGVALLVLLLLVLARAGCGKVVYGNPGRLGRKRRGGDKVKEQAGDEAAKFPWSGMRLATEKRRRVRRSPSKKGIVLKQKSRKVSLQHRSKKLKA

SEQ ID NO: 228 - protein, 252 aa, Glycine max
MEGVPHPIPRTVEEVFTDFKGRRAGLIKALTTDVEKFYQQCDPEKENLCLYGFPNETWEVNLPVEEVPPELPEPALGINFARDGMQEKDWLSLVAVHSDSWLLAVAFYFGARFGFGKNERKRLFQMINDLPTIFELVTGSARQSKDQPAAHNNGSKCKSSGKSRQSESQAKGMKMSAPPKEEDESGEEEEEDDEQGATCGACGDNYGTDEFWICCDMCERWFHGKCVKITPAKAEHIKQYKCPSCSNKRVRV

SEQ ID NO: 229 - protein, 485 aa, Arabidopsis thaliana
MSEGVEAIVANDNGTDQVNGNRTGKDNEEHDGSTGSNLSNFLWHGGSVWDAWFSCASNQVAQVLLTLPYSFSQLGMLSGIVLQIFYGLLGSWTAYLISVLYVEYRARKEKEGKSFKNHVIQWFEVLDGLLGSYWKALGLAFNCTFLLFGSVIQLIACASNIYYINDHLDKRTWTYIFGACCATTVFIPSFHNYRIWSFLGLGMTTYTAWYLAIASIIHGQAEGVKHSGPTKLVLYFTGATNILYTFGGHAVTVEIMHAMWKPQKFKYIYLMATLYVFTLTIPSAAAVYWAFGDALLDHSNAFSLMPKNAWRDAAVILMLIHQFITFGFACTPLYFVWEKVIGMHDTKSICLRALARLPVVIPIWFLAIIFPFFGPINSAVGALLVSFTVYIIPSLAHMLTYRSASARQNAAEKPPFFMPSWTAMYVLNAFVVVWVLIVGFGFGGWASVTNFVRQVDTFGLFAKCYQCKPAAAAAHAPVSALHHRL

SEQ ID NO: 230 - protein, 524 aa, Arabidopsis thaliana
MTNTLCLSLITLITLFISLTPTLIKSDEGIDVFLPISLNLTVLTDPFSISAASHDFGNITDENPGAVLCPSSTTEVARLLRFANGGFSYNKGSTSPASTFKVAARGQGHSLRGQASAPGGVVVNMTCLAMAAKPAAVVISADGTYADVAAGTMWVDVLKAAVDRGVSPVTWTDYLYLSVGGTLSNAGIGGQTFRHGPQISNVHELDVITGKGEMMTCSPKLNPELFYGVLGGLGQFGIITRARIALDHAPTRVKWSRILYSDFSAFKRDQERLISMTNDLGVDFLEGQLMMSNGFVDTSFFPLSDQTRVASLVNDHRIIYVLEVAKYYDRTTLPIIDQVIDTLSRTLGFAPGFMFVQDVPYFDFLNRVRNEEDKLRSLGLWEVPHPWLNIFVPGSRIQDFHDGVINGLLLNQTSTSGVTLFYPTNRNKWNNRMSTMTPDEDVFYVIGLLQSAGGSQNWQELENLNDKVIQFCENSGIKIKEYLMHYTRKEDWVKHFGPKWDDFLRKKIMFDPKRLLSPGQDIFN

SEQ ID NO: 231 - protein, 490 aa, Leuconostoc mesenteroides
MEIQNKAMLITYADSLGKNLKDVHQVLKEDIGDAIGGVHLLPFFPSTGDRGFAPADYTRVDAAFGDWADVEALGEEYYLMFDFMINHISRESVMYQDFKKNHDDSKYKDFFIRWEKFWAKAGENRPTQADVDLIYKRKDKAPTQEITFDDGTTENLWNTFGEEQIDIDVNSAIAKEFIKTTLEDMVKHGANLIRLDAFAYAVKKVDTNDFFVEPEIWDTLNEVREILTPLKAEILPEIHEHYSIPKKINDHGYFTYDFALPMTTLYTLYSGKTNQLAKWLKMSPMKQFTTLDTHDGIGVVDARDILTDDEIDYASEQLYKVGANVKKTYSSASYNNLDIYQINSTYYSALGNDDAAYLLSRVFQVFAPGIPQIYYVGLLAGENDIALLESTKEGRNINRHYYTREEVKSEVKRPVVANLLKLLSWRNESPAFDLAGSITVDTPTDTTIVVTRQDENGQNKAVLTADAANKTFEIVENGQTVMSSDNLTQN

SEQ ID NO: 232 - protein, 492 aa, Arabidopsis thaliana
MGGCVSTPKSCVGGKIRSSKRRKTRTRRKIQKKRVVSSSRLSDGSFDNNPTFRASVDEAWFDSNLAFETDCDDDFHSVQEDTLSVNGCERISVSSMSSVKDSNLGGSARNSLSDVISQSKSESALIDTKQAVFIDEISSNADGSSNKDEGLLENCGILPSNCLPCLNSTVPSIEKRRSLSSSPPSTRKKAAVKLSFKWREGHPTGPLFSTTMQLQRPMAGSQVPFCPLEKKMFDSWSIIEPGSFRVRSKTYFRDKKKELAPNYAAYNPFGVDVFLSQRKVNHIAQYVELPVVTTTPTKLPSILVVNVQIPLYPAAIFHGETDGEGMNFVLYFKLSDNYLKELPPHFQESIQRLLDDEVEKVRGYTTDTNVPFRERLKILGRVANVDDLQLNGAEKKLMNAYNEKPVLSRPQHEFYSGENYFEIDIDMHRFSYISRKGFEAFLDRLKNCVLDVGLTIQGNKPEELPEQILCCIRLNGIDYMNYHQLALSQEVL

SEQ ID NO: 233 - protein, 490 aa, Arabidopsis thaliana
MTKISPEVEIRMPMEAFPPVSADVSFISNSFPKYKLDADNQVLEEPVEDNQGPSLKDVIEQEASNLSDQHKRISVRDLASKFDKNLAAAAKLSNEAKLRDVASLEGHVLLKKLRDALESLRGRFAGRNKEDVEKAISMVEALAVKLTQNEGELIQEKFEVKKLVNFLKQASEDAKNLVNQEKSFACAEIESARAVVLRIGEALEEQEKASQASKPQDVDGLVEEVQESRRIKLLHHPSKVMAMEYELRALRDQIREKSIFSIKLQKELIMSKRNEENKSCLYMLDGSEALGSYLRVQPCSDEVPQVSKCSFQWYRLSSEGSWREVISGANKSIYAPDPSDVGRILQVDIVSNGKKLTLTTNPIQTVSGLGSHVETLLRKSNTDFNVVISQMNGKDHSSHSTHSFNVGRMRIKLCRGWITKAREIYSPSMQLCGVRSDVVNAAKVLFWQARKGLSFVLTFESERDRNSAIMVARKYALDCNVVLAGPDDLV

SEQ ID NO: 234 - protein, 179 aa, Glycine max
MASFGGTTQKCMACAKTVYLVDKLTADSRVYHKACFRCHHCRNTLKLSNYCSFEGVLYCRPHYDQLYKRTGSLDKSFEGIPKIQKPEKPVTGNENTKVLANVFLGTRDKCVCCNKTVYPTERVTVNGTPYHKGCFKCTYGGCTVSSSNFITHEGKPYCKHHHIQLFKEKGNYSQLENEC

SEQ ID NO: 235 - protein, 179 aa, Glycine max; identical to SEQ ID NO: 234

SEQ ID NO: 236 - protein, 167 aa, Arabidopsis thaliana
MYLIVLGFASWCLNKYINGQTNHPSFGGNGATPFFLTFSILAAVVGVASKLAGANHIRFWRNDSLAAAGASSIVAWAITALAMGLACKQINIGGWRGWRLKMIEAFIIILTFTQLLYLMLIHAGSLSSKYGPGYRDQDYATGQAHGHGHVPHTVGEHKAGVGSTMAV

SEQ ID NO: 237 - protein, 227 aa, Arabidopsis thaliana
MPVHDEQEHEVYGGEIPEEEEGEMDTEEYEEHGGEEGAAAGDEELEPGSSSRDLEDMKKRIKEIEEEAGALREMQAKAEKDMGASQDPSGGVSAAEKEEVDSRSIYVGNVDYACTPEEVQQHFQSCGTVNRVTILTDKFGQPKGFAYVEFVEVEAVQNSLILNESELHGRQIKVSAKRTNVPGMRQFRGRGRPFRPMRGFMPGVPFYPPYAYGRVPRFRRPMRYRPY

SEQ ID NO: 238 - protein, 372 aa, Arabidopsis thaliana
MFAQLAPSPSPSPANVSHFVHRRTFRQCTYAVSASLPTANSSRPPPIQIVGGKDLNLDVTRKDDSIGFKLEANEDEIDWMNLESDIRLWTRALRPVQWYPGHIMKTEKELREQLKLMDVVIEVRDARIPLSTTHPKMDAWLGNRKRILVLNREDMISNDDRNDWARYFAKQGIKVIFTNGKLGMGAMKLGRLAKSLAGDVNGKRREKGLLPRSVRAGIIGYPNVGKSSLINRLLKRKICAAAPRPGVTREMKWVKLGKDLDLLDSPGMLPMRIDDQAAAIKLAICDDIGEKAYDFTDVAGILVQMLARIPEVGAKALYNRYKIQLEGNCGKKFVKTLGLNLFGGDSHQAAFRILTDFRKGKFGYVSLERPPL

SEQ ID NO: 239 - protein, 372 aa, Arabidopsis thaliana; identical to SEQ ID NO: 238

SEQ ID NO: 240 - protein, 436 aa, Arabidopsis thaliana
MKASGSLDSWREYFRRRGDSDIFGIIDHAIMVAATDCPNKFKSRRDKIAELLFSCRVNRCVGCDHLELSVPGDDEANRGTTGNGGGGTAVDEDYEVAGGSKESKANSSRGDNNQIVSNYTFDEAEALSDEIEEFSVVSKEVARIKEILLNKEDEPNSVLLDSLRHLKLMSLNVDILKSTEIGKAVNGLRKHSSDKIRQLAKTLIAEWKELVDQWVNTTKEITGAEGTPESANPSVLDEEEAFPSLPYDVDIFTPEPNGFEISHFFDSLDFDGNPRNSEEHNTSREHERRPQNIAKRKPEGTQMRIQDAPFRSIKPSSATDFDGTRRPVKQSTEQRMKNETVSVHKSEKPMIQRKPVVTEQKRKAPGPQQEKLKGLDADAKFEFAKRKLQESYQHHENAKKQRTIQVLEMIPKQGSAQKPQLKRPGMSNRNWANGRK

SEQ ID NO: 241 - protein, 236 aa, Arabidopsis thaliana
MDVFAFNASLSMCKDVAGIAGNIFAFGLFVSPMPTFRRIMRNKSTEQFSGLPYIYALLNCLICLWYGTPFISHSNAMLMTVNSVGATFQLCYIILFIMHTDKKNKMKMLGLLFVVFAVVGVIVAGSLQIPDQLTRWYFVGFLSCGSLVSMFASPLFVINLVIRTKSVEFMPFYLSLSTFLMSASFLLYGLFNSDAFVYTPNGIGTILGIVQLALYCYYHRNSIEEETKEPLIVSYV

SEQ ID NO: 242 - protein, 249 aa, Arabidopsis thaliana
MTKNYPTVSEDYKKAVEKCRRKLRGLIAEKNCAPIMVRLAWHSAGTFDCQSRTGGPFGTMRFDAEQAHGANSGIHIALRLLDPIREQFPTISFADFHQLAGVVAVEVTGGPDIPFHPGREDKPQPPPEGRLPDATKGCDHLRDVFAKQMGLSDKDIVALSGAHTLGRCHKDRSGFEGAWTSNPLIFDNSYFKELLSGEKEGLLQLVSDKALLDDPVFRPLVEKYAADEDAFFADYAEAHMKLSELGYLS

SEQ ID NO: 243 - protein, 314 aa, Arabidopsis thaliana
MYLLVFKLFLFLSLLQISVSARNLASQEPNQFQLLKYHKGALLSGKISVNLIWYGKFKPSQRAIISDFITSLTHTSPTSKTLHQPSVATWWKTTEKYYKLATPSKNSSPLSLTLGKQIIDESCSLGKSLTDKKIQTLASKGDQRNAINVVLTSADVTVTGFGMSRCGTHGHARGLGKRGSKFAYIWVGNSETQCPGQCAWPFHAPVYGPQSPPLVAPNNDVGLDGMVINLASLLAGTATNPFGNGYYQGPQNAPLEAASACPGVYGKGAYPGYAGDLLVDTTTGGSFNAYGANGRKFLLPALYDPTTSACSTMV

SEQ ID NO: 244 - protein, 373 aa, Arabidopsis thaliana
MGYLFEETLSSNPKTPIVVDDDNELGLMAVRLANAAAFPMVLKASLELGVFDTLYAEASRTDSFLSPSEIASKLPTTPRNPGAPVLLDRMLRLLASYSMVKCEKVSVGKGERVYRAEPICRFFLKNNIQDIGSLASQVIVNFDSVFLNTWAQLKDVVLEGGDAFGRAHGGMKLFDYMGTDERFSKLFNQTGFTIAVVKKALEVYQGFKGVNVLVDVGGGVGNTLGVVTSKYPNIKGINFDLTCALAQAPSYPGVEHVAGDMFVDVPTGDAMILKRILHDWTDEDCVKILKNCWKSLPENGKVVVIELVTPDEAENGDINANIAFDMDMLMFTQCSGGKERSRAEFEALAAASCFTHCKFVCQAYHCWIIEFCK

SEQ ID NO: 245 - protein, 373 aa, Arabidopsis thaliana; identical to SEQ ID NO: 244

SEQ ID NO: 246 - protein, 170 aa, Arabidopsis thaliana
MQQRKPTAGRPSGTDGSDFSYRMVVDSRYTKVTKEKARLRPLIFVQAAIYVIGLSCAFLTTTKKDEKNTLAIAAAVAGLVCSLIGELGCRRSRVNLLRLYTAASTIVMVLSVFCAVRSRLTMEERNSSGTTAKLELAGFICAQLGAVVQILAIIVTGSLVNNMSPPTKAA

SEQ ID NO: 247 - protein, 143 aa, Arabidopsis thaliana
MAMAFKMATTGMRVTDECTSSFMDMKWKKVHRYIVFKIEEKSRKVTVDKVGGAGESYHDLEDSLPVDDCRYAVFDFDFVTVDNCRKSKIFFIAWSPEASKIRAKILYATSKDGLRRVLEGIHYELQATDPTEMGFDIIQDRAK

SEQ ID NO: 248 - protein, 416 aa, Arabidopsis thaliana
MYQHIKVPAGEKIKVNADLSLNVPDNPIIPYIEGDGTGVDITPVMLKVVDAAVAKAYGGKRKISWMEIYAGEKSTKVYGPDVWLPEETMEVVKEYVVSIKGPLTTPVGGGIRSLNVALRQQLDLYVCLRPVRYFKGVPSPVREPEKTDMVIFRENSEDIYAGIEWEAESEGAKKLIAFLQNEMGVKKIRFPETSGIGIKPVSKEGTQRLVRKALQYAIDNDKPSVTLVHKGNIMKFTEGGFRDWGYELAQQEFGAELVDGGPWCKFKNPKTGRDIVVKDAIADAFLQQILLRPAEYSVIATLNLNGDYISDALAAQVGGIGIAPGANMSDSVAMFEATHGTAPKYAGKDYVNPGSEILSAEMMLRHMGWTEAADLIIRSMEKSIQSKKVTYDFARLLEGATQVSCSGFGQVMIDNM

SEQ ID NO: 249 - protein, 360 aa, Arabidopsis thaliana
MASSMLSSATMVASPAQATMVAPFNGLKSSAAFPATRKANNDITSITSNGGRVNCMQVWPPIGKKKFETLSYLPDLTDSGGRVNCMQAMGEPNLNPAYTLDQAIANLQQTEDASARYYAAWWIGRFRAAQPETIAALLVALEDETDRSPDGGYPLRRNAAKALGKLGDRQVVPALIKALECEDYYVRESAAQALEGLGDARAMAPLMAKLTGGLAAAQLVEGKPHLAQPYEAIIEALGTLQAVESIGLIEPFLEHFSPKVQYAAARALFQLTGDNRYGDLLITALGGTDLQLRRSAMMDLGATGYLPGAQAIAKAFAENSLKLIALRDLWATHRQRQASSESKALSPASRQILELMDSLL

SEQ ID NO: 250 - protein, 360 aa, Arabidopsis thaliana; identical to SEQ ID NO: 249

SEQ ID NO: 251 - protein, 277 aa, Glycine max
MKGEYVEQQQQHPKSETPPSMFSKLQPQHHPFPHHPFQLSAEDATTITPSTAQKANSSGGDGATIEVVRRPRGRPPGSKNKPKPPVIITRDPEPAMSPYILEVSGGNDVVEAIAQFSHRKNMGICVLTGSGTVANVTLRQPSTTPGTTVTFHGRFDILSVSATFLPQQSGASPAVPNGFAISLAGPQGQIVGGLVAGGLMAAGTVFVIAASFNNPAYHRLPPEEEGASAGDGHSPPVSGGGDSGHGQAESCGMSMYSCHLPSDVIWAPTARPPPPPY

SEQ ID NO: 252 - protein, 364 aa, Arabidopsis thaliana
MGKGGMSQGEGSKVEEENMAAWLVGINTLKIQPFLLPSVGPHDVRVRMKAVGICGSDVHYLKTMRCADFVVKEPMVIGHECAGIIEEVGEEVKHLVVGDRVALEPGISCWRCNLCREGRYNLCPEMKFFATPPVHGSLANQVVHPADLCFKLPENVSLEEGAMCEPLSVGVHACRRAEVGPETNVLVMGAGPIGLVTMLAARAFSVPRIVIVDVDENRLAVAKQLGADEIVQVTTNLEDVGSEVEQIQKAMGSNIDVTFDCAGFNKTMSTALAATRCGGKVCLVGMGHGIMTVPLTPAAAREVDVVGVFRYKNTWPLCLEFLTSGKIDVKPLITHRFGFSQKEVEDAFETSARGSNAIKVMFNL

SEQ ID NO: 253 - protein, 368 aa, Arabidopsis thaliana
MRKMVRDLKDSSSMIELRDFPGGPSTFELTMKFCYGINFDITAFNVVSLRCAAGYLEMTEDYKEQNLIFRAENYLDQIVFRSFHESVLVLCSCETQEIAETYEIPDRCVEAIAMNACRKQLVSGLSEELKGRDCLEMWTEELSALGIDYYVQVVSAMARLSVRSESIVASLVHYAKTSLKGIIDRNCQEQRKIVEAMVNLLPNDEKGSYSLSIIPLGFLFGMLKVGTIIDIEISCRLELERRIGHQLETASLDDLLIPSVQNEDSMYDVDTVHRILTFFLERIEEEDDECGYDSDSTGQHSSLLKVGRIMDAYLVEIAPDPYLSLHKFTAIIETLPEHSRIVDDGIYRAIDMYLKVNKNTIEQSLFMF

SEQ ID NO: 254 - protein, 287 aa, Arabidopsis thaliana
MSEALEDVPSMKGGCEEEEEGLNLKATELRLGLPGCESPEREGAFRSVVVSGAKRGFSDAIDENWNGGSEKDAALFSPRGAVSVSAAKSLTLTATDCTNQPTALGASVLKETVPRSPKPLHEKKPQISAPAAKAQVVGWPPIRSFRKNSMASQPQKNDTDAEAKSGCLYVKVSMEGAPYLRKVDLNSFTTYKDLSLALEKMFSCFTLSQCGSYGVSSRENLSESRLMDLLHGSEYVLTYEDKDGDWMLVGDVPWEMFTESCKRLRIMKSFEAIGLAPRAMEKCKSRN

SEQ ID NO: 255 - protein, 119 aa, Arabidopsis thaliana
MSTFLIRILLPLLIIAMTLPRRSEAESEQWCIADEQTPDDELQAALDWACGKGGADCSKMQQENQPCFLPNTIRDHASFAFNSYYQTYKNKGGSCYFKGAAMITELDPSHGSCQYEYNP

SEQ ID NO: 256 - protein, 92 aa, Arabidopsis thaliana
MALFLSPKTITLLFFSLSLALYCSIDPFHTAPFPISPISSLTKLSLHVPTKFHGREIHKIHFRNQRFCFLTKSKVQRASPLILSDVVRTRRC

SEQ ID NO: 257 - protein, 310 aa, Arabidopsis thaliana
MDVAAMARCVGRCYVSPAFGESESHRLSERRFLKLSSSTNSDPAGSKSLKLRGKIHRRMSYFRPIMAKDESISSRSGETKQINGKQKNIVWHDCPVTKSDRQELIKQKGCVIWITGLSGSGKSSLACALSRALHNRGKLSYILDGDNVRHGLNSDLSFEADDRAENIRRVGEVAKLFADSGIICIASLISPYRIERAACRALLPQGDFIEVFMDVPLHVCEARDPKGLYKRARAGKIKGFTGVDDPYEAPLDCEIVIQNSRDKGLSSSSSSSSSPSSSSSSLCEMADIVVSYLDQNGYLKKHSTKSRNCM

SEQ ID NO: 258 - protein, 537 aa, Arabidopsis thaliana
MGISKPLPLFSILVLYFSLYTITPTSSLASLQDQFINCVQRNTHVYFPLEKTFFAPTKNVSMFSQVLESTAQNLRFLKKSMPKPGFIFSPIHESHVQASIICSKKLRMHLRVRSGGHDYEGLSYVSQIDKPFILMDLSKMRQVNINIQDNSAWVQSGATVGELYYRIAEKSKVHGFPAGLCSSLGIGGHITGGAYGSMMRKYGLGADNVLDAKIVDANGKLLDRAAMGEDTFWAIRGGAGGSFGIILAWKIKLVPVPKTVTVFTVTKTLQQDVGNKIISKWQRVADKLVEELFIRVLFNVAGTGGNKTVTTSYNALFLGGKGTLMNVMKKSFPELGLTFKDCIEMSWLESIAYISGFPTHTPTNVLLQGKSPFPKVSFKAKSDFVKTPIPESGLQGIFKKLLKEDIPLMIWNPYGGMMAKIPESQIPFPHRKGVLFKVQYVTSWLDSDKRPSRHINWIRDLYSYMTPYVSSNPREAYVNYRDLDLGRNTKDVKTCIKQAQVWGANYFKNNFNRLMMIKAKVDPENFFRHEQSIPPMM

SEQ ID NO: 259 - protein, 326 aa, Arabidopsis thaliana
MSLTTVPTLAIRSGPSGHHSMPVLGFGTAASPLPEPTMLKETVIEAIKLGYRHFDTSPRYQTEEPIGEALAEAVSLGLVRSRSEFFVTTKLWCADAHGGLVVPAIKRSLKNLKLDYLDLYIIHWPVSSKPGKYKFPIDEDDFMPMDFEVVWSEMEECQRLGLAKCIGVSNFSCKKLQHILSIATIPPSVNQVEMSPIWQQRKLRELCRSNDIVVTAYSVLGSRGAFWGTPKIMESDVLKEIAEAKEKTVAQVSMRWAYEQGVSMVVKSFTKERLEENLKIFDWSLTEDETQRISTEIPQFRNVHGEVYTSKKGPIKSVAEMWDGEI

SEQ ID NO: 260 - protein, 380 aa, Arabidopsis thaliana
MICIDNSEWMRNGDYSPSRLQAQTEAVNLLCGAKTQSNPENTVGILTMAGKGVRVLTTPTSDLGKILACMHGLDVGGEINLTAAIQIAQLALKHRQNKNQRQRIIVFAGSPIKYEKKALEIVGKRLKKNSVSLDIVNFGEDDDEEKPQKLEALLTAVNNNDGSHIVHVPSGANALSDVLLSTPVFTGDEGASGYVSAAAAAAAAGGDFDFGVDPNIDPELALALRVSMEEERARQEAAAKKAADEAGQKDKDGDTASASQETVARTTDKNAEPMDEDSALLDQAIAMSVGDVNMSEAADEDQDLALALQMSMSGEESSEATGAGNNLLGNQAFISSVLSSLPGVDPNDPAVKELLASLPDESKRTEEEESSSKKGEDEKK

SEQ ID NO: 261 - protein, 511 aa, Arabidopsis thaliana
MEILTSIAITVATTIFIVLCFTIYLMIRIFTGKSRNDKRYAPVHATVFDLLFHSDELYDYETEIAREKPTYRFLSPGQSEILTADPRNVEHILKTRFDNYSKGHSSRENMADLLGHGIFAVDGEKWRQQRKLSSFEFSTRVLRDFSCSVFRRNASKLVGFVSEFALSGKAFDAQDLLMRCTLDSIFKVGFGVELKCLDGFSKEGQEFMEAFDEGNVATSSRFIDPLWKLKWFFNIGSQSKLKKSIATIDKFVYSLITTKRKELAKEQNTVVREDILSRFLVESEKDPENMNDKYLRDIILNFMIAGKDTTAALLSWFLYMLCKNPLVQEKIVQEIRDVTFSHEKTTDVNGFVESINEEALDEMHYLHAALSETLRLYPPVPVDMRCAENDDVLPDGHRVSKGDNIYYIAYAMGRMTYIWGQDAEEFKPERWLKDGLFQPESPFKFISFHAGPRICLGKDFAYRQMKIVSMALLHFFRFKMADENSKVYYKRMLTLHVDGGLHLCAIPRTST

SEQ ID NO: 262 - protein, 331 aa, Arabidopsis thaliana
MTAIPNVVDIESSSSSLCQETATETVTVERGSSDSSSKPDDVVLLIKEEEDDAVNLSLGFWKLHEIGLITPFLRKTFEIVDDKVTDPVVSWSPTRKSFIIWDSYEFSENLLPKYFKHKNFSSFIRQLNSYGFKKVDSDRWEFANEGFQGGKKHLLKNIKRRSKNTKCCNKEASTTTTETEVESLKEEQSPMRLEMLKLKQQQEESQHQMVTVQEKIHGVDTEQQHMLSFFAKLAKDQRFVERLVKKRKMKIQRELEAAEFVKKLKLLQDQETQKNLLDVEREFMAMAATEHNPEPDILVNNQSGNTRCQLNSEDLLVDGGSMDVNGRIEIE

SEQ ID NO: 263 - protein, 298 aa, Arabidopsis thaliana
MTEEFEIAGISTGAWWSSPTNTAAVFSGYSLPCSTEISPDVTNFGWQNFDNKINDHNDGCMNMHNSFFEGLLIDPNDQLLPDPWSKSTIPNAKSELLENFPFLDNMFLVDSEAESLLDHEIRNHKSSKEQITQDYRNLTSKRSEELEENSDEYSPRLLKRPRLETLSPLPSFKVRKEKLGDRITALQQLVSPFGKTDTASVLNEAVEYIKFLQEQVTVLSNPEQNTIGSVQQQQCSNKKSINTQGEVEEDECSPRRYVDLSSRGLCLMPISASYPVAAAAASAAEMNVHLVSGIFHSL

SEQ ID NO: 264 - protein, 302 aa, Arabidopsis thaliana
MSSSGTIWSYEEEKAFENAIAMHWIEESSKEQWEKIASAVPSKSMEDVKQHYQVLVEDVSAIEAGHISFPNYAASEEITSSNKDFHGSSKATSSDKRSNCNYGRGFSGLGHDSTTHSSGKGGLSRSSEQERRKGIPWTEEEHRLFLLGLEKFGKGDWRSISRNFVISRTPTQVASHAQKYFIRLNSMNRDRRRSSIHDITSVNNGDVANNQAPITGQHSSTIPSNTMGVGQSLKHRVQGHIPPGLGMYGTPVGHPVAAPPGHMASAVGTPVMLPPGPHPHAHPHPPYVLPLAYPMAPPTMHQ

SEQ ID NO: 265 - protein, 170 aa, Glycine max
MASDGSEEFRLVSPAFKNGGKLPRHYTDDGQGTKKNISPPLEWYNLPEGTKTLALVVEDIDATDSGGPMVPWTHWVVANILATVKGLPEGFSGKSAEMGGDYAAIKEGNNDLKVPGWNGPRLPTPGHRIQFRLYALDDELKLGNKLTKEKLLEDTIEGHVLGEATLMAIF

SEQ ID NO: 266 - protein, 420 aa, Arabidopsis thaliana
MANVISISHFTLLALPYLLLLLSSTAAAINVTAVLSSFPNLSSFSNLLVSSGIAAELSGRNSLTLLAVPNSQFSSASLDLTRRLPPSALADLLRFHVLLQFLSDSDLRRIPPSGSAVTTLYEASGRTFFGSGSVNVTRDPASGSVTIGSPATKNVTVLKLLETKPPNITVLTVDSLIVPTGIDITASETLTPPPTSTSLSPPPAGINLTQILINGHNFNVALSLLVASGVITEFENDERGAGITVFVPTDSAFSDLPSNVNLQSLPAEQKAFVLKFHVLHSYYTLGSLESITNPVQPTLATEEMGAGSYTLNISRVNGSIVTINSGVVLAVVTQTAFDQNPVSVFGVSKVLLPKELFPKSGQPVATAPPQEISLSPESSSEQPSRLVSPPREIVSSGAVKRPLGFLVLWCWCIAFCYVLV

SEQ ID NO: 267 - protein, 549 aa, Zea mays
MARRAASSLVSRCLLARAPAGAPPAAPSALRRTVPADGMHRLLPGVLQRFSTAAAVEEPITPSVHVNYTKLLINGNFVDSASGKTFPTLDPRTGEVIAHVAEGDAEDINRAVAAARKAFDEGPWPKMTAYERSRILLRFADLIEKHNDELAALETWDNGKPYEQAAQIEVPMVARLMRYYAGWADKIHGLIVPADGPHHVQILHEPIGVAGQIIPWNFPLLMFAWKVGPALACGNTLVLKTAEQTPLSALYISKLLHEAGLPEGVVNVVSGFGPTAGAALASHMDVDKIAFTGSTDTGKIILELAAKSNLKTVTLELGGKSPFIIMDDADVDHAVELAHFALFFNQGQCCCAGSRTFVHERVYDEFVEKAKARALKRVVGDPFRKGVEQGPQIDDEQFNKILRYIRYGVDGGATLVTGGDRLGDKGFYIQPTIFSDVQDGMKIAQEEIFGPVQSILKFKDLNEVIKRANASQYGLAAGVFTNSLDTANTLTRALRAGTVWVNCFDVFDAAIPFGGYKMSGIGREKGVDSLKNYLQVKAVVTPIKNAAWL

SEQ ID NO: 268 - protein, 549 aa, Oryza sativa
MAAAAARRGSSLLSRCLLSRPAAAASPAVPSALRRADGTQGLLPGILQRFSTAAVAEEPISPPVQVNYTQLLIDGKFVDSASGKTFPTLDPRTGELIAHVAEGDAEDINRAVHAARKAFDEGPWPKMTAYERSRILLRFADLIEKHNDEIAALETWDNGKPYAQAANIEVPMVARLMRYYAGWADKIHGLVVPADGPHHVQVLHEPIGVAGQIIPWNFPLLMFAWKVGPALACGNTVVLKTAEQTPLSALFASKLLHEAGLPDGVVNVVSGFGPTAGAALASHMDVDKIAFTGSTDTGKVVLELAARSNLKSVTLELGGKSPFIIMDDADVDHAVELAHFALFFNQGQCCCAGSRTFVHERIYDEFVEKAKARALKRVVGDPFKNGVEQGPQIDDEQFNKILRYIKYGVDSGANLVTGGDRLGDKGYYIQPTIFSDVQDNMRIAQEEIFGPVQSILKFNDLNEVIKRANASQYGLAAGVFTNNLNTANTLTRALRVGTVWVNCFDVFDAAIPFGGYKQSGIGREKGIDSLKNYLQVKAVVTPIKNAAWL

SEQ ID NO: 269 - protein, 55 aa, Oryza sativa
MAGTANCIDILIAIILPPLGVFLKFGCGHEFWICLLLTFLGYIPGIIYAIYAITK

SEQ ID NO: 270 - protein, 55 aa, Saccharomyces cerevisiae
MDSAKIINIILSLFLPPVAVFLARGWGTDCIVDIILTILAWFPGMLYALYIVLQD

SEQ ID NO: 271 - protein, 406 aa, Arabidopsis thaliana
MDPSFRFIKEEFPAGFSDSPSPPSSSSYLYSSSMAEAAINDPTTLSYPQPLEGLHESGPPPFLTKTYDLVEDSRTNHVVSWSKSNNSFIVWDPQAFSVTLLPRFFKHNNFSSFVRQLNTYGFRKVNPDRWEFANEGFLRGQKHLLKNIRRRKTSNNSNQMQQPQSSEQQSLDNFCIEVGRYGLDGEMDSLRRDKQVLMMELVRLRQQQQSTKMYLTLIEEKLKKTESKQKQMMSFLARAMQNPDFIQQLVEQKEKRKEIEEAISKKRQRPIDQGKRNVEDYGDESGYGNDVAASSSALIGMSQEYTYGNMSEFEMSELDKLAMHIQGLGDNSSAREEVLNVEKGNDEEEVEDQQQGYHKENNEIYGEGFWEDLLNEGQNFDFEGDQENVDVLIQQLGYLGSSSHTN

SEQ ID NO: 272 - protein, 155 aa, Arabidopsis thaliana
MDLGRFPIISILEDMLEVPEDHNNEKTRNNPSRVYMRDAKAMAATPADVIEHPNAYAFVVDMPGIKGDEIKVQVENDNVLVVSGERQRENKENEGVKYVRMERRMGKFMRKFQLPENADLDKISAVCHDGVLKVTVQKLPPPEPKKPKTIQVQVA

SEQ ID NO: 273 - protein, 164 aa, Zea mays
MADDGGSHEGSGGGGGVREQDRFPPIANISRIMKKAVPANGKIAKDAKETLQECVSEFISFVTSEASDKCQKEKRKTINGDDLLWAMATLGFEEYVEPLKIYLQKYKEMEGDSKLSTKAGEGSVKKDAISPHGGTSSSSNQLVQHGVYNQGMGYMQPQYHNGET

SEQ ID NO: 274 - protein, 280 aa, Zea mays
MDSSSFVPAAGAENGSAAGGANNGRVAQQQAPAIREQDRLMPIANVIRIMRRVLPAHAKISDDAKETIQECVSEYISFITGEANERCQREQRKTITAEDVLWAMSRLGFDDYVEPLGAYLHRYREFEGDARGVGLVPGAAPSRGGDHHPHPHSMSPAAMLKSRGPVSGAAMLPHHHQHHHDMQMHGAMYGGTAVPPPAGPPHHGGFLMPHPQGSSHYLPYAYEPTYGGEHAMAAYYGGAAYAPGNGGSGDGSGSGGGGGSASHTPQGSGGLEHPHPFAYK

SEQ ID NO: 275 - protein, 224 aa, Oryza sativa
MPDSDNESGGPSNAGEYASAREQDRFLPIANVSRIMKRALPANAKISKDAKETVQECVSEFISFITGEASDKCQREKRKTINGDDLLWAMTTLGFEDYIDPLKLYLHKFRELEGEKAIGAAGSGGGGAASSGGSGSGSGSHHHQDASRNNGGYGMYGGGGGMIMMMGQPMYGSPPASSAGYAQPPPPHHHHHQMVMGGKGAYGHGGGGGGGPSPSSGYGRQDRL

SEQ ID NO: 276 - protein, 177 aa, Oryza sativa
MADHHGGHHADGHRRQQQLQGEAADQAAAEIIKEQDRLLPIANVGRIMKQILPPNAKISKEAKETMQECVSEFISFVTGEASDKCHKEKRKTVNGDDVCWAFGALGFDDYVDPMRRYLNKYRELEGDRAAAAATSRSGAGAAAGPDHPSSSSSAAAATAGHFMFNAMDRSTDSSRQF

SEQ ID NO: 277 - protein, 93 aa, Oryza sativa
MASFARRAMSLAQIPSARISSGAASIGQRRCLAGAADHHGSTKVDFWKQPTNPGNWKEEHFVLISLSGWGLLFYSGYKLATGGKKETPVESTQ

SEQ ID NO: 278 - protein, 143 aa, Oryza sativa
MSEGFDGTENGGGGGGGGVGKEQDRFLPIANIGRIMRRAVPENGKIAKDSKESVQECVSEFISFITSEASDKCLKEKRKTINGDDLIWSMGTLGFEDYVEPLKLYLRLYRETEGDTKGSRASELPVKKDVVLNGDPGSSFEGM

SEQ ID NO: 279 - protein, 296 aa, Oryza sativa
MDPMDIVGKSKEDVSLPKSTMFKIIKEMLPPDVRVARDAQDLLVECCVEFINLLSSESNEVCSREDKKTIAPEHVLRALQDLGFREYIEEVQAAYEHHKHDTLDSPKASKFTGVEMTEEQAVAEQQRMFAEARARMNNGAAKPKEPEPEAQQQTQQPPQPQLHPQPQQPLQPQLQLHPQPQQQPSQLHPQQLLHPQSQQTPQPQPQVHPQPQQPPQLQPQPQLLQQPQLPQQLQPQSQLPPQPQQPPQLQLQSQLHPQPQQPPQLQPQPQLHQQPQPQAELQSQSQPQTEHGLDSS

SEQ ID NO: 280 - protein, 254 aa, Zea mays
MRKKLGTRFPAARIKKIMQADEDVGKIALAVPVLVSRSLELFLQDLIDRTYEITLQSGAKTLNSFHLKQCVKRYSSFDFLTEVVSKVPDLGGADSCGDERGLPRRRKSNGSDPENDESRSSKMAIRNANISPRGRGRGRGRGRGRPPTKRKEVGYVQFEDESSMFAEQGEPLPGEETVQEINGNETMPQSTQPPVEAPPTALAQATTSSKAEEANSDHQSDWPMPDAIGSIGVVPSGFGHLTVQVEDEDYDNED

SEQ ID NO: 281 - protein, 351 aa, Arabidopsis thaliana
MSPEMEFVKVLGKGTYGSVELFSHKQNDGSLLYNAVKIMDSENYGSIDQEFRILSELRGCPCIVQLCGNSLVQGIDCNGKKVYMMSMEYAAAGTLTNFIKRNRTKLSDSVIKDFTRMILQGLVSIHNHGYVHCDLKPDNILLFPLYDKDTWNCSYELKISDFGISTRAGDKSGCWRVDEPWVGTSIYMSPESVSDGTTVEKTLDLWSLGCIVLKMYTGKRPWLGFEKDVKSLLLNQKAPEIPETLPCDARLFLEKCFSRKPEERGSASELLLHPFLTGDEKKGSSVAGGERTGMVLRLRKPPPISKDIPTKPRKLKVISQKPQQLKKVSNKPLKVKIVPPRPPRSDFVPVL

SEQ ID NO: 282 - protein, 351 aa, Arabidopsis thaliana; identical to SEQ ID NO: 281

SEQ ID NO: 283 - protein, 344 aa, Arabidopsis thaliana
MATISFSHNHQSSDNRRGGSHHHRHGPVVEEIEGLIKVFNDGCVERPPIVPIVSPTIHPSSKATAFDIKLSNDTWTRVYIPDAAAASPSVTLPLLVYFHGGGFCVGSAAWSCYHDFLTSLAVKARCVIVSVNYRLAPEHRLPAAYDDGVNVVSWLVKQQISTGGGYPSWLSKCNLSNVFLAGDSAGANIAYQVAVRIMASGKYANTLHLKGIILIHPFFGGESRTSSEKQQHHTKSSALTLSASDAYWRLALPRGASRDHPWCNPLMSSAGAKLPTTMVFMAEFDILKERNLEMCKVMRSHGKRVEGIVHGGVGHAFHILDNSSVSRDRIHDMMCRLHNFIHPS

SEQ ID NO: 284 - protein, 93 aa, Arabidopsis thaliana; identical to SEQ ID NO: 277

SEQ ID NO: 285 - protein, 294 aa, Arabidopsis thaliana
MAIPTETQHQEKEASDASAAAAQKRWTLSDFDIGKPLGRGKFGHVYLAREKRSNHVVALKVLFKSQLQQSQVEHQLRREVEIQSHLRHPNILRLYGYFYDQKRVYLILEYAARGELYKDLQKCKYFSERRAATYVASLARALIYCHGKHVIHRDIKPENLLIGAQGELKIADFGWSVHTFNRRRTMCGTLDYLPPEMVESVEHDASVDIWSLGILCYEFLYGVPPFEAMEHSDTYRRIVQVDLKFPPKPIISASAKDLISQMLVKESSQRLPLHKLLEHPWIVQNADPSGIYRV

SEQ ID NO: 286 - protein, 294 aa, Arabidopsis thaliana; identical to SEQ ID NO: 285

SEQ ID NO: 287 - protein, 413 aa, Arabidopsis thaliana
MGLCWGSPSDSPPTTTPSSTGNISSGTFKSSNNTTTTGTSRGSNISSNSGFSVASGEDAYPDGQILPIPNLRIFSLAELRASTRNFRSENVLGEGGFGKVFKGWLEDKTPGKQSNGTVIAVKKLNAESFQGFEEWQCEVNFLGRVSHPNLVKLLGYCLEGEELLLVYEYMQKGSLENHLFRKGSAVQPLSWEIRLKIAIGAAKGLAFLHASEKQVIYRDFKASNILLDGSYNAKISDFGLAKLGPSASQSHITTRVMGTHGYAAPEYVATGHLYVKSDVYGFGVVLAEILTGLHALDPTRPTGQHNLTEWIKPHLSERRKLRSIMDPRLEGKYPFKSAFRVAQLALKCLGPEPKNRPSMKEVVESLELIEAANEKPLERRTTRASPSIRQQQGHYRPQQLSSFRPRQNVSRAH

SEQ ID NO: 288 - protein, 413 aa, Arabidopsis thaliana; identical to SEQ ID NO: 287

SEQ ID NO: 289 - protein, 180 aa, Arabidopsis thaliana
MASSLIFLLLVTLTFSASTLISAKSNTTTIIESTCKTTNYYKFCVSALKSDPRSPTADTKGLASIMVGVGMTNATSTANYIAGNLSATVKDTVLKKVLQDCSEKYALAADSLRLTIQDLDDEAYDYASMHVLAAQDYPNVCRNIFRRVKGLAYPVEIRRREASLRRICGVVSGILDRLVE

SEQ ID NO: 290 - protein, 180 aa, Arabidopsis thaliana; identical to SEQ ID NO: 289

SEQ ID NO: 291 - protein, 311 aa, Saccharomyces cerevisiae
MLRITVKTLQQRASFHHSFKHISVPDLHTRAQNDQTNCYCQEINARLPSKTDPLDPHIKLPHRTPNYNKHVLLLSPGDRFAQPWKVAWNHNLDTNTNRPYNAISKLRSHLGGSPGILINAVHLQNEFIPRPKQHDEWLYFFVIPDMKLYVIKETDIEEFASFLDEGAIQAPKLSFQDYLSGKAKASQQVHEVHHRKLTRFQGETFLRDWNLVCGHYKRDAKCGEMGPDIIAAFQDEKLFPENNLALISHIGGHIFAGNVIFYKLFGREKMQNKLDSLWFGKVYPHNLKLLCENLENGKIIDEMYRGGISMN

SEQ ID NO: 292 - protein, 311 aa, Saccharomyces cerevisiae; identical to SEQ ID NO: 291

SEQ ID NO: 293 - protein, 535 aa, Arabidopsis thaliana
MVITANDLSKWENFPKGLKVLLLLNGCDSDGDGSSAAETRSELESMDYIVTTFTDETEALSAVVKNPESFYIAIVEVNMSAESESFKFLEAAKDVLPTIMISTDHCITTTMKCIALGAVEFLQKPLSPEKLKNIWQHVVHKAFNDGGSNVSISLKPVKESVVSMLHLETDMTIEEKDPAPSTPQLKQDSRLLDGDCQENINFSMENVNSSTEKDNMEDHQDIGESKSVDTTNRKLDDDKVVVKEERGDSEKEEEGETGDLISEKTDSVDIHKKEDETKPINKSSGIKNVSGNKTSRKKVDWTPELHKKFVQAVEQLGVDQAIPSRILELMKVGTLTRHNVASHLQKFRQHRKNILPKDDHNHRWIQSRENHRPNQRNYNVFQQQHRPVMAYPVWGLPGVYPPGAIPPLWPPPLQSIGQPPPWHWKPPYPTVSGNAWGCPVGPPVTGSYITPSNTTAGGFQYPNGAETGFKIMPASQPDEEMLDQVVKEAISKPWLPLPLGLKPPSAESVLAELTRQGISAVPSSSCLINGSHRLR

SEQ ID NO: 294 - protein, 470 aa, Arabidopsis thaliana
MYIYTYTKSYVFPQMDQEEEEIEIPNYFICPISLEIMKDPVTTVSGITYDRQNIVKWLEKVPSCPVTKQPLPLDSDLTPNHMLRRLIQHWCVENETRGVVRISTPRVPPGKLNVVEEIKNLKKFGQEALGREETLQKLEVLAMDGNNRRLMCECGVHKSLILFVVKCTSEDEDGRRRIKGLDESLRLLHLIGIPSNDAKTILMENDRVMESLTWVLHQEDFLSKAYTIVLLRNLTEYTSSHIVERLNPEIFKGIIGFLKDVVNSVNRTSPTVRETVQSSSRPSLGKTEPSKLDHSLVIKQAVTAALMILLETSSWSRNRSLLVDLGAVSELIELEISYTGEKRITELMLGVLSRLCCCANGRAEILAHRGGIAVVTKRLLRVSPAADDRAISILTTVSKFSPENMVVEEMVNVGTVEKLCSVLGMDCGLNLKEKAKEILKDHFDEWKKFPCIDITLLTKLLSISPKGPKI

SEQ ID NO: 295 - protein, 297 aa, Arabidopsis thaliana
MKSRKSYGHLLSPVGSPPLDNESGEAAAAAAAGGGGCGSSAGYVVYGGGGGGDSPAKEQDRFLPIANVSRIMKRSLPANAKISKESKETVQECVSEFISFVTGEASDKCQREKRKTINGDDLLWAMTTLGFEAYVGPLKSYLNRYREAEGEKADVLGGAGGAAAARHGEGGCCGGGGGGADGVVIDGHYPLAGGLSHSHHGHQQQDGGGDVGLMMGGGDAGVGYNAGAGSTTTAFYAPAATAASGNKAYCGGDGSRVMEFEGIGGEEESGGGGGGGERGFAGHLHGVQWFRLKRNTN

SEQ ID NO: 296 - protein, 576 aa, Brassica napus
MAASFSVPSMIMEEEGRFEAEVAEVQTWWNSERFKLTRRPYTARDVVALRGHLKQGYASNEMAKKLWRTLKSHQANGTASRTFGALDPVQVTMMAKHLDTIYVSGWQCSSTHTSTNEPGPDLADYPYDTVPNKVEHLFFAQQYHDRKQREARMSMSREERAKTPFVDYLKPIIADGDTGFGGTTATVKLCKLFVERGAAGVHIEDQSSVTKKCGHMAGKVLVAVSEHINRLVAARLQFDVMGTETVLVARTDAVAATLIQSNIDSRDHQFILGVTNPSLRGKSLSSLLAEGMAVGKNGPALQAIEDQWLSSARLMTFSDAVVEALKRMNLSENEKSRRVNEWLNHARYENCLSNEQGRELAAKLGVTDLFWDWDLPRTREGFYRFQGSVTAAVVRGWAFAQIADLIWMETASPDLNECTQFAEGVKSKTPEVMLAYNLSPSFNWDASGMTDQQMMEFIPRIARLGYCWQFITLAGFHADALVVDTFAKDYARRGMLAYVERIQREERSNGVDTLAHQKWSGANYYDRYLKTVQGGISSTAAMGKGVTEEQFKETWTRPGAAGMGEGTSLVVAKSRM

SEQ ID NO: 297 - protein, 572 aa, Zea mays
MASPFSVPSLIMEEEGRFEAEVAEVESWWGTERFRLTKRPYTARDVVLLRGTLRQSYASGEMAKKLWRTLKAHQAGGTASRTFGALDPVQVTMMAKHLDTIYVSGWQCSSTHTSTNEPGPDLADYPYDTVPNKVEHLFFAQIYHDRKQREARMSLPRAERARAPYVDFLKPIIADGDTGFGGATATVKLCKLFVERGAAGVHLEDQSSVTKKCGHMAGKVLVAVSEHVNRLVAARLQFDVMGVETVLVARTDAVAATLIQTNVDARDHQFIVGATNPGLRGQSLAAVLSAGMSAGKSGRELQAIEDEWLAAARLKTFSECVRDAIAGLGVAGQEKQRRLQEWDRATGGYDRCVSNDQARDIAASLGVTSVFWDWDLPRTREGFYRFRGSVAAAVVRGRAFAPHADVLWMETSSPNVAECTAFAEGVKAACPEAMLAYNLSPSFNWDASGMTDAEMAAFIPSVARLGYVWQFITLAGFHADALVTDTFARDFARRGMLAYVERIQREERINGVETLEHQKWSGANFYDRVLKAVQGGISSTAAMGKGVTEEQFKDPRPATGSSGLQVMAKSRI

SEQ ID NO: 298 - protein, 331 aa, Zea mays
MDAAVSTLTALAIFASTVEHAAYRSVQGYRVVGRKGGGWVRWERWVERQFVLSLSFPRCVEVALPAAAPRILPAGWRSRPVFREGQTVDTWRCIVAFDSVAAVAPSSPPPPVLSPFVNPQLQYLSNLYNDLLMVFRFREEKTVPQLVNSKQPIRCGEQGKTSDLGDASESDSDGDCQSGKELAPPVQKHTRANRKHIDSITLVDIAQYFHLPIRDASKTLKIGVSILKRKCRQYGIPRWPHRKIKSLDSLIHDLEFVLAREDEDEEEEKQLQKDRLAAAINALTKRKSMLESEKETIQQKPAMDLMAETKLFREDVFKRRYRAKSSVMDMD

SEQ ID NO: 299 - protein, 196 aa, Glycine max
MSQLGAVLRTQREPRRSTILGLLTEQMDGVDSGTRRRRSFKERFGFIGMGCCGATWGFRSDALSVTQGEQQQQETDPECVGPAGLGSGMNLAAALAAERQLRGPQEEAVRAPGTPWRVSLMRLLEETEAEKEKEKEKEENVVGNDSVCCVCMGRKKGAAFIPCGHTFCRVCSRELWLNRGSCPLCNRSILEILDIF

SEQ ID NO: 300 - protein, 232 aa, Arabidopsis thaliana
MLRSSIRLLYIRRTSPLLRSLSSSSSSSSSKRFDSAKPLFNSHRIISLPISTTGAKLSRSEHSMAASSEPKSLYDFTVKDAKGNDVDLSIYKGKVLLIVNVASQCGLTNSNYTELAQLYEKYKGHGFEILAFPCNQFGNQEPGTNEEIVQFACTRFKAEYPIFDKVDVNGDKAAPVYKFLKSSKGGLFGDGIKWNFAKFLVDKDGNVVDRFAPTTSPLSIEKDVKKLLGVTA

SEQ ID NO: 301 - protein, 232 aa, Arabidopsis thaliana; identical to SEQ ID NO: 300

SEQ ID NO: 302 - protein, 152 aa, Zea mays
MAAEEDVKQRQIIENRARNISHNVRCTECGSQSIEDSQADVAILLRKLIRDEIKAGKSDKEIYKKLEDDYGETVLYAPKFDLQTAGIWLSPVIVGGIAAGIWAYQRHRQRTNVHIMALNLVRGVPLTPREKETMLDILTPPPAPRKWWWPGK

SEQ ID NO: 303 - protein, 344 aa, Arabidopsis thaliana
MFSCIACTKADGGEEVEHGARGGTTPNTKEAVKSLTIQIKDMALKFSGAYKQCKPCTGSSSSPLKKGHRSFPDYDNASEGVPYPFMGGSAGSTPAWDFTNSSHHPAGRLESKFTSIYGNDRESISAQSCDVVLDDDGPKEWMAQVEPGVHITFASLPTGGNDLKRIRFSREMFDKWQAQRWWGENYDKIVELYNVQRFNRQALQTPARSDDQSQRDSTYSKMDSARESKDWTPRHNFRPPGSVPHHFYGGSSNYGPGSYHGGPPMDAARTTTSSRDDPPSMSNASEMQAEWIEEDEPGVYITIRQLSDGTRELRRVRFSRERFGEVHAKTWWEQNRERIQTQYL

SEQ ID NO: 304 - protein, 405 aa, Zea mays
MLTCIACSKQLPGDAPPLREPSDDDDRANAGGGGESAATPGTRQAIRVLTAQIKDMALKASGAYRHCKPCAGSSSPAASRRQQPYYHGAYAESGSDRFHCAYQRAGSSAASTPGLRTGGAMSSGDITPSVSARTDFLADDEEGDDEEGTATGSSEEDEEKEWVAQVEPGVLITFLSLPRGGNGLKRIRFSREMFNKWQAQRWWTENYEKVMELYNVQKSNSQVDPLPSIPRSDSEISKDDTPATAPLNKGQLLRTSPRPLKGSEAIGYSSSDCPQHQSSHFRNVYRKDRYLGHQFCDPVELASTPELSSISGAKTETSIGASVRTSSSPEEVDGSGELSASVSNASDEEREWVEEDEPGVYITIRALPGSIRELRRVRFSRERFSEMHARLWWEENQARIYEQYL

SEQ ID NO: 305 - protein, 624 aa, Zea mays
MNAVEPSAAAIAEDPITPAASAAPYPGRLREALTALSEACESGNFNASETASFTISDILDTAAGVSGELDDGSDDSQDASRSGASEVLLREVLEFLSRPSSISNQMALDALSLVLPKPVAKLGARMGRCRDVAAAILKFFVTNCNPRDMLSILCEALDAPMELPNGLSSFVLLLDALAKVFTLIQRRHIEQVKVALPVVLKVMHATVSECVEEHGSAAVDLFNAAHGVGKAIQEMCISMFNKNKDLCAILGLYSLQNIALVSRSRQQDILSACGSVVFQSFRFLKTSGFTYRGLLTGSDVTAATVELSKEEDADFMEHFSFAMDGAALSVVWTLMHDDKDMSKYAGEELELAVKEVQGNHMEKWEAINMLKYVLSSIHYPWIIKSHSLNLMLILSGEDHVEEINNHVDFTCFAHRIFETLKAIESVMIAAPMALVRKKAFAALKKVISMVPSSQRFDILHGLVNNSTSPALTAILLDLVRQEVSRESRQADNDCIEDEGFRGNGLPRWASHALELVELILRPPEGGPPCLPDHSEQVISALNLLRFILIIDSRGQRSAKLFRKETLHKVHSEWLTPLRPIAEQIQLENEKDADEITKQIVCMLNLVQLVLYRCIELVEEKMKGC

SEQ ID NO: 306 - protein, 66 aa, Thermotoga maritima MSB8
MRGKVKWFDSKKGYGFITKDEGGDVFVHWSAIEMEGFKTLKEGQVVEFEIQEGKKGPQAAHVKVVE

SEQ ID NO: 307 - protein, 66 aa, Thermotoga maritima MSB8
MRGTVKWFDSKKGYGFITMENGEDIFVHWSAIQMDGFKTLRENETVEFEVQKGTKGPQAVNVRPVR

SEQ ID NO: 308 - protein, 66 aa, Thermoanaerobacter tengcongensis MB4
MVRGKVKWFNAEKGYGFIEREDGTDVFVHYSAIEGEGFKTLEEGQAVEFEVVQAAKGPQASKVRKL

SEQ ID NO: 309 - protein, 66 aa, Bacillus caldolyticus
MQRGKVKWFNNEKGYGFIEVEGGSDVFVHFTAIQGEGFKTLEEGQEVSFEIVQGNRGPQAANVVKL

SEQ ID NO: 310 - protein, 80 aa, Triticum aestivum
MQITGKVKWFNESKGFGFITPDDGSKDVFVHFTAIAGNGFKTLAEGQRVEFEIQDGQKGPSAVNVKALELEEDKSISSKL

SEQ ID NO: 311 - protein, 78 aa, Zea mays
MGLWTLLEGFLLLANALAILNEDRFLGPRGWSMSEVSGNGQTKSFKGQIVGLIYATQFLRMPLIALNVLIIVVKLVSG

SEQ ID NO: 312 - protein, 171 aa, Arabidopsis thaliana
MLFFNPGFTCMQEEFQLALFKSRKRENIFANRIFDMFDVKRKGVIDFGDFVRSLNVFHPNASLEDKIDFTFRLYDMDCTGYIERQEVKQMLIALLCESEMKLADETIEIILDKTFEDADVNQDGKIDKLEWSDFVNKNPSLLKIMTLPYLRDITTTFPSFVFHSEVDEIAT

SEQ ID NO: 313 - protein, 857 aa, Arabidopsis thaliana
MAEKVSEDVMLLHGDLDLKIVKARRLPNMDMFSEHLRRLFTACNACARPTDTDDVDPRDKGEFGDKNIRSHRKVITSDPYVTVVVPQATLARTRVLKNSQEPLWDEKFNISIAHPFAYLEFQVKDDDVFGAQIIGTAKIPVRDIASGERISGWFPVLGASGKPPKAETAIFIDMKFTPFDQIHSYRCGIAGDPERRGVRRTYFPVRKGSQVRLYQDAHVMDGTLPAIGLDNGKVYEHGKCWEDICYAISEAHHMIYIVGWSIFHKIKLVRETKVPRDKDMTLGELLKYKSQEGVRVLLLVWDDKTSHDKFGIKTPGVMGTHDEETRKFFKHSSVICVLSPRYASSKLGLFKQQVVGTLFTHHQKCVLVDTQAVGNNRKVTAFIGGLDLCDGRYDTPEHRILHDLDTVFKDDFHNPTFPAGTKAPRQPWHDLHCRIDGPAAYDVLINFEQRWRKATRWKEFSLRLKGKTHWQDDALIRIGRISWILSPVFKFLKDGTSIIPEDDPCVWVSKEDDPENWHVQIFRSIDSGSVKGFPKYEDEAEAQHLECAKRLVVDKSIQTAYIQTIRSAQHFIYIENQYFLGSSYAWPSYRDAGADNLIPMELALKIVSKIRAKERFAVYVVIPLWPEGDPKSGPVQEILYWQSQTMQMMYDVIAKELKAVQSDAHPLDYLNFYCLGKREQLPDDMPATNGSVVSDSYNFQRFMIYVHAKGMIVDDEYVLMGSANINQRSMAGTKDTEIAMGAYQPNHTWAHKGRHPRGQVYGYRMSLWAEHLGKTGDEFVEPSDLECLKKVNTISEENWKRFIDPKFSELQGHLIKYPLQVDVDGKVSPLPDYETFPDVGGKIIGAHSMALPDTLTT

SEQ ID NO: 314 - protein, 711 aa, Arabidopsis thaliana
MPALACVDTSFVPPAYAFSDTAGDVFIPASSPTSAAVVVDRWSPSLSSSLYRIDGWGAPYFIANSSGNISVRPHGSETLPHQDIDLLKIVKKVTGPKSSGGLGLQLPLIVRFPDVLKNRLECLQSAFDYAIKSQGYDSHYQGVYPVKCNQDRFVVEDIVKFGSSFRFGLEAGSKPEILLAMSCLCKGSPDAFLVCNGFKDAEYISLALLGRKLALNTVIVLEQEEELDLVIELSQKMNVRPVIGLRAKLRTKHSGHFGSTSGEKGKFGLTTTQIVRVVRKLRQSGMLDCLQLLHFHIGSQIPSTSLLSDGVAEAAQLYCELVRLGAHMKVIDIGGGLGIDYDGSKSGESDLSVAYSLEEYAEAVVASVRVVCDRSSVKHPVICSESGRAIVSHHSVLIFEAVSADKPMVHQATPGDIQFLLEGNEEARANYEDLYAAVMRGDHESCLLYVDQLKQRCVEGFKEGVLSIEQLASVDGLCEWVLKAIGASDPVHTYNINLSVFTSIPDLWGIDQLFPIVPIHKLDQRPGARGILSDLTCDSDGKINKFIGGESSLPLHELDKNGSGGRYFLGMFLGGAYEEALGGVHNLFGGPSVVRVSQSDGPHSFAVTRAVPGQSSADVLRAMQHEPELMFQTLKHRAEEMMHTKGGSEGENEEEEEDDEFNNVAASLDRSFHNMPYLATEQASPSNSLSAAISNLGFYYCDEDVYDYISA

SEQ ID NO: 315 - protein, 293 aa, Saccharomyces cerevisiae
MAQEITHPTIVDGWFREISDTMWPGQAMTLKVEKVLHHEKSKYQDVLIFKSTTYGNVLVLDNVIQATERDEFAYQEMIAHLALNSHPNPKKVLVIGGGDGGVLREVVKHDSVEEAWLCDIDEAVIRLSKEYLPEMAASYSHPKVKTHIGDGFQFLRDYQNTFDVIITDSSDPEGPAETLFQKEYFQLLNSALTEKGVITTQAESMWIHLPIIKDLKKACSEVFPVAEYSFVTIPTYPTGTIGFMVCSKDKTCNVKKPLREISDEKEAELYRYYNKKIHEASFVLPTWAAKELN

SEQ ID NO: 316 - protein, 508 aa, Saccharomyces cerevisiae
MNTVSPAKKKVIIIGAGIAGLKAASTLHQNGIQDCLVLEARDRVGGRLQTVTGYQGRKYDIGASWHHDTLTNPLFLEEAQLSLNDGRTRFVFDDDNFIYIDEERGRVDHDKELLLEIVDNEMSKFAELEFHQHLGVSDCSFFQLVMKYLLQRRQFLTNDQIRYLPQLCRYLELWHGLDWKLLSAKDTYFGHQGRNAFALNYDSVVQRIAQSFPQNWLKLSCEVKSITREPSKNVTVNCEDGTVYNADYVIITVPQSVLNLSVQPEKNLRGRIEFQPPLKPVIQDAFDKIHFGALGKVIFEFEECCWSNESSKIVTLANSTNEFVEIVRNAENLDELDSMLEREDSQKHTSVTCWSQPLFFVNLSKSTGVASFMMLMQAPLTNHIESIREDKERLFSFFQPVLNKIMKCLDSEDVIDGMRPIENIANANKPVLRNIIVSNWTRDPYSRGAYSACFPGDDPVDMVVAMSNGQDSRIRFAGEHTIMDGAGCAYGAWESGRREATRISDLLK

SEQ ID NO: 317 - protein, 506 aa, Zea mays
MAASAKGRLVPVLAVAAALAAVLLYRAPFSKSLGGEGCSLLPHDHFWIASDRVVTLGRVGPAAVEVKGGLINAIAVGDYRSFVLRRPLLDYGDAVIMPGLIDVHAHLDEPGRAEWEGFSNGTRAAAAGGITTLVDMPLNSFPSTVSEETLKLKLEAARDKLYVDVGFWGGLVPENAFNPSALEGLLKAGVLGLKSFMCPSGINDFPMTNSTHIEEGLVTLAKYKRSLLIHAERIPEAEDHDLQEDELDPRSYMTYLKSRPPSWEEAAIRDLQRAMKDTELGGRSEGAHIHIVHLSDAKTSLELMKDAKRSGASLSIETCPHYLAFSSEEVPDGDTRFKCSPPIRDDTNRENLWKALLDGHIDMLSSDHSPSTPDLKLMEEGDFLRAWGGISSLQFVLPVTWSYGRKYGVTLNQLASWWSERPAKLAGQKNKGAILPGYHADIVVWKPETEFQLDNNHAIYHKHQNISAYLGKQLSGKVLSTFVRGNLVFAEDKHANAACGVPILAK

SEQ ID NO: 318 - protein, 129 aa, Zea mays
MACPTKKGMTGEPSSPCSSASASTLPEHHQTVWTSPPKRPAGRTKFRETRHPVFRGVRRRGSAGRWVCEVRVPGRRGCRLWLGTFDTAEAAARAHDAAMLALAGAGACCLNFADSAWLLAVPASCASLA

SEQ ID NO: 319 - protein, 137 aa, Zea mays
MDMGRLQLQLQHAASSSSTSASSSSSSEQNKLAWSPSSPQPPKKRPAGRTKFRETRHPVFRGVRRRGAAGRWVCEVRVPGRRGARLWLGTYLGAEAAARAHDAAMLALGRGAACLNFPDSAWLLAVPPPPALSGGLD

SEQ ID NO: 320 - protein, 73 aa, Arabidopsis thaliana
MVFPACVQCGTRQNPCRCKVVGPTLGFVAFLITGIIEWPVGAVVYIFKHAKGRRIMGHPARKVYPKVSRSIPI

SEQ ID NO: 321 - protein, 285 aa, Saccharomyces cerevisiae
MELSSPSKKTTTSPINIPGGNRDNLIIGPHSHSFKTDPFSSNNSSLLSKISTNPSLESPFSSKSLLDCSPVQAVKKSLESEAKTHSLDEETNEQTDVKILNIADFPTDELILMISALLNRIITANDETTDVSQQVSEETEDELLTPILAFYGKNVPEIAVVQYLERIQKYCPTTNDIFLSLLVYFDRISKNYGHSSERNGCAKQLFVMDSGNIHRLLITGVTICTKFLSDFFYSNSRYAKVGGISLQELNHLELQFLILCDFKLLVSVEEMQKYANLLYKFWNDQ

SEQ ID NO: 322 - protein, 599 aa, Agrobacterium tumefaciens
MQGDKPVPHRPGRSDGSTGPMLDKGGGRGKLSSPERFREWTRKTMAKQDELVFVPLGGVGEIGMNLALYGYGPESKRQWIMVDCGVTFAGPDLPGVDLVLPDISYIAEQKKNLKGIIITHAHEDHYGAMNDLWPGLNVPVYASPFTAGMLEAKRAYEGTRAEIPVTIFKAGDRINVGPFEIEAVGVNHSIPEPMSLIIRTPLGNVIHTGDWKIDEAPSLGPLTDEARFRAIGEEGVLALMCDSTNALRDGVSPSEHEVSEGLRQIIESAEGRVAVTTFSSNVGRIRSIAQAAEAAGREVLLLGSSLKRVVNVSQDLGIMEGIKPFLAEDEYGYIPRDRVVVILTGSQGEPRAALAKLSRDEMRNVALASGDTVVFSSRAIPGNEKAIIEIKNGLIEQGVHIVTDNEALVHVSGHPRRNELLRMYEWTKPQILVPVHGEAAHLVAQKELAEQAGISQVPKVRNGNVLRLAPGPAEVINDVPHGRVFKDGNLVGDMDEMGISNRRKLSFAGHVAVNVVLDSRYDFLGDPDVVPFGLPEFDDEDEAMEDTLYDAVLGAVESIPRARRKDLALLRESVRRAVRAAANQSWGKKPIVTVFVTKV

SEQ ID NO: 323 - protein, 216 aa, Arabidopsis thaliana
MEPRINDLQVESRVHELLDFPVHTNQISSAIYECPNDHIENPKKKPYNCPHSGAKCDVTGDIQRLLLHLRNDHNVEMSDGRSFSHRYVHHDPKHLHHATWMLTLLDCCGRKFCLYFEAFHLRKTPMYMAFMQFMGDEEEAMSFSYSLQVGGNGRKLTWQGVPRSIRDSHKTVRDSQDGLIITRKLALFFSTDNNTTDKELKLKVSGRVWREQPVSI

SEQ ID NO: 324 - protein, 216 aa, Arabidopsis thaliana; identical to SEQ ID NO: 323

SEQ ID NO: 325 - protein, 218 aa, Arabidopsis thaliana
MSSINITNVTVLDNPAPFVNPFQFEISYECLTSLKDDLEWKLIYVGSAEDETYDQVLESVLVGPVNVGNYRFVLQADSPDPLKIREEDIIGVTVLLLTCSYMDQEFIRVGYYVNNDYDDEQLREEPPTKVLIDKVQRNILTDKPRVTKFPINFHPENEQTLGDGPAPTEPFADSVVNGEAPVFLEQPQKLQEIEQFDDSDVNGEAIALLDQPQNLQET

SEQ ID NO: 326 - protein, 102 aa, Arabidopsis thaliana
MHGRTAMAVACLLCMTALLLVQDVQSRRLLWTEQEKKQSHGGLGNHGAADRRSTSLEPCSGAMGGGGTGSADKQGEFPCDDDTSKWTELHTDYIYTQDFKHP

SEQ ID NO: 327 - protein, 569 aa, Arabidopsis thaliana
MANSKKQAWFFYTTGLPSDIEIEVDDITFHLHKFPLMSKSKKLHQLITEQEQSKVYSHIKLENFPGGSEIFEMVIKISYGFKVDISVSTAVPLRCAAEYLEMTEEYSPENLISKTEKFLSEFVFTNVQESIKALKACESVSSLAESLCITEQCIDSIVFQASSTDPSSFYGWPINNGGIFTVDRKKQSKDSKTELWFEDLTELSFPIFRRVILSMKSSVLSPEIVERSLLTYAKKHIPGISRSSSASSSSSSSSTTIASENQQRELLETITSDLPLTATTTRSLFGLLRAAIILNASENCRKFLEKKIGSNLEKATLDDLLIPSYSYLNETLYDIDLVERLLRRFLENVAVSSSSLTVVGRLIDGVLGEIASDANLKPEQFYNLAVLLPVQARVYDDGLYRAVDIYFKTHSWILEEEKEKICSVMDCRKLTVEGCTHAAQNERLPLRAVVQVLFLEQLQLRQVITGTLLTEEDGDKTVVDLGRWKEAVKENQVLRLDMDTMRTRVNQLEKECLYLKKVIAKIDKESLLKAKHGAGKWSIGKKFGCKFSAQVCDSQEATMVDRRSRRFLS

SEQ ID NO: 328 - protein, 196 aa, Arabidopsis thaliana
MATALASKLSKGRSLLGGLCNAFSGLMNSSSNGMMNGSILSQQQHRTFIQMGTILKCVDNSCAKEVMCIQSLRGKKGARLGDIIVGSVKEANPIVQKKVKKDAIPKGKVKKGMVVYGVVVRAAMPKGRADGSQVKFDDNAIVVVGIKEKKGQNNSHGSKRKMEYNQPTGTRVFGPVPHEMRLRKQLKILSLAQHIV

SEQ ID NO: 329 - protein, 479 aa, Synechocystis sp. PCC 6803
MASSMLSSATMVASPAQATMVAPFNGLKSSAAFPATRKANNDITSITSNGGRVNCMQVWPPIGKKKFETLSYLPDLTDSGGRVNCMQAMGKNLLEQLRQFTVVVADTGDIQAIETFTPRDSTTNPSLITAAAQMPQYQEIVDSTLLKAKDEAGENASIKDIVRLAFDRLAVAFGLKILQIIPGRVSTEVDARLSYDTEATIAKARYLIGEYAKAGIDKKRILIKIASTWEGIKAAEVLEQEGIHCNLTLLFGLHQAIACAEAKVTLISPFVGRILDWYKKSTGKEYDSHEDPGVQSVTTIYNYYKRFGYKTEVMGASFRNIGEIIELAGCDLLTISPQLLDQLRNTEGDLPRKLDPATVPQDIEKIVMDKATFDKMHAEDPMASEKLAEGIAGFTKALEVLEHLLEERLKVLDGQEHIKHGAEEIFHAYDLDGDGFITREEWAGTDVVFDALDRDHDGKITAAEMSAGLGAAFRLASVG

SEQ ID NO: 330 - protein, 316 aa, Arabidopsis thaliana
MDPALLDDVIRRLLEVKNLKPGKNAQLSESEIKQLCAAAKEIFLQQPNLLELEAPIKICGDVHGQYSDLLRLFDYGGYPPQANYLFLGDYVDRGKQSLETICLLLAYKVKYPENFFLLRGNHECASVNRIYGFYDECKRRFSVKLWKTFTDCFNCLPVSALIDEKILCMHGGLSPELNKLEQILNLNRPTDVPDTGLLCDLLWSDPSNEATGWAINDRGVSFTFGPDKVSEFLEKHDLDLICRAHQVVEDGYEFFASRQLVTIFSAPNYCGEFDNAGAMMSVDDTLMCSFQILKPARKMMGGSTNNKSGFKSFRGW

SEQ ID NO: 331 - protein, 323 aa, Desulfitobacterium hafniense
MTNTVRKIAVLTSGGDAPGMNAAIRAVVRKGIYHGLEVFGIRKGYEGLIHGEFITMHLGAVADIIHRGGTMLMTARSQEMLTPEGQKNAAAQLRYRGIDALIVIGGDGSFRGAQTLSAQGIAIVGIPGTIDNDITGTDLTIGFDTAVNNVVQAVSKIRDTATSHDRTFLVEVMGRDCGNIALQSGVACGAESILVPEIEPDLDDIVAKLERGHQRGKHHSIIMVAEGAMSAWNLGEELRQRTGFETRVTILGHIQRGGNPSALDVVLASQMGGKAVEILCAGETDRMTACVNQEIQSLPLEVAYGERKPFNKVLYDLANQLAI

SEQ ID NO: 332 - protein, 323 aa, Desulfitobacterium hafniense; identical to SEQ ID NO: 331

SEQ ID NO: 333 - protein, 421 aa, Arabidopsis thaliana
MDSISLLPDDFLLRILSLLPTKDVLNTSVLSKRWRYLWKLVPKLQYSLIDKNADHGTFVRFVDRSLLLSMAPVLESLHLKLGRQCSEVDIGFWVRIAVEKGLCELDFDYEHYKTEPCRLPQSLFTCGTLTVLKLKNVSLKDVQFPVCFKLLKTLHLEYVIFLDKETPQKLLSSCPILEVFDLTRDDDDVDNVMSFSVMVPSLQRFIYCGGSGAELVMNTPSLKYLKLSGCGYECMIGNLPEIVEAHVEVACSTDDILTSLASVKRLLLCLPTEPELPTGTIFHQLEHLEFCSCCTEWDILMFMLKHSPKLRSLKLNETHGYTIVSQSDPMFHWEEPSSVPETLMFVLETLEWRNYRGLKMENELASFLLKHSRRLKIATFSPADCKQVRIELRTTVGMKYRILMELARLPRGSAECELVFG

SEQ ID NO: 334 - protein, 509 aa, Zea mays
MIANGLRKSSAASSQVSKLVKYIASAGSLQGGHSLSEPSARHYSSEPSLQATEENGFKGHSMLAPFTAGWQSTDVHPLVIERSEGSYVYDSNGKKYIDALAGLWCTALGGNEPRLVKAATEQLNKLPFYHSFWNRTTKPSLDFANDILSMFTAREMGKVFFTNSGSEANDSQVKLVWYYNNALGRPDKKKFIARSKSYHGSTLIAASLSGLPALHQKFDLPAPFVLHTDCPHYWRFRLPDETEEEFSTRLANNLENLVLKEGPETIAAFIAEPVMGAGGVILPPKTYFEKIQAVLKKYDILLIADEVITAFGRLGTMFGCDMYNIKPDLVSIAKALSSAYMPIGAILVSPEITDVIYSQSNKLGSFAHGFTYSGHPVSCAVAVETLKIYKERNIVEHVNKIAPRFQEGIKAFSGSPIVGEIRGLGLILGTEFVDNKSPNDPFPAEWGVGSIFGAECEKRGMLIRVAGDSIMLSPPLIMTPNEVEEIISKFGDALKATEERIGELKSRKN

SEQ ID NO: 335 - protein, 368 aa, Arabidopsis thaliana
MARRSVSIFNRLLANPPSPFTSLSRSITYMPRPGDGAPRTVTLIPGDGIGPLVTGAVEQVMEAMHAPVHFERYEVLGNMRKVPEEVIESVKRNKVCLKGGLATPVGGGVSSLNMQLRKELDIFASLVNCINVPGLVTRHENVDIVVIRENTEGEYSGLEHEVVPGVVESLKVITKFCSERIARYAFEYAYLNNRKKVTAVHKANIMKLADGLFLESCREVAKHYSGITYNEIIVDNCCMQLVAKPEQFDVMVTPNLYGNLIANTAAGIAGGTGVMPGGNVGAEHAIFEQGASAGNVGNDKMVEQKKANPVALLLSSAMMLRHLRFPTFADRLETAVKQVIKEGKYRTKDLGGDCTTQEVVDAVIAALE

SEQ ID NO: 336 - protein, 181 aa, Arabidopsis thaliana
MENDDITVAEMKPKKRAGRRIFKETRHPIYRGVRRRDGDKWVCEVREPIHQRRVWLGTYPTADMAARAHDVAVLALRGRSACLNFSDSAWRLPVPASTDPDTIRRTAAEAAEMFRPPEFSTGITVLPSASEFDTSDEGVAGMMMRLAEEPLMSPPRSYIDMNTSVYVDEEMCYEDLSLWSY

SEQ ID NO: 337 - protein, 494 aa, Zea mays
MAPGSSSSRKAKALKASYRLVADNFLAVLAMVSVVAVLFAAWPISIEDLACRLHAVRPLHVLTAAILTAALAKLRRMSRPSDVYLVEYGCFWPKPCFRAPFATCLEHVRLLPYLVNEDDISWGWRLLQRSGIGEETCVPYAYHYLPPDRSFRASLDETELVIFSAVDDVFARTTAVTPADIGVVIVNCSIFTPTPVFTDMIVNRYKLRADVRSVNLSGMGCSAALISIGLARNMLQVAPPGTHALIVSTEILSSQYYVGMDRSMLLPNCLFRMGAAAMIMSNTAARGARFRLARVVRTVASARDAAYRCVFQVEDEESNTGIRLSKDLVPTAAQTLKSNIVAFGPLVLPASEKLLVALSILRRRLVQSSRGRVYRPDFRTAFEHFCIHAGGRGVIDEVQRGLGLSDEDVEASRMTLHRFGNTSSSSVVYELAYIEAKGSMRKGDRVWMISFGAGFDCSSVAWECIEPAADAAGPWADCIHRYPVQLPKLMEALD

SEQ ID NO: 338 - protein, 245 aa, Arabidopsis thaliana
MENEREKLIYLAKLGCQAGRYDDVMKSMRKVCELDIELSEEERDLLTTGYKNVMEAKRVSLRVISSIEKMEDSKGNDQNVKLIKGQQEMVKYEFFNVCNDILSLIDSHLIPSTTTNVESIVLFNRVKGDYFRYMAEFGSDAERKENADNSLDAYKVAMEMAENSLAPTNMVRLGLALNFSIFNYEIHKSIESACKLVKKAYDEAITELDGLDKNICEESMYIIEMLKYNLSTWTSGDGNGNKTDG

SEQ ID NO: 339 - protein, 245 aa, Arabidopsis thaliana; identical to SEQ ID NO: 338

SEQ ID NO: 340 - protein, 208 aa, Arabidopsis thaliana
MEKIVRSSSLILLVGLLLFMNFHGFVRIAEATKRRIEISDDLDDVEDNEEDESWKEWGKKATTPEFDPPPDFTNMGFDQIQEEMAKRTFGTVVGFVKLRLGVPRTKDVVIDIAMKWTKVLRTGGIGVRFMAVDRSTVMFNMQNGKLVTELREFVLSQEEAYEVKIGKQEFRRPGDPPFEDVFDKFQAEQRKDHEDGDGNKNDLTKDEL

SEQ ID NO: 341 - protein, 208 aa, Arabidopsis thaliana; identical to SEQ ID NO: 340

SEQ ID NO: 342 - protein, 200 aa, Arabidopsis thaliana
MSSKKIVLTSSDGESFKVEEVVARKLQIVGHIIEDDCATNKIPIPNVTGEILAKVIEYCKKHVEDDDDVVETHESSTKGDKTVEEAKKKPDDVAVPESTEGDDEAEDKKEKLNEWDAKFMKDFDIKTIFDIILAANYLNVQGLFDLCSKTIADYIKDMTPEEVRELFNIENDFTPEEEEAIRNENAWTFEQDGKQQVPKP

SEQ ID NO: 343 - protein, 247 aa, Arabidopsis thaliana
MYKWNLPYRKDDVETGREGGERSLYPTMLESPELRWGFIRKVYSIIAFQLLATIAVASTVVFVRPIAVFFATTSAGLALWIVLIITPLIVMCPLYYYHQKHPVNYLLLGIFTVALAFAVGLTCAFTSGKVILEAAILTTVVVLSLTVYTFWAAKKGYDFNFLGPFLFGALIVLMVFALIQIFFPLGRISVMIYGCLAAIIFCGYIVYDTDNLIKRYSYDEYIWAAVSLYLDIINLFLALLTIFRAAE

SEQ ID NO: 344 - protein, 247 aa, Arabidopsis thaliana; identical to SEQ ID NO: 343

SEQ ID NO: 345 - protein, 116 aa, Glycine max
MATLDSDVPMVPAGEPSSSAGPSSKKPKRFEIKKWNAVALWAWDIVVDNCAICRNHIMDLCIECQANQASATSEECTVAWGVCNHAFHFHCISRWLKTRQVCPLDNSEWEFQKYGH

SEQ ID NO: 346 - protein, 443 aa, Arabidopsis thaliana
MMVFVVFVMCRYKILEELGDGTCGSVYKAVNLETYEVVAVKKMKRKFYYWEECVNLREVKALRKLNHPHIIKLKEIVREHNELFFIFECMDHNLYHIMKERERPFSEGEIRSFMSQMLQGLAHMHKNGYFHRDLKPENLLVTNNILKIADFGLAREVASMPPYTEYVSTRWYRAPEVLLQSSLYTPAVDMWAVGAILAELYALTPLFPGESEIDQLYKICCVLGKPDWTTFPEAKSISRIMSISHTEFPQTRIADLLPNAAPEAIDLINRLCSWDPLKRPTADEALNHPFFSMATQASYPIHDLELRLDNMAALPNLELNLWDFNREPEECFLGLTLAVKPSAPKLEMLRNVSQDMSENFLFCPGVNNDREPSVFWSLLSPDENGLHAPVESSPLSLSFSPMQQHTVGPPQSSGFTMTSSMQPNMLDRPWMAVSAPFQQSHYL

SEQ ID NO: 347 - protein, 323 aa, Arabidopsis thaliana
MEAEAAAKRARESGDAAAAGAGEQAGISAVIPGWFSEISPMWPGEAHSLKVEKVLFQGKSDYQNVMVFQSSTYGKVLVLDGVIQVTERDECAYQEMITHLPLCSIKDPKKVLVIGGGDGGVLREVSRHSSVEQIDICEIDKMVVDVSKQFFPHLAVGFEDPRVSLHIGDGVAFLKNAPEGTYDAVIVDSSDPIGPAQELFEKPFFQSVARALRPGGVVCTQAESIWLHMHIIEDIVANCRQVFKGSVNYAWTTVPTYPSGVIGFMLCSTEGPTVDFQHPIFNIEDNEFSTKSKGPLKFYNSEIHSASFCLPSFAKRVIGSKAN

SEQ ID NO: 348 - protein, 250 aa, Arabidopsis thaliana
MTSASELFSTRRSRPGRSDPALESDTSSYRHHSHHHHRRHGVHHHNQRHDSDGCDPLRRPTPRLRRFFHHPIQERSRPIRDVQGTSQYLNTDSTDTETQSSSFVNLNGSERLPGAVLLARDRLFERLRGVSLSSNSRSNRVSLDDQRESSFHSIDGDPIFQLAGLQVTYECNKKPQGLTQDAINCLHRQTFSSAEVKSEMRDCSICLESFTKGDMLISLPCTHSFHSSCLNPWLRACGDCPCCRRAIAKE

SEQ ID NO: 349 - protein, 250 aa, Arabidopsis thaliana; identical to SEQ ID NO: 348

SEQ ID NO: 350 - protein, 158 aa, Arabidopsis thaliana
MSDEEHHFESSDAGASKTYPQQAGTIRKNGYIVIKNRPCKVVEVSTSKTGKHGHAKCHFVAIDIFTSKKLEDIVPSSHNCDVPHVNRTDYQLIDISEDGYVSLLTDNGSTKDDLKLPNDDTLLQQIKSGFDDGKDLVVSVMSAMGEEQINALKDIGPK

SEQ ID NO: 351 - protein, 158 aa, Arabidopsis thaliana
MSDDEHHFESSDAGASKTYPQQAGNIRKGGHIVIKGRPCKVVEVSTSKTGKHGHAKCHFVAIDIFTSKKLEDIVPSSHNCDVPHVNRVDYQLIDISEDGFVSLLTDNGSTKDDLKLPTDEALLTQLKNGFEEGKDIVVSVMSAMGEEQMCALKEVGPK

SEQ ID NO: 352 - protein, 197 aa, Arabidopsis thaliana
MSASRFVKCVTVGDGAVGKTCLLISYTSNTFPTDYVPTVFDNFSANVVVNGSTVNLGLWDTAGQEDYNRLRPLSYRGADVFILAFSLISKASYENVSKKWIPELKHYAPGVPIVLVGTKLDLRDDKQFFIDHPGAVPITTAQGEELRKQIGAPTYIECSSKTQENVKAVFDAAIRVVLQPPKQKKKKSKAQKACSIL

SEQ ID NO: 353 - protein, 528 aa, Arabidopsis thaliana
MVIGAAARVAIGGCRKLISSHTSLLLVSSQCRQMSMDAQSVSEKLRSSGLLRTQGLIGGKWLDSYDNKTIKVNNPATGEIIADVACMGTKETNDAIASSYEAFTSWSRLTAGERSKVLRRWYDLLIAHKEELGQLITLEQGKPLKEAIGEVAYGASFIEYYAEEAKRVYGDIIPPNLSDRRLLVLKQPVGVVGAITPWNFPLAMITRKVGPALASGCTVVVKPSELTPLTALAAAELALQAGVPPGALNVVMGNAPEIGDALLTSPQVRKITFTGSTAVGKKLMAAAAPTVKKVSLELGGNAPSIVFDDADLDVAVKGTLAAKFRNSGQTCVCANRVLVQDGIYDKFAEAFSEAVQKLEVGDGFRDGTTQGPLINDAAVQKVETFVQDAVSKGAKIIIGGKRHSLGMTFYEPTVIRDVSDNMIMSKEEIFGPVAPLIRFKTEEDAIRIANDTIAGLAAYIFTNSVQRSWRVFEALEYGLVGVNEGLISTEVAPFGGVKQSGLGREGSKYGMDEYLEIKYVCLGDMNRH

SEQ ID NO: 354 - protein, 471 aa, Arabidopsis thaliana
MWRRSNLPGNPDSDQSISEEEEENDISPKENAKEQERGLLLQTKLEKLIGCGELNYARETGDVTLEATLRKISSSLEDVVEVPDSPEESYISSSRRTGLACISAQENGSDDEITHDEQVATWSAISKETKSLIHLNGVASVASSHLSGFRAKKSSNGLKDHGRPKFSFNSHTHGETSSKISDMAEIFEPDVEDQAIEEDPIIECPNSFDERSENRQGVSVAESREVLHECTKDAVPKLQEIPLDKIRLIKRSSELDSRHEAKSRKFTHKGNSSNFQDSDTDDELPGPMDSGSSSDDEPSYQSSVPNISNQKKQFVGDRFDEAIKASSLSKEGLLFGSPKLSGGSSLYGKLQQIMKQEKETEMEIMRKLQSGIGEADSSGYVDVKVMSRHLEGKLVVCKCSVIDLSGDSLLLKNTQALAAKETETTIIFSPKVCADVDIEIGNFIRVYAPWKELEVQKTNDVIILSSYFSSL

SEQ ID NO: 355 - protein, 70 aa, Zea mays
MSALFNFNSFLTVVLLVICTCSYIKMQFPAILNDRTGFRGFFWKAARIGERLSPWVSVGCLAMGISTIFF

SEQ ID NO: 356 - protein, 316 aa, Arabidopsis thaliana
MGGGGAMRSAAKIAGIGVSKAALRPSALPTEQTVRNASRPTAVSGVSSQSAKSAEVAPLHTAAAWDDWDFAEDGELVVPRMVFGSVPTLDEAKEATAELKDAIDQVYLCPETSQYSSPGGQVSALSPTLYGPVNRSCVIDAISDPTAPKHAIQAFHLLSTSREAQAVVASLACDPNVWNAVMENSAVSSFFQSQQSVAGFGAAENSEEVDKLSSCASETVESPEKLEGSAESHPGNMFDDFMGLLQNVKLTVIELVSRLSGFLQNIFPTPDAMREKMSFDADGNTKASFMDSKISMGGTFIGLAVLVIMVIVTKRA

SEQ ID NO: 357 - protein, 152 aa, Arabidopsis thaliana
MAEEQQHQRWQEGHRLCANNCGFFGSPATLDLCSKCYRDLYQQQPAGAAAGPSAPTASAFQHSSSAVSGAAAVSPDLEPPATAPAGAKAGRCSSCRKRVGLTGFACRCGATFCGVHRYPERHACAFDFRAAGRDAIARANPVVKGDKLKDKI

SEQ ID NO: 358 - protein, 122 aa, Arabidopsis thaliana
MEHGSFTNVSHASFTLSEEDHTLANAVRFVLNQDPRVTVAAYTIPHPSLEQVNIRVQTTGDPAREVFKDACQELMQMNRHVRSVFDKAVAEYKDEQKRKEEAEEEELKRQRDLFGSMDIENN

SEQ ID NO: 359 - protein, 298 aa, Glycine max
MVYVKAQKSKAYFKRYQVKFKRRREGKTDYRARIRLINQDKNKYNTPKYRFVVRFSNKDIVAQIISASIAGDLVLATAYSHELPRYGLEVGLTNYAAAYCTGLLLARRVLKTLEMDEEYEGNVEATGEDYSVEPAESRRPFRALLDVGLVRTTTGNRVFGALKGALDGGLDIPHSDKRFAGFDKEKKELDAEVHRKYVFGGHVAAYMKILAEDEPEKYQSHFSEYIKRGIEADGIEALYKKVHAAIRADPTLRKSDKEPPKEHKRYNMKKLTYEERKAKLIARVAAINSAADSDEDDE

SEQ ID NO: 360 - protein, 314 aa, Zea mays; identical to SEQ ID NO: 243

SEQ ID NO: 361 - protein, 379 aa, Zea mays
MGAELGEAGVPARDMVDALEGVRSILLKPSERLDDKRFTRIAGADFDDAGLGLAGLLGSLASTGFQASNLGDAIDVVNQMLDWRLSHEKPSDDCAEAELDPAYRESVKCKIFLGFTSNLVSSGVREIIRFLVQHRMVDVIVTTAGGIEEDLIKCLAPTYRGDFTLPGALLRSRGLNRIGNLLVPNDNYCKFEHWIMPILDKMLLEQSTQNVWTPSKVIARLGKEINDESSYLYWAYKNNIPVFCPALTDGSIGDMLFCHSVHSPGLVVDIVQDVRLMNAETIHASPRKTGIILLGGGLPKHHICNANMLRDGADYAVYVNTAQEFDGSDSGARPDEAVSWGKIKSSARTVKVHCDATIAFPLLVAATFARKVHGTKSTN

SEQ ID NO: 362 - protein, 500 aa, Oryza sativa
MSSSPSFGLLALAAVLLALNLAQHGSLAATVGPRVIVVGAGMSGISAAKRLSEAGITDLLILEATDHIGGRMHKTNFAGINVELGANWVEGVNGGKMNPIWPIVNSTLKLRNFRSDFDYLAQNVYKEDGGVYDEDYVQKRIELADSVEEMGEKLSATLHASGRDDMSILAMQRLNEHQPNGPATPVDMVVDYYKFDYEFAEPPRVTSLQNTVPLATFSDFGDDVYFVADQRGYEAVVYYLAGQYLKTDDKSGKIVDPRLQLNKVVREIKYSPGGVTVKTEDNSVYSADYVMVSASLGVLQSDLIQFKPKLPTWKVRAIYQFDMAVYTKIFLKFPRKFWPEGKGREFFLYASSRRGYYGVWQEFEKQYPDANVLLVTVTDEESRRIEQQSDEQTKAEIMQVLRKMFPGKDVPDATDILVPRWWSDRFYKGTFSNWPVGVNRYEYDQLRAPVGRVYFTGEHTSEHYNGYVHGAYLSGIDSAEILINCAQKKMCKYHVQGKYD

SEQ ID NO: 363 - protein, 710 aa, Arabidopsis thaliana
MSASPSSMSGAGAGEAGVRTVVWFRRDLRVEDNPALAAAARAAGEVVPVYVWAPEEDGPYYPGRVSRWWLSQSLKHLDASLRRLGASRLVTRRSADAVVALIELVRSIGATHLFFNHLYDPLSLVRDHRVKALLTAEGIAVQSFNADLLYEPWEVVDDDGCPFTMFAPFWDRCLCMPDPAAPLLPPKRIAPGELPARRCPSDELVFEDESERGSNALLARAWSPGWQNADKALAAFLNGPLMDYSVNRKKADSASTSLLSPYLHFGELSVRKVFHQVRMKQLMWSNEGNHAGDESCVLFLRSIGLREYSRYLTFNHPCSLEKPLLAHLRFFPWVVDEVYFKVWRQGRTGYPLVDAGMRELWATGWLHDRIRVVVSSFFVKVLQLPWRWGMKYFWDTLLDADLESDALGWQYISGSLPDGRELDRIDNPQLEGYKFDPHGEYVRRWLPELARLPTEWIHHPWDAPESVLQAAGIELGSNYPLPIVELDAAKTRLQDALSEMWELEAASRAAMENGMEEGLGDSSDVPPIAFPPELQMEVDRAPAQPTVHGPTTAGRRREDQMVPSMTSSLVRAETELSADFDNSMDSRPEVPSQVLFQPRMEREETVDGGGGGGMVGRSNGGGHQGQHQQQQHNFQTTIHRARGVAPSTSEASSNWTGREGGVVPVWSPPAASGPSDHYAADEADITSRSYLDRHPQSHTLMNWSQLSQSL

SEQ ID NO: 364 - protein, 105 aa, Synechocystis sp. PCC 6803
MEGVGARQRRNPLIPRPNGSKRHLQHQHQPNAAEKKTAATSNYFSIEAFLVLVFLTMSLLILPLVLPPLPPPPSLLLLLPVCLLILLVVLAFMPTDVRSMASSYL

SEQ ID NO: 365 - protein, 296 aa, Arabidopsis thaliana
MVTATASTPFSLSSSVVFTRRRNFKRFPVCASLSPEVSPLLRAAHHTVDNYVKSGMIIGLGSGEASDFAIRYLGQQLGSGSLHNVVGVPMSARSASEAAKYGIPLEYYRDGVQIDFAFHDADAVEENTLIAVIGRRRSSQEDDYILKQKSIVKVADEAVFMIKEEQYKAGLEGSIPVLVQSLNWLAIAEEIDDLYLGDAEVWRRASVENEGPLGGDFPIVTSDGHNILDVIFTTPIRSLADLATSLDKIDGVVDHGLIIKTRCTVVIAEETVVRSVTLQTSALEGGVRTYGQTLQK

SEQ ID NO: 366 - protein, 109 aa, Zea mays
MSGVWVFKNGVVRLVEKQQATAGTAVAGGRRKALVHTPSGQVVSSYAALEARLTALGWERYYEDPSLFQFHKRGSLDLISLPADFSAFSSVHMYDIVVKNRDSFRVVDA

SEQ ID NO: 367 - protein, 418 aa, Oryza sativa
MTLTDAQISIVKSTAPVLKQHGEAITTVFYNDLITENPSLKNIFSLTSQATGAQPRALAHAVLAYATYIDNLSALSEAVARIAHKHVSLQVEPAQYAIVGQYLIQAIGKVLGDAATPEIVDAWTAAYGVLANVFIGVEGGMYEENEKKDHWKGWRKFRIARKVEESSSISSFYLRPVDGATLPKYLPGQYVSVQVLVSQLGYLQSRQYSLSEAPKEGGMEEYRISVKREEGETGAPGLVSNLLHGMQEGAEVEVSHPQGEFFLDPADASKEGVPAVLISVGVGATPMMAILKSLLQENVKRRPVSWIHASKSSSTQPFGEEVRRIVKENPEQVSAHVFLKTVAGTDQAGVHYDFADTRMDLTKLDGERDLHLADKRTEYYICGPETFMVETRKVLVGLGVDKSKVHLELFATGFVADE

SEQ ID NO: 368 - protein, 288 aa, Arabidopsis thaliana
MARNGIGSSGGKKNGAGQFFLATLLLWLVSVVFEIAFNLRTELLWVICGGCFFQLMNWVVRSWISRDPIFVNTSVSLLHSIITSASVVFILLNQCLAKGLDEMFDHSELVGGTWKWAYPALCFSCGYFAYDQWDMLQYRLYSGLIPSILVHHLVLLVCFTLALYRNVTINYLILTLICEMHSIFLHVRKLRRMAGIRDSNTALVKLEWVLNWTAFVFARCIPHILITIKLIKDAHKFGKGVELPLALSGMAGMNILNVGLGLDLFHAFRRERSHRRNQENGNLHDHGE

SEQ ID NO: 369 - protein, 724 aa, Arabidopsis thaliana
MEFGSFLVSLGTSFVIFVILMLLFTWLSRKSGNAPIYYPNRILKGLEPWEGTSLTRNPFAWMREALTSSEQDVVNLSGVDTAVHFVFLSTVLGIFACSSLLLLPTLLPLAATDNNIKNTKNATDTTSKGTFSQLDNLSMANITKKSSRLWAFLGAVYWISLVTYFFLWKAYKHVSSLRAQALMSADVKPEQFAILVRDMPAPPDGQTQKEFIDSYFREIYPETFYRSLVATENSKVNKIWEKLEGYKKKLARAEAILAATNNRPTNKTGFCGLVGKQVDSIEYYTELINESVAKLETEQKAVLAEKQQTAAVVFFTTRVAAASAAQSLHCQMVDKWTVTEAPEPRQLLWQNLNIKLFSRIIRQYFIYFFVAVTILFYMIPIAFVSAITTLKNLQRIIPFIKPVVEITAIRTVLESFLPQIALIVFLAMLPKLLLFLSKAEGIPSQSHAIRAASGKYFYFSVFNVFIGVTLAGTLFNTVKDIAKNPKLDMIINLLATSLPKSATFFLTYVALKFFIGYGLELSRIIPLIIFHLKKKYLCKTEAEVKEAWYPGDLSYATRVPGDMLILTITFCYSVIAPLILIFGITYFGLGWLVLRNQALKVYVPSYESYGRMWPHIHQRILAALFLFQVVMFGYLGAKTFFYTALVIPLIITSLIFGYVCRQKFYGGFEHTALEVACRELKQSPDLEEIFRAYIPHSLSSHKPEEHEFKGAMSRYQDFNAIAGV

SEQ ID NO: 370 - protein, 447 aa, Arabidopsis thaliana
MDIFDNSDLEYLVDEFHADFDDDEPFGEVDVTSESDSDFMDSDFDFELSESKTNNETSALEARNGKDIQGIPWESLNYTRDRYRENRLLHYKNFESLFRSREELDKECLQVEKGKNFYDFQFNTRLVKSTIAHFQLRNLVWATSKHDVYFMNNYSLMHWSSLLQRGKEVLNVAKPIVPSMKQHGSLSQSVSRVQISTMAVKDDLKLREGSKESLSKINEPEVAFCTKLTSADNDITNSVDIYNAPSGSLRVMTANNDCTVRLFDATNFALLNRFAFHWSVNNISTSPDGKLVAVLGDSPECLLADTGSGKVIHGLEGHLDYSFSSAWHPNGQILATGNQDTTCRLWDVRNLSQSLKVLKGNMGAIRALRFTSDGRFLAMAEPADFVHLFDTEAGYSQCQEIDLFGEIAGISFSPDTEALFVGVADRTYGSLLEFNRKRNHSYVDSIF

SEQ ID NO: 371 - protein, 229 aa, Arabidopsis thaliana
MDIFDNSDLEYLVDEFHADFDDDEPFGEVDVTSESDSDFMDSDFDFELSESKTNNETSALEARNGKDIQGIPWESLNYTRDRYRENRLLHYKNFESLFRSREELDKECLQVEKGKNFYDFQFNTRLVKSTIAHFQLRNLVWATSKHDVYFMNNYSLMHWSSLLQRGKEVLNVAKPIVPSMKQHGSLSQSVSRVQISTMAVKDDLKLREGSKESLSVRKSTNLRLLSALN

SEQ ID NO: 372 - protein, 584 aa, Arabidopsis thaliana
MCGILAVLGCSDDSQAKRVRVLELSRRLRHRGPDWSGLYQNGDNYLAHQRLAVIDPASGDQPLFNEDKTIVVTVNGEIYNHEELRKRLKNHKFRTGSDCEVIAHLYEEYGVDFVDMLDGIFSFVLLDTRDNSFMVARDAIGVTSLYIGWGLDGSVWISSEMKGLNDDCEHFETFPPGHFYSSKLGGFKQWYNPPWFNESVPSTPYEPLAIRRAFENAVIKRLMTDVPFGVLLSGGLDSSLVASITARHLAGTKAAKQWGPQLHSFCVGLEGSPDLKAGKEVAEYLGTVHHEFHFSVQDGIDAIEDVIYHVETYDVTTIRASTPMFLMSRKIKSLGVKMVLSGEGADEIFGGYLYFHKAPNKKEFHQETCRKIKALHKYDCLRANKSTSAFGLEARVPFLDKDFINTAMSLDPESKMIKPEEGRIEKWVLRRAFDDEERPYLPKHILYRQKEQFSDGVGYSWIDGLKDHAAQNVNDKMMSNAGHIFPHNTPNTKEAYYYRMIFERFFPQNSARLTVPGGATVACSTAKAVEWDASWSNNMDPSGRAAIGVHLSAYDGKNVALTIPPLKAIDNMPMMMGQGVVIQS

SEQ ID NO: 373 - protein, 456 aa, Arabidopsis thaliana
MCGILAVLGCSDDSQAKRVRVLELSRRLRHRGPDWSGLYQNGDNYLAHQRLAVIDPASGDQPLFNEDKTIVVTVNGEIYNHEELRKRLKNHKFRTGSDCEVIAHLYEEYGVDFVDMLDGIFSFVLLDTRDNSFMVARDAIGVTSLYIGWGLDGSVWISSEMKGLNDDCEHFETFPPGHFYSSKLGGFKQWYNPPWFNESVPSTPYEPLAIRRAFENAVIKRLMTDVPFGVLLSGGLDSSLVASITARHLAGTKAAKQWGPQLHSFCVGLEGSPDLKAGKEVAEYLGTVHHEFHFSVQDGIDAIEDVIYHVETYDVTTIRASTPMFLMSRKIKSLGVKMVLSGEGADEIFGGYLYFHKAPNKKEFHQETCRKIKALHKYDCLRANKSTSAFGLEARVPFLDKDFINTAMSLDPESKMVTTKLTSQTQYLPSQVNVEQIFYMGFSRSSQRKEGSRNGF

SEQ ID NO: 374 - protein, 512 aa, Arabidopsis thaliana
MCGILAVLGCSDDSQAKRVRVLELSRRLRHRGPDWSGLYQNGDNYLAHQRLAVIDPASGDQPLFNEDKTIVVTVNGEIYNHEELRKRLKNHKFRTGSDCEVIAHLYEEYGVDFVDMLDGIFSFVLLDTRDNSFMVARDAIGVTSLYIGWGLDGSVWISSEMKGLNDDCEHFETFPPGHFYSSKLGGFKQWYNPPWFNESVPSTPYEPLAIRRAFENAVIKRLMTDVPFGVLLSGGLDSSLVASITARHLAGTKAAKQWGPQLHSFCVGLEGSPDLKAGKEVAEYLGTVHHEFHFSVQDGIDAIEDVIYHVETYDVTTIRASTPMFLMSRKIKSLGVKMVLSGEGADEIFGGYLYFHKAPNKKEFHQETCRKIKALHKYDCLRANKSTSAFGLEARVPFLDKDFINTAMSLDPESKMIKPEEGRIEKWVLRRAFDDEERPYLPKHILYRQKEQFSDGVGYSWIDGLKDHAAQNVNDKMMSNAGHIFPHNTPNTKEAYYYRMIFERFFPQVRVL

SEQ ID NO: 375 - protein, 292 aa, Arabidopsis thaliana
MGVMINHHFLAFIFGILGNVISFLVFLAPVPTFYRIYKRKSTESFQSLPYQVSLFSCMLWLYYALIKKDAFLLITINSFGCVVETLYIAMFFAYATREKRISAMKLFIAMNVAFFSLILMVTHFVVKTPPLQVSVLGWICVAISVSVFAAPLMIVARVIKTKSVEYMPFTLSFFLTISAVMWFAYGLFLNDICIAIPNVVGFVLGLLQMVLYLVYRNSNEKPEKINSSEQQLKSIVVMSPLGVSEVHPVVTESVDPLSEAVHHEDLSKVTKVEEPSIENGKCYVEATRPETV

SEQ ID NO: 376 - protein, 581 aa, Arabidopsis thaliana
MEKVTNSDLKSSVDGGVVDVYGEDSATIEHNITPWSLSVSSGYSLLRDPRYNKGLAFTEKERDTHYLRGLLPPVVLDQKLQEKRLLNNIRQYQFPLQKYMALTELQERNERLFYKLLIDNVEELLPIVYTPTVGEACQKFGSIFRRPQGLFISLKDKGKILDVLKNWPERNIQVIVVTDGERILGLGDLGCQGMGIPVGKLALYSALGGVRPSACLPVTIDVGTNNEKLLNDEFYIGLRQKRATGQEYSELLNEFMSAVKQNYGEKVLIQFEDFANHNAFELLAKYSDTHLVFNDDIQGTASVVLAGLVSAQKLTNSPLAEHTFLFLGAGEAGTGIAELIALYMSKQMNASVEESRKKIWLVDSKGLIVNSRKDSLQDFKKPWAHEHEPVKDLLGAIKAIKPTVLIGSSGVGRSFTKEVIEAMSSINERPLIMALSNPTTQSECTAEEAYTWSKGRAIFASGSPFDPVEYEGKVFVSTQANNAYIFPGFGLGLVISGAIRVHDDMLLAAAEALAGQVSKENYEKGMIYPSFSSIRKISAQIAANVATKAYELGLAGRLPRPKDIVKCAESSMYSPTYRLYR

SEQ ID NO: 377 - protein, 144 aa, Arabidopsis thaliana
MTNVRLPILVSSVLFLVFISSSLLFPTPSFAARVSHSLVQEEVKKVPEYTEPEEPEVPEEPELPSPEEPEIPEEPEIPEEPEVPGEPEVPEEPEEPEEPEGSTFEFPSWFPSFPIPGVNGGLPKTEKTKPTSTVEEVNVSNKKP

SEQ ID NO: 378 - protein, 370 aa, Arabidopsis thaliana
MALMKKSLSAALLSSPLLIICLIALLADPFSVGARRLLEDPKPEIPKLPELPKFEVPKLPEFPKPELPKLPEFPKPELPKIPEIPKPELPKVPEIPKPEETKLPDIPKLELPKFPEIPKPELPKMPEIPKPELPKVPEIQKPELPKMPEIPKPELPKFPEIPKPDLPKFPENSKPEVPKLMETEKPEAPKVPEIPKPELPKLPEVPKLEAPKVPEIQKPELPKMPELPKMPEIQKPELPKLPEVPKLEAPKVPEIQKPELPKMPELPKMPEIQKPELPKMPEIQKPELPKVPEVPKPELPTVPEVPKSEAPKFPEIPKPELPKIPEVPKPELPKVPEITKPAVPEIPKPELPTMPQLPKLPEFPKVPGTP

SEQ ID NO: 379 - protein, 509 aa, Arabidopsis thaliana
MEISERVRARLAVLSGHLSEGKQDSPAIERWCTSADTSVAPLGSLKGTLTIVDERTGKNYKVPVSDDGTVKAVDFKKIVTGKEDKGLKLYDPGYLNTAPVRSSISYIDGDEGILRYRGYPIEEMAENSTFLEVAYLLMYGNLPSESQLSDWEFAVSQHSAVPQGVLDIIQSMPHDAHPMGVLVSAMSALSIFHPDANPALRGQDIYDSKQVRDKQIIRIIGKAPTIAAAAYLRMAGRPPVLPSGNLPYADNFLYMLDSLGNRSYKPNPRLARVLDILFILHAEHEMNCSTAAARHLASSGVDVYTAVAGAVGALYGPLHGGANEAVLKMLSEIGTVENIPEFIEGVKNRKRKMSGFGHRVYKNYDPRAKVIKNLADEVFSIVGKDPLIEVAVALEKAALSDDYFVKRKLYPNVDFYSGLIYRAMGFPPEFFTVLFAIPRMAGYLSHWKESLDDPDTKIMRPQQVYTGVWLRHYTPVRERIVTDDSKESDKLGQVATSNASRRRLAGSSV

SEQ ID NO: 380 - protein, 435 aa, Arabidopsis thaliana
MTPQIKTHLLPKQEPSSSENHGSSTSGIVFNVSTSIIGAGIMSMPAAFKVLGIVPAFLIITIIAWLSTISVGFLMKSTLAGESTTYAGVMKESFGKTGSIAVQIATMVATFGCMIIFSIIIGDVLSGNENGGPEHIGVLQEWFGSYWWNTRIFALLFVYGFVLLPLVLRRRVERLAISSAVSFLLAVLFVVISSVLAISALVNGQTKNPRLFPELSNGGSFWQLFTASPVIVTAFTFHFNVHPIGFELKDPLQVIPATKISVILCAAIYFATGLFGYLLFGDATMSDILVNFDQSSGSSIGSLLNDIVRLSYVLHLMLVFPLLNFSLRANLDELLYPKKPSLEKDTKRFIGLTLALLICCFLSAIAVPDIWYFFQFMGSTITVSIAFIFPAAIVLRNIHGVSTSREKIVAAIMLVLAVATSIIAISTNLYSLAAN

SEQ ID NO: 381 - protein, 242 aa, Arabidopsis thaliana
MRKSFKDSLKALEADIQFANTLASEYPEEYDGGYVQMRLSYSPAAHLFLFLLQWTDCHFAGALGLLRILIYKAYVDGKTTMSLHERKTSIREFYDVLFPSLLQLHGGITDVEERKQKEICDKRYRKKDRTDKGKMSEIDLEREEECGICLEIRNKVVLPTCNHSMCINCYRNWRARSQSCPFCRGSLKRVNSGDLWIYTCSAEIADLPAIYKENLKRLLIYIDKLPLVTSDPNLVPYAPLPR

SEQ ID NO: 382 - protein, 172 aa, Arabidopsis thaliana
MRKSFKDSLKALEADIQFANTLASEYPEEYDGGYVQMRLSYSPAAHLFLFLLQWTDCHFAGALGLLRILIYKAYVDGKTTMSLHERKTSIREFYDVLFPSLLQLHGGITDVEERKQKEICDKRYRKKDRTDKGKMSEIDLEREEECGICLEIRNKVVLPTCNHSMCINCYRN

SEQ ID NO: 383 - protein, 121 aa, Arabidopsis thaliana
MINAFKTIRSLPSNTTVSFCSTPSRLGRKVTGVSFATTSDQQKMDKKPENPNEKTGDVMSHSYGEGYATRSDEEGFGGIYGGNQTLQKENEIHENHPDYDKTQGSESKEKEKARNQTQSHC

SEQ ID NO: 384 - protein, 115 aa, Arabidopsis thaliana
MAFALRFFTCLVLTVCIVASVDAAISCGTVAGSLAPCATYLSKGGLVPPSCCAGVKTLNSMAKTTPDRQQACRCIQSTAKSISGLNPSLASGLPGKCGVSIPYPISMSTNCNNIK

SEQ ID NO: 385 - protein, 258 aa, Arabidopsis thaliana
MTEGGEYSPAMMSAEPFLTMKKMKKSNHNKNNQRRFSDEQIKSLEMMFESETRLEPRKKVQLARELGLQPRQVAIWFQNKRARWKSKQLETEYNILRQNYDNLASQFESLKKEKQALVSELQRLKEATQKKTQEEERQCSGDQAVVALSSTHHESENEENRRRKPEEVRPEMEMKDDKGHHGVMCDHHDYEDDDNGYSNNIKREYFGGFEEEPDHLMNIVEPADSCLTSSDDWRGFKSDTTTLLDQSSNNYPWRDFWS

SEQ ID NO: 386 - protein, 236 aa, Arabidopsis thaliana
MAGEAEALATTAPLAPVTSQRKVRNDLEETLPKPYMARALAAPDTEHPNGTEGHDSKGMSVMQQHVAFFDQNDDGIVYPWETYKGFRDLGFNPISSIFWTLLINLAFSYVTLPSWVPSPLLPVYIDNIHKAKHGSDSSTYDTEGRYVPVNLENIFSKYALTVKDKLSFKEVWNVTEGNRMAIDPFGWLSNKVEWILLYILAKDEDGFLSKEAVRGCFDGSLFEQIAKERANSRKQD

SEQ ID NO: 387 - protein, 263 aa, Triticum aestivum
  misc_feature (84)..(84): Xaa can be any naturally occurring amino acid
MPESDNDSGGPSNTGGEGELSSPREQDRFLPIANVSRIMKKALPANAKISKDAKETVQECVSEFISFITGEASDKCHPRRPPTXRPRVRLWAMTTLGFEDYVDPLKHYLHKFREIEGERAAATSTSTSTTPDMPRNNNNNARRLPRRPGRHDDDGAAHVPARRRRHHKQQQHQHQNCNGEGRSGLSLSRRRRRVVVILGSDRKKWTPFPFSFLFFLEDKGRGFSTFCSFSLGEDPPCSLIIPFSPRGGEYFVLSPRCWKTFFF

SEQ ID NO: 388 - protein, 480 aa, Brucella suis 1330
MQTRYPDVKLFIDGTWRDGSRGETIEIFNPATDEVIGHIARATTADLDDALAAVDRGFEAWSKVSAFDRYKIMRRAADIFRSRGEEVARLLTMEQGKPLAEARIEAAAACDLIDWFAEEARRSYGRIVPPRQAYVMQAEVKEPVGPVAAFTPWNFPINQAVRKISAALAAGCSILLKAAEDTPAAPAELVRAFAEAGLPDGAINLVYGDPAEISAYLIPHPVIRKVSFTGSTQVGKQLAALAGLHMKRVTMELGGHAPVIIAADADVEQAIKVVSGSKFRNAGQVCISPTRFLIENSVYDQVVEGMAAYATSLKVGDGLEAGTTMGPLVNAKRVNAMERLVQDAREHKARVVTGGERIGNRGNFFEPTILADVPRDATIMNEEPFGPVALLNRFDALDEALSEANRLNYGLAAYAFTGSSAKAARISSTVRSGMITINHYGLALPEVPFGGINDSGYGTEGGADALEAYQNTKFVSFLQA

SEQ ID NO: 389 - protein, 503 aa, Mesorhizobium sp. BNC1
MSVLNENIARAVEYLKPFREGGVLNHVGGAQVPAASGETFETVSPVDMSTLAKVARGGAADTDKAVAAASEAFKTWSKTSGAERRKILIKVAEGIEARAEEIAFIECMDTGQALRFMSKAAIRGAENFRFFADQAPGSEDGRALRTPAQMNVTSRRPIGPVGVITPWNTPFMLSTWKIAPALAAGCTVVHKPAEFSPLTANLLVQIAEEAGLPKGVLNVVNGYGEEAGRALTEHKGIKAIAFVGESRTGSMIMKQGADTLKRVHFELGGKNPVIVFDDADLDRAVDAAAFMIYSLNGERCTSSSRLLVQESIYEEFTRRVAEVARGIKIRHPLDPETVIGPLIHPSHEKKVLSYFEKAKEEGAIIATGGEKYGEAGCFVRPTLFTNARNDMAIAQEEIFGPVLTAIPFKDEDEALAIANDVNYGLAAYLWTRDLGRAMRMTDNLEAGMIWVNSENVRHLPTPFGGVKASGIGRDGGDWSFDFYMETVNVSFPRREHKVSKLGG

SEQ ID NO: 390 - protein, 131 aa, Zea mays
  misc_feature (29)..(29): Xaa can be any naturally occurring amino acid
MLLSHFQQIRTFIQMRTNLKVVDNSGAKXVMCIQSLRGKKGARLGDMIIGSVKEAQPRGKVKKEDVVYGVVVRAAMKKGRSDGSEVQFDDNEVVLVNKKGELIGTRVFGPVPHELRKKKHLKILALAEHIV

SEQ ID NO: 391 - protein, 147 aa, Zea mays
LQVKGEDMDAYAPKDLLVVTTGSQGEPRAALNLASYGGSHTLKLSKEDVLLYSAKVIPGNETRVMKMMNRLTDLGPKIIMGKDSGLHTSGHAYREELVLRIVKPQHFLPVHGELLFLKEHESLGRSTGIRHTTVSNLSNLVLWICMP

SEQ ID NO: 392 - protein, 217 aa, Methylococcus capsulatus str. Bath
MATAASRKSVMTLFCSPTCVYSHRTRIVLHEKGISADVEYVDMGDPPEDLVELNPYGTMPTLVDRDLVLYDSRIIMEYLDERFPHPPLHPMDPVSRARARLLVHRVEQDWYGLVEEIENASDGGAQKARKQLRESLLAATPVFAAKPYFLSDEFCLVDCSLAPLLWRLPMLGIELPRQAEPVKAYAARLFERHSFQASLSDEEREFGAAARLTPENA

SEQ ID NO: 393 - protein, 294 aa, Triticum aestivum
  misc_feature (242)..(242): Xaa can be any naturally occurring amino acid
GGAAFADVPGGALWEEVLHWAVSNHGLAPASWTDYLRLTVGGTLSNGGVSGQSFRYGPQVSNVAELEVVTGEGECRVCSPSAHADLFFAVLGGLGQFGVITRARIPLSPAPQTVKWARVVYASFAEYAADAEWLVTRPAESAFDYVEGFAFVRSDDPVNGWPSVPIPAGARFDPSLLPAGEPGPLLYCLEVALYQHQHKQPDDVDARMGEMMRRLKYVRGLEYAADVRYVEFLSRVNRVEEXARRSGSWAAPHPWLNLFVSARDIADFDRAVLKGMLADGVDGPMLIYPMLKSK

SEQ ID NO: 394 - protein, 184 aa, Triticum aestivum
  misc_feature (3)..(3): Xaa can be any naturally occurring amino acid
  misc_feature (23)..(24): Xaa can be any naturally occurring amino acid
  misc_feature (41)..(42): Xaa can be any naturally occurring amino acid
  misc_feature (46)..(46): Xaa can be any naturally occurring amino acid
  misc_feature (52)..(52): Xaa can be any naturally occurring amino acid
  misc_feature (60)..(60): Xaa can be any naturally occurring amino acid
  misc_feature (69)..(69): Xaa can be any naturally occurring amino acid
  misc_feature (83)..(84): Xaa can be any naturally occurring amino acid
  misc_feature (87)..(87): Xaa can be any naturally occurring amino acid
  misc_feature (114)..(114): Xaa can be any naturally occurring amino acid
  misc_feature (116)..(116): Xaa can be any naturally occurring amino acid
  misc_feature (128)..(128): Xaa can be any naturally occurring amino acid
  misc_feature (130)..(130): Xaa can be any naturally occurring amino acid
  misc_feature (135)..(135): Xaa can be any naturally occurring amino acid
  misc_feature (141)..(141): Xaa can be any naturally occurring amino acid
  misc_feature (147)..(147): Xaa can be any naturally occurring amino acid
  misc_feature (156)..(156): Xaa can be any naturally occurring amino acid
ISXFPSGVTVKTEDDKVYRADYXXVSASLGVLQTDLIRFKXXLPSXKIVSIXQFDMAVYXKVFLKFPKXFWPEGECNEFFLYXXGRXGYFPVWQQFEHQYPGSNVLLVTVTDDXSXRIEQQSDNQTMXDXVAVLXKISQGXLLTQRXLCQWWSTGXGLNHRVNATIYSSGGGYSRAQHIKVFTG

SEQ ID NO: 395 - protein, 476 aa, Oryza sativa (japonica cultivar-group)
MAMETTSQDSQVIMGRYKLGRLLGRGTFAKVYKAYKLATGEAVAIKVFDKEAVQRSGTVEQVKREVDVMRRVHHRHVIRLHEVMATRSRIYFVMEYASGGELFTRLSRSPRFPEPVARRYFQQLITAVEFCHSRGVYHRDLKPENLLLDARGDLKVTDFGLSALDGGLRGDGLLHTTCGTPAYVAPEVLLKRGYDGAKADIWSCGVILFVLLAGYLPFNETNLVILYRNITESNYRCPPWFSVEARKLLARLLDPNPKTRITISKIMDRPWFQQATCPLGDMSLVASAPSVLLARKEASQQHDDEEDDGFAREKKKRSNVIMSSPVIDVRPSSMNAFDIISRSRGLDLSKMFDAEERRSEARFSTRETTTAIVSKLEEIAEAGRFSFKLKEKGRVELEGSQDGRKGALAIEAEIFKVAPEVHVVEVRKTGGDSPDFRDFYKQELKPSLGDMVWAWQGGDSPPLVPAAGRRPITKRS

SEQ ID NO: 396 - protein, 483 aa, Agrobacterium tumefaciens str. C58
MKVVPMHTYPDIKLLIDGEWRDAVSGKTIAVSDPATDEIIGAIAHAEKEDLDLALAAAERGFKLWRDTSPYERSKIMRKAADILRERKDKIAYIMTREQGKPLAQSATEIMGAADTIDWFAEEARRTYGQVIPARATGVSQLAIKVPVGPVAAFTPWNFPLNQIVRKLSAALATGCSIIVKAPEETPASPAELIRAFVDAGVPAGVIGLVYGVPSEISEYLIPHPVIRKISFTGSTPIGKHLAALAGKHMKRATMELGGHAPVMIFDDADIEKAIEVTSLAKFRNAGQVCVAPTRFLVQDGVADRFLEGFVEATKAIKVGNGLEEGVIMGPLANERRIPALEGLINDAVSHGAELKTGGRRIGNKGNFFEPTVLANVPVTAKIMNDEPFGPVAIINRFSSFDDAITEANRLPFGLASYAFTGSVKTAHALGQQVEAGMLTINHNGLALPEVPFGGIKDSGYGTEGGSEAVQAYLETKFVSQMS

SEQ ID NO: 397 - protein, 535 aa, Brassica napus
  misc_feature (279)..(279): Xaa can be any naturally occurring amino acid
  misc_feature (361)..(361): Xaa can be any naturally occurring amino acid
  misc_feature (373)..(373): Xaa can be any naturally occurring amino acid
MAFAISTRNAVAFLVTLLLVSVTPSSSTLQQDFIHCLVDNTDMSFPIRASFFSPDQNATLFKEELESTAQNLRYLTPSNPKPVFIFEPLYETHVQAAVVCAKMLKLHMRLRSGGHDYEGLSFVAENVTPFVVVDLSKLRQIDVDLDSNSAWAHAGATVGEVYYRIQEKSQTHGFPAGLCSSLGIGGHLVGGAYGSMMRKFGLGADNVLDARIIDANGKILDRAAMGEDVFWAIRGAGGGSFGVILAWKIKLVPVPATVTVFTVTKTLEQDGTRVLYKWXQVADKLDEDLFIRVIIQPAGKTSKTGNRTVSTAYQGQFLGDSNRLMQVMQTSFPELGLTKKDCIEMSWIKSVMYIAWISQNXCPTQKPLLAGKXSLFKNHFKAKSDFVEEPFPVEGLEGLWKKLLNEDSPLTIWNPYGGMMSRISESETPFPHRKGTLFKIQWLSTWSDGKASEARHIEWMRDMYSYMEQYVSKKPRRAYVNYRDLDLGVNEGESDAREWGAKYFKGNFEKLVKIKGEFDPENFFRHEQSIPTKIG

SEQ ID NO: 398 - protein, 229 aa, Cucumis melo
MSSSKEQSPSPETESSSSSSSDSNKKPKRINSNSSSNSKHAVYRGVRMRNWGKWVSEIREPRKKSRIWLGTFPSPEMAARAHDVAALSIKGNSAILNFPDLVHLLPRPVSLAPRDVQAAAAKAAHMHNLSSNANTNNHNTNSNSSSAFSDELSEIVELPALGTSYDGGVGVGGEFVFVESELESAAWLYQPPWVQSLQEDYDDIDGDGDCGKLGMGFVSNGFKGFLFDY

SEQ ID NO: 399 - protein, 175 aa, Triticum aestivum
  misc_feature (71)..(71): Xaa can be any naturally occurring amino acid
MAPAVMASSATTVAPFQGLKSTAGLPVSRRSSGSLGSVSNGGRIRCMQVWPIEGIKKFETLSYLPPLSTEXALLKQVDYLIRSKWVPCLEFSKVGFVFREHNSSPGYYDGRYWTMWKLPMFGCTDATQVLNEVEEVKKEYPDAYVRVIGFDNLRQVQCVSFIAFRPPGCEESGKA

SEQ ID NO: 400 - protein, 389 aa, Salmonella enterica subsp. enterica serovar Typhi Ty2
MTDTTILQNNTHVIKPKKSVALSGVPAGNTALCTVGKSGNDLHYRGYDILDLAEHCEFEEVAHLLIHGKLPTRDELNAYKSKLKALRGLPANVRTVLEALPAASHPMDVMRTGVSALGCTLPEKEGHTVSGARDIADKLLASLSSILLYWYHYSHNGERIQPETDDDSIGGHFLHLLHGEKPTQSWEKAMHISLVLYAEHEFNASTFTSRVIAGTGSDVYSAIIGAIGALRGPKHGGANEVSLEIQQRYETPDEAEADIRKRVENKEVVIGFGHPVYTIADPRHQVIKRVAKQLSEEGGSLKMYHIADRLETVMWETKKMFPNLDWFSAVSYNMMGVPTEMFTPLFVIARVTGWAAHIIEQRQDNKIIRPSANYTGPEDRVFVPIEKRC

SEQ ID NO: 401 - protein, 220 aa, Triticum aestivum
  misc_feature (112)..(112): Xaa can be any naturally occurring amino acid
DAWATLPPPPPPPPPPKLPTTRSAPEFRARPISRRSHPADAAPLGRTGNLAMAAGSFATSVHDFTVKDSSGKDVDLSVYKGKVLLIVNVASQCGLTNSNYTGLSQLYPKYKXTKGFEILAFPCNQFGGQEPGTNDEIVQFACTRFKAEYPIFDKVDVNGNNVSPLYKFLKSSKGGLFGDSIKWNFSKFLVDKEGHVVDRYAPTTSPLSIEKDIKKLLGSS

SEQ ID NO: 402 - protein, 253 aa, Oryza sativa (indica cultivar-group)
MPERSELGRQLPLRGPLKALEADIHHANTMANAIQRNYGGACVQMRLSCSSLAPFFLYLIQWLDCGCCYALPSYLGLFHILICKVYADGDSSVSTYERRASLREFMRSSYPILQQLEGSLIERDLKGKGRCKDIVSRKRLEDWRKLCNKDVEREDECGICMETCTKMVLPNCSHAMCIKCYRDWYRRSESCPFCRGSLKRIRSRDLWVLTNYNDVVDPVTLERENVRHFYSYIDSLPLILPDNIFFFYYDYLL

SEQ ID NO: 403 - protein, 170 aa, Zea mays
  misc_feature (65)..(65): Xaa can be any naturally occurring amino acid
MAAASSATSVHDFTVKDSSGKDVDLSVYRGKVLLIVNVASQCGLTNSNYTQQAQLYEKYKNQGLXFEILAFPCNQFGGQEPGTNEEIAQFACTRFKADYPIFDKVDVNGNNAAPIYKFLKSSKGGLFGDSIKWNFSKFLVDKEGRVVDRYAPTTSPLSIEKDIKKLLGSS

SEQ ID NO: 404 - protein, 429 aa, Streptomyces coelicolor A3(2)
MSDNSVVLRYGDGEYTYPVIDSTVGDKGFDIGKLRAQTGLVTLDSGYGNTAAYKSAITYLDGEAGILRYRGYPIEQLAERSSFVEVAYLLINGELPTVDELSAFKGEITQHTLLHEDVKNFYKGFPRDAHPMAMLSSVVSALSTFYQDSHNPFDERQRNLSTIRLLAKLPTIAAYAYKKSIGHPFVYPANNLGYVENFLRMTFSVPAQEYELDPTVVAALDKLLILHADHEQNCSTSTVRLVGSSQANMFASISAGINALWGPLHGGANQSVLEMLEGIRDAGGDVDSFIRKVKNKEDGVRLMGFGHRVYKNFDPRAKIIKAAAHDVLSALGKSDELLDIALKLEEHALSDDYFVSRSLYPNVDFYTGLIYRAMGFPTEMFTVLFALGRLPGWIAQWHEMIKEPGSRIGRPRQIYTGVVERDFVPVEER

SEQ ID NO: 405 - protein, 338 aa, Arabidopsis thaliana
  misc_feature (256)..(256): Xaa can be any naturally occurring amino acid
MVFKAAIELGVIDTLYLAARDDVTGSSSFLTPSDIAIRLPTKPSNPEAPALLDRILRLLASYSMVKCQIIDGNRVYKAEPICRYFLKDNVDEELGTLASQLIVTLDTVFLNTWGELKNVVLEGGVAFGRANGGLKLFDYISKDERLSKLFNRTGFSVAVLKKILQVYSGFEGVNVLVDVGGGVGDTLGFVTSKYPNIKGINFDLTCALTQAPSYPNVEHVAGDMFVDVPKGDAILLKRILHDWTDEDCEKILKNCXKALPENGKVIVMEVVTPDEADNRDVISNIAFDMDLLMLTQLSGGKERSRAEYVAMAANSGFPRCNFVCSAYHLWVIELTKQA

SEQ ID NO: 406 - protein, 1274 aa, Aspergillus nidulans FGSC A4
MTEVPFVAMRAPGSYSSQTETIRQYIPSSVVVNSSCPPAKQLQQPDRVQPQQCTTNSWSVHNDGFGPRPQVSNAKSYGVDAGNQGINYMSYDLVKETNGSTPNDSTSTPVLSASSNGKSTTPSSVNLASSSTSVSSTKADDTPGPVFFRPRSSIPTRLPTAVYAQQCVAAAYASRLNPYALHPKEQEALQDHLCHLHVTVYLNIRNGILRLWTRNPMVSVSKEEALGCAKDYRWMNLASFAYEWLIRNGYINFGCLEIPEGLVPSKKGRRKEGPVIVIIGAGMAGLGCARQLEGFFKHFRDNLNSPRVVVLEGRRRIGGRIYSHPLQSRQSSTLPPGLTPKVEMGAQIVVGFDRGNPLDQIIRGQLALSYHLLRDISTIYDIDGTPVDEVRDATAERLYNDVLDRSGDYRYKSVVAPTAEGERDLIDLGRDITTSDGVTVRQYEEARQAGTVGLLFPAKRIRRGVGHKTAELKPATGPVVDTDEAEENPAVVACEAMGWKLNPGISVSQRINLDPIAKASKFQTLGKTMDEGVRQYQRMLPLTPKDLRLLNWHFANLEYANATNINNLSLSGWDQDMGNEFEGEHSQIIGGYQRVPYGLWSYPTKLDVRTNKTVSRITYDASGSNRHRTVVHCEDGESITADMVVYTGSLGTLQHRTVQFSPPLPDWKVGAIDRLGFGVMNKVILAFDQPFWDTERDMFGLLREPTNRDSMAQEDYASNRGRFYLFWNCMKTTGLPVLIALMAGDAAHQAERTPDAEIVAEVMSQLRNVFKQVAVPDPLETIITRWASDKFTRGTYSYVAAEALPGDYDLMAKSVGNLYFAGEATCGTHPATVHGAYISGLRAASEIIDSILGPIPIPTPLVPEKGKNTNSGNTNGMPSNTPHIPLDTDTNTPEVPPQQPQLPTSTSTVTSSFEPLSRAAYDQAMNAAVYTEIGPPIPRPGRPGINPFILYQKDFMAKARADCDAEYQAITKDPNAKAPRDTVRAALGLMWRQAPEEVKRPYLEQAEVNRQTGAEIAAKWKRDNVEWERRKEAAKKRWQQDNPFEWWVATEFGEPPRKKLDSTNKELGAAYSPAAAPTPPFGPSTSSGLAGISTPSAASPYPSGTSAGLAGSSTLFTNGYDANASTPAATPSHPPPSVPPPGLSEATAGNTESCSSSASYSAPAGPSTVPLFGPLPGSAKMSKPNVNGYSANESTPAAAAVASQSLQPPQPPGSPSGLYGGSTQDTNGSTNLNANPNPGQTQNPNVANGPRPGMGWSWFNNNSATAYSFLLNQR

SEQ ID NO: 407 - protein, 107 aa, Nicotiana tabacum
LGVDYDGTKSCDSDCSVGYGLQEYASTVVQAVRFVCDRKNVKNPVICSESGRAIVSHHSVLIFEAVSSTTTRSQELSSVDLQSFVEKLNDDARADYRNLSAAAIRGE

SEQ ID NO: 408 - protein, 488 aa, Acinetobacter sp. ADP1
MVKELYIAGEWRLGRGKVIQSTFPADNSVNAEISTASFEDIEEAIVKADQAWRAPEWRNRLPHERAKILYKVADIIEARVDALAALQTRDNGKPLAETRGLVFSAAATARYVAAACETMNDELTSQRAPDFMTFSVHEPVGVVAAITPWNSPIASEVQKLAPALAGGNAVILKPAEATSLIALELAKIFEEAGLPKGLLSVLVGKGSVVGDAIVKHPLVRKISFTGGTTTGRHLAHIAADKLITTSLELGGKSPTIVLPDADIELAAKGIAYGIFSSAGQACIAGSRLFIHSSIYDQFLARLVEITKSLRVGHPEQKDVHMGSLINAAHLASVDRYVQLAKQEGGEILTGGQAMTEGEFAKGSFYLPTIITGLKNQAQVCQEEIFGPVLVVMKYEHEDDLIEQANDSCFGLAAGIWTESYRKAWRIARVLEVGTVWINTYKKFSISAPFGGFKDSGIGREKGRQGILSYMQQKSIYMGLNEQPNPWAD

SEQ ID NO: 409 - protein, 316 aa, Triticum aestivum
MDPALLDNIIARLLEVKSLKPGKNAQLSESEIKQLCAASKEIFLAQPNLLELEAPIKICGDVHGQYSDLLRLFEYGGYPPQSNYLFLGDYVDRGKQSLETICLLLAYKVKYPENFFLLRGNHECASVNRIYGFYDECKRRFSVKLWKTFTDCFNCLPVSALIDEKILCMHGGLSPELNKLDQILNLNRPTDVPDTGLLCDLLWSDPSNEAQGWAMNDRGVSYTFGPDKVAEFLEKHDLDLICRAHQVVEDGYEFFADRQLVTIFSAPNYCGEFDNAGAMMSVDETLMCSFQILKPARKMLPGSTNNKSGFKSMRGW

SEQ ID NO: 410 - protein, 149 aa, Glycine max
  misc_feature (45)..(45): Xaa can be any naturally occurring amino acid
MSGRVSGKVKWFNDQKGFGFISPDDGSDDLFVHQSQIKSDGFRSXLAEGESVEFAIESESDGRAKAVDVTGPDGASVQGTRRGGDGGRSYGGGRGGGGGGYGGGGGYGGGGGYGGGGGYGGGGRGGGGGSCYSCGESGHFARDCPSSAR

SEQ ID NO: 411 - protein, 169 aa, Triticum aestivum
  misc_feature (164)..(164): Xaa can be any naturally occurring amino acid
MPNSPLEKTHETQRDPSFTQARTQMVVMNKAREMTLIAALFVLSCLLKTTTSPATSAYSGAWRPASSLLHELCHLGVRPLIRDDAEATALASADFGNVSDAQPAAAAVLYPSCPEDIASLLRASCMHPSPFPVSARGCGHSTRGQASAPRGVVVDMLSLGCQVXGSATR

SEQ ID NO: 412 - protein, 444 aa, Glycine max
  misc_feature (137)..(137): Xaa can be any naturally occurring amino acid
MVILNLGRKEEQGVRLGKYELGKTLGEGNFGKVKLARDTHSGKLFAVKILDKSKIIDLNNIDQIKREISTLKLLKHPNVVRLYEVLASKTKIYMVLEYVNGGELFDKIASKGKLKEAEGRKIFQQLIDCVSFCPIKXCLHRDLKLENVLVDNKGNIKITDFGLSALPQHLREDGLLHTTCGSPNYVAPEVLANKGYDGATSDTWSCGVILYVILTGHLPFDDRNLVVLYQKIFKGDVQIPKWLTPGARNMIRRILDPNPETRITMAGIKEDPWFKKGYIPVNPEDEDVYVDQEAFSIHEQPNEAEQRNSGSPSLINAFQLIGMSSCLDLSGFFEKEDVSERKIRFASNLSVKDLIERIEDTATEMEFRVEKKNGKLKVIRENKVHKTLGCLSVVVEVFGISSSLYVVELRKSYGDGSVYKQLCNKLLNDLGIPPKQPLVRSAAN

SEQ ID NO: 413 - protein, 77 aa, Glycine max
MGLWTLLEGFLLLANALAILNEDRFLAPRGWGFQDFSGGRTKSFKGQLIGLIYATQYLRVPLILLNSICIFLKLVSG

SEQ ID NO: 414 - protein, 161 aa, Zea mays
  misc_feature (13)..(13): Xaa can be any naturally occurring amino acid
  misc_feature (16)..(16): Xaa can be any naturally occurring amino acid
  misc_feature (30)..(30): Xaa can be any naturally occurring amino acid
  misc_feature (34)..(34): Xaa can be any naturally occurring amino acid
  misc_feature (36)..(36): Xaa can be any naturally occurring amino acid
  misc_feature (40)..(40): Xaa can be any naturally occurring amino acid
  misc_feature (65)..(65): Xaa can be any naturally occurring amino acid
  misc_feature (80)..(80): Xaa can be any naturally occurring amino acid
  misc_feature (92)..(92): Xaa can be any naturally occurring amino acid
  misc_feature (95)..(95): Xaa can be any naturally occurring amino acid
  misc_feature (104)..(104): Xaa can be any naturally occurring amino acid
  misc_feature (109)..(109): Xaa can be any naturally occurring amino acid
  misc_feature (116)..(116): Xaa can be any naturally occurring amino acid
  misc_feature (128)..(128): Xaa can be any naturally occurring amino acid
QKIYYLTGAKGTXDRXAAGEKAENATTAQXEGHXTXQEGXDAGEEANNQNETKDATTNRARTPTXEKTRKTKARGGKRRXPGEGPQEKTGGXPQXHKAPNKKEXQEETXRKKKAQXPQDGTRANKATXAWGGEAGDPIHDKRCNSGTTDMDPERNMRKRGR

SEQ ID NO: 415 - protein, 456 aa, Oceanobacillus iheyensis HTE831
MLKKSFLIFTALLLLATPVYAATPTPESLELSVNLIWVMLGAFLVFFMHAGFAMVESGFTRSKNTLNILMKNFLTISVASILFFLVGYGIMFGSSAGSIIGSDGFLLSEISEIDFFVFQAMFVATCATIISGAVAERIKLGSYILIVAAMTTIIYPVVGHWVWQGDGWLTSLGFSDFAGSTVVHLTGAVGAFVVVLILGPRIGKYKGKKVNVIQGHNLPLGALGVFILWLGWFGFNGGSTLAADPSLVPYVIGTTLLSTSAALVSSSLYTKLRFKKVDASLSMNGVLGGLVGITAGAAEISLGGSIIVGLISGVVLVEGIRFLDTKLRIDDPVGAIAVHGICGIWGTLAIGLFSVNTGLFYGNGISQLGIQAIGVLAVVAWVAITAGGFTYVINKISQIRVSEEEEISGLDFAEHGSSAYNFKESLLEGTDNNSSSGLAERLNNNIPIGKTSNQSS

SEQ ID NO: 416 - protein, 497 aa, Corynebacterium glutamicum ATCC 13032
MNAATRRASLQLPYTHVDDFYINGSWVKAEGTQRNPVVDPAVGQEWGSVPEATASELDSAVGAARTALKSWSALTGAERTGYLLKIATEIESRSEALALTNTRENGSPISETRGAASNAAGIFRYFATLAPWLDGEDIRPFPAGSAESIVDKDPIGVCALIAPWNFPINLVVIKLAPALLAGCTVIIKPASPTPLSIRFIIEAIEAAGVPAGVVNLLTGSGRFGDALVRHPGVDKVAFTGSTPVGKKIAAACGELLRPVTLELGGKSSAIILPDADMSVLSTRLIRSCMRNTGQTCYISTRIIAPSSRYAEVVQTVASTIAAGRQGDPYDEETVFGPVASASQYSTVMSYIDSAREEGARVVAGGTRSISLSEGLESGEFIQPTVFADVTPDMRISREEIFGPVISILKYDDTNGVSEAIALANNTKFGLGGLVFGADEEQALEVARQVDSGSVGINFFGSNHSAPFGGRHESGMGVEYGIEGLSAYLTYKSIHRTI

SEQ ID NO: 417 - protein, 305 aa, Zea mays
MRFGMNLGGETSKRKQNRTNEPASAHANQEKRWVLSDFEVGKPLGRGKFGHVYLAREKRSSEIVALKVLFKSQLKQSQVEHQLRREVEIQSHLRHPNILRLYGYFYDQTRVYLILEYAAKGELYKELTRCKHFSERRTATYVASLARALIYLHGKHVIHRDIKPENLLVGVQGEIKIADFGWSVHTFNRRRTMCGTLDYLPPEMVEKAEHDYHVDIWSLGVLCYEFLYGVPPFEAKEHSETYRRIVKVDLKFPLKPFVSPAAKDLISQMLVKSSAQRLPLHKVLEHPWIVQNADPSGVYREGRSI

SEQ ID NO: 418 - protein, 112 aa, Bartonella sp. sh8784ga
ANEACLKMLQEIGSVKRIPEFIARAKDKNDPFRLMGFGHRVYKNYDPRAKIMQKTCHEVLKELNIQDDPLLDIAIELEKIALNDEYFAEKKLYPNVDFYSGITLKALGFPTE

SEQ ID NO: 419 - protein, 112 aa, Bartonella sp. pn15646ga
ANEACLKMLQEIGSIKKIPEFIARAKDKNDPFRLMGFGHRVYKNYDPRAKIMQKTCHEVLKELNIQDDPLLDIAIELEKIALSDEYFIEKKLYPNVDFYSGITLKALGFPTE

SEQ ID NO: 420 - protein, 180 aa, Capsicum annuum
MASSVMSTATVATGANAAQASMIASFNGLKSAASFPVTRKQDLDITSIASNGGRVQCMLVWPPINKKKYETLSYLPDLSDEQLLKEIEYLLQKGWVPCLEFETEHGFVYREHHRSPGYYDGRYWTMWKLPMFGCTDATQVLNEVQEAKKAYPQAWIRIIGFDNVRQVQCISFIAYKPEGY

SEQ ID NO: 421 - protein, 438 aa, Magnetospirillum magnetotacticum MS-1
MTNENKTPKESVTLINNSTGKTTEFPLLAGSIGPKVADIRSLYASQDIFTYDPGYMSTGSCKSAITYIDGDAGVLLHRGFAIADLAENCSFLEVAYLILKGELPNAEQKTKFEFDIAHHSMVHEQINFFFRGFRRDSHPMAVLCGVVGAMAAFYHDSIDINDPHHRMVASYRLVAKMPTIVAWAYKYAQGQPFMFPQNKLSYSENFLHMMYATPCEEYKVSPVLARAMDRILILHADHEQNASTSTVRLAGSSGANPFACIAAGIASLWGPAHGGANEAVLQMLHEIGSVERIPEFIKKAKDKDDPFRLMGFGHRVYKNYDPRAKIMQKTCHEVLSELGVHDEPLLKLAMELERIALEDPYFVERKLFPNVDFYSGIIFRAMGIPTQVFTCLFALARTVGWIAQWNEMLTDPDQKIGRPRQLYVGPAQRDFVPLHKRG

SEQ ID NO: 422 - protein, 363 aa, Buchnera aphidicola
MKKKYRIAVLPGDGIGPEVMREAYKILNILKNHFSLPLETREFNIGGSAIDQEGTALPKKTLLGCENSDAILFGSVGGKKWDDLPINQRPERASLLPLRKHFNLFANLRPAKLYSELKYLSPLRSDIIKNGFDILCIRELTGGLYFGKPTGRLKKNNIEYAFDTEIYYNYEITRIAHLAFQLAQTRNFKICSIDKSNVLNSSVLWREIVKKVSKNYPDVHLSHLYIDNATMQIIKDPNQFDILLCSNLFGDIISDECAIITGSIGMLPSASLNEKKFGLYEPAGGSAPDIEGKNIANPIAQILSVSMLVRYGMNLKTIADKIDQSVISVLKKGYRTADISNNNNYLKTNEMGDVIANTLISGE

SEQ ID NO: 423 - protein, 490 aa, Acinetobacter sp. ADP1
MSDVKLHRLYIHGQYTDATSGKTFDSINPATGEVIATIQQASQTDIEAAVKSAAEGQKVWAAKTAVERSRILRRAVDILRERNDELAQLETLDTGKAFSETSTVDIVTGADVLEYYAGLATAIQGEQVPLRESSFFYTRREPLGVVAGIGAWNYPIQIALWKSAPALAAGNAMIFKPSEVTPLTAFKLAEIYSEAGLPAGVFNVVQGAGREIGQWLTEHAVIEKISFTGGVETGKKVMASAAGSTLKEVTMELGGKSPLIICEDANLDRAADIAVMANFFSSGQVCTNGTRVFIPQRLKAAFEQAVVERVKRIRMGDPQHTDTNFGPLVSFPHMEKVLSYIESGKQQGAKVLIGGERATTGLLAQGAYVQPTVFTDCHDDMKIVQEEIFGPVMSILTYDTIEEAIERANNTNFGLAAGVVTQNISQAHQIIHQLEAGICWINTWGESPAEMPVGGYKESGVGRENGISTLNHYTRTKSIQVELGDYQSVF

SEQ ID NO: 424 - protein, 467 aa, Candida tropicalis
MSALRSFQRSSNVAKSTLKNSVRTYATAEPTLKQRLEEILPAKAEEVKQLKKDYGKTVIGEVLLEQAYGGMRGIKGLVWEGSVLDPIEGIRFRGRTIPDIQKELPKAPGGEEPLPEALFWLLLTGEVPTEAQTRALSEEFAARSALPKHVEELIDRSPSHLHPMAQFSIAVTALESESQFAKAYAKGVHKSEYWKYTYEDSIELLAKLPTIAAKIYRNVFHDGKLPAQIDSKLDYGANLASLLGFGENKEFLELMRLYLTIHSDHEGGNVSAHTTHLVGSALSSPFLSLAAGLNGLAGPLHGRANQEVLEWLFKLREELNGDYSKEAIEKYLWDTLNAGRVGPGYGHAVLRKTDPRYTAQREFALKHMPDYELFKLVSNIYEVAPGVFDQHGMTKNPWPNVGSHSGVLLQYYGLTEESFYTVLFGVSRAFGVLPQLILDRGLGMPIERPKSFSTEKYIELVKSIGKN

SEQ ID NO: 425 - protein, 306 aa, Gibberella zeae PH-1
MAPSTFKLNTGQEIPAVGLGTWQSPAGEVEKAVTYALKDGYKLIDCAYCYGNEEEVGAGLKAAFKAGVKREDIFVVTKAWATYNTRVELALDKSLKALGLDYVDLFLVHWPLLLNPDGNDDKFPKKPDGSRDVIRDYNHVDGWKLMEKLPATGKTRAVGVCNYSKKYLEELLPHATIVPAVNQIENHPELPQQEIVDFCKEKGIHIEAYSPLGSTGGPVMSAEPVVKIADKKGVSASTVLLSYHGNTVLAKSVNPERITANKTIVDLDDEDMKALNDYSAELQKNNQVKRYVYPPFGIDFGFPDKS

SEQ ID NO: 426 - protein, 380 aa, Gibberella zeae PH-1
MATDRVKASVLHGEKDLRLEERELPKPSSNEVQVAVQSTGLCGSDLHYYNHFRNGDIIVREPLTLGHESAGTVVAVGSEVTHLKPGDHVALEVGLPCETCELCDEGRYNICRGMKFRSSAKANPHAQGTLQERINHPAKWCHKMPEHVTLDLGALVEPLSVAMHARDRASLPKGSTVLVLGAGAVGLLAAAVAKADQAKTVIIADILKDRLDFATSNGFADASVVVPMERPQTIEDKLAFAQKVAAMVKETQIDGEAIGEVTAVYECTGVETCVQTAIYATKPGGKVMIIGMGTPVLTIPMSAAALREVDIVGVFRYANTYKEIIELLSNPPANMPDVSRLVTQRYSGMDKIEEAFKMAGKVRDEQGNLVIKVVVDFSEK

SEQ ID NO: 427 - protein, 473 aa, Zea mays
SLYQRGESASERKTYPNPLQDNPAYSVVKQYFVNPDDTVTQKIVVHKTSARGTHFRRAGPRQRVYFQSDEVNAAIVTCGGLCPGLNTVIRELVCGLYDMYGVSSVVGIEGGYKGFYSKNTVALTPKSVNDIHKRGGTVLGTSRGGHDTAKIVDCLQDRGINQVYIIGGDGTQKGASVIYEEVRRRGLKCSVVGVPKTIDNDIAVIDKSFGFDTAVEEAQRAINAAHVEAESAENGIGVVKLMGRNSGFIAMYATLASRDVDCCLIPESPFYLEGKGGLLEFVERRLKDNGHMVIVVAEGAGQDLIARSMNFVDTQDASGNKLLLDVGLWLSQKIKDHFKKKPSFPITLKYIDPTYMIRAVRSNASDNVYCTLLAHSALHGAMAGYTGFTVAPVNGRHAYIPFYRITEKQNKVVITDRMWARVLCSTNQPCFLSHEDVENMKHDDDEHHHMHNTQLLEGGSSPVSKCNGSAAAV

SEQ ID NO: 428 - protein, 170 aa, Zea mays
  misc_feature (69)..(69): Xaa can be any naturally occurring amino acid
MDGRMFGLETPLMVALQHLLDVPDGDAGAGGDKASGAAAGGGPTRTYVRDARAMAATPADVKGAPGRVXAFVVDMPGLGTGDIKVQVEDERVLVISGERRREEREDAKYLRMERRMGKFMRKFVLPDNADMDKISAVCRDGVLTVTVEKLPPPEPKKPKTIEVKVRLRWD

SEQ ID NO: 429 - protein, 516 aa, Glycine max
EWEMDQLLWRVLPLLTILVSFGVFFYLQDSYTAQFYALIKLPRDKCSLLPHRHFWISSKRIVTPQGIISGSVEINDGKIISVVEGHAIQGKPKQEEVIDYGDAVIMPGLIDVHVHLNEPGRTEWEGFDTGTRAAAAGGVTTVVDMPLNCYPTTVSKEKLKLKLDAAEDKIYVDVGFWGGLIPENALNTSILDGLLSAGVLGVKSFMCPSGIDDFPMATIDHIKAGLSVLAKYRRPIVVHAEIQQDFENHLELNEDNLDPRAYLTYLNTRPPSWEEAAIKQLVSVTKDTRKGGPLEGAHVHIVHLSDSSASLDLIKEAKSHGDSISVETCPHYLAFTSEEIPNGDTRFKCSPPIRDAYNKDKLWEAVLEGHIDLLSTDHSPTVPELKLMEEGDFLKAWGGISSLQFNLPVTWSYGKKYGLTLEQLSLLWSKKPATLAGLESKGTIAVGNHADIVVWQPELEFDLDDDYPVFIKHSELSAYMGRRLSGKVLETFVRGNLVFKDGKHAPAPCGVQILAK

SEQ ID NO: 430 - protein, 552 aa, Glycine max
MALAPPSVFALYIVIDLKIEIYMTISAMCGILAVLGCVDNSQTKRARIIELSRRLRHRGPDWSGIHCYEDCYLAHQRLAIVDPTSGDQPLYNEDKTVIVTYEEHGEEFVNMLDGMFAFILLDTRDKSFIAARDAIGITPLYLGWGHDGSTWFASEMKALSDDCERFISFPPGHIYSSKQGGLRRWYNPPWFSEDIPSTPYDPTLLRETFERAVVKRMMTDVPFGVLLSGGLDSSLVAAVVNRYLAESESARQWGSQLHTFCIGLKGSPDLKAAKEVADYLGTRHHELYFTVQEGIDALEEVIYHIETYDVTTIRASTAMFLMSRKIKALGVKMVLSGEGSDEIFGVFMALMIWQIKALHLYDCLRANKSTAAWGVEARVPFLDKEFINVAMSIDPEWKMIRPDLGRIEKWVLRNAFDDDKNPYLPKHILYRQKEQFSDGVGYSWIDGLKDHANKQVTDATMMAANFIYPENTPTTKEGYLYRTIFEKFFPKNAAKATVPGGPSVACSTAKAVEWDAAWSKNLDPSGRAALGIHDAAYDAVDTKIDEPKNGTL

SEQ ID NO: 431 - protein, 497 aa, Photorhabdus luminescens subsp. laumondii TTO1
MSDINLLQPVMAFLQHNHGHYINGQPVSGQGSETFSVINPATDEIIATVNQGGKAEVNAAMQAAQAAFHGVWAQTSPMERGHCLNRLADLLLAHREELAQLETLCSGKTIQLSRMLEIDSSAQFLRYFAGWSSKISGETLNVSLPSFKGEQYTAFTRREPIGVVVGIIPWNFSIMIAIWKMAAALTCGCTIVLKPSEYTPLTMLRVAELAKQAGIPDGVINVINGSGSVLGPALIGHPLCAKVTFTGSVPTGIAVGKSAMEQGLTRATLELGGKNGAAFLADMSVEKIVDGILEAGYLNQGQICAAAERFYIPASHMDDVLKLLSERLAAMKIGSPLDDSTEMGPLANKAHYDKILSLFEQARQEGSEIVYGGHALAGPGFFVAPTVIRANSPEDSLMKEETFGPVGTFLSYNDEEELIGLMNSTPFGLAASLWTNDLSKAMRMIPRIEAGTVWVNMHTFLDPALPFGGTKSSGIGREFGSAFIEHYTELKSVMVRY

SEQ ID NO: 432 - protein, 521 aa, Triticum aestivum
  misc_feature (303)..(303): Xaa can be any naturally occurring amino acid
  misc_feature (342)..(342): Xaa can be any naturally occurring amino acid
MAATPPSSRDPSPQPRRPAAAAGRPAASGTGTIGNGKRGGLLLGRYELGRVLGHGTFAKVYHARHADTGETVAIKVLDKEKALRAGLVPHIKREITILRRVRHPNIVRLFEVMATKSKIYFVMEFVRGGELFARVAKGRLKEDTARRYFQQLISAVGFCHARGVFHRDLKPENLLVDERGDLKVSDFGLSAVADQFHPDGLLHTFCGTPSYVAPEMLARRGYDGAKADIWSCGVILFVLMAGYLPFHDQNLMAMYRKIYRGEFRCPRWFSRDLTSLLNRLLDTNPETRITMAEVMQSRWFQKXGFRPVRFYVEDDQLHSLGDSESEELGLVEPTEPPLPPPXFPPPLPPPPQQEDDDSGWESDSSVASCPATLSCEERQRPAGRLTRPASLNAFDIISFSKGFDLSGLFEERGSEVRFISAQPMETIVTKLEEIAKMKSFSIRRKDWRVSIEGTREGEKGPLTIGAEIFELTPSLLVLEVKKKAGDKAEYDDFCNKELKPGMEPLVHHQSGSARNVPSDTE

SEQ ID NO: 433 - protein, 1291 aa, Ustilago maydis 521
MALDGKDASELQFGLTAYNIHGSIRDSRSMIDCGARAHSHSGHTSRFAIDCGVRVHSHSGRTSRSNEFVQAEKLTSYAVMYGFVLGCVRVEVRVSAPESTVQRYPSAKMIDVEQMPFDLYTYTRSAVAAAATATSTAAAAVINDTIDWNHGNPHAGGGNNGSDDNPAIPLPNQRAFEGPWFSQQLSLSIFIGLASFFIFVFVRRRNAALFAPRTKLKGFSPLDDGHDVGYFGWIMPTLKTEEMRILQTVGMDAAILLSFLKMGFWLFFSLSCWSILVLMPVNYWQNGVLDGVSPAEDRDNATDPFSARDTVTGVWTQLIFNSLKNKHEAPEEPLPQLPLPAKPAQAQLYHATHLLSTYLFTILAMRAIWINYQRFVRSRQLYILEIVESIPARTVEIRDLPAHLRDEKALAEYFENMDMPVESTAVVRNTEGLSRLLKLRSNALQQLEKIWVRWLGNPTDADGYDPEKIMLLAAGANHDDLLSSHDSDDLVRISVDDGDRSQARPRDDHEHSHLLGGNASNTVFTGADTIRTHHPRPTMRKQWWNPFSEKVDAIDELTRQFHAVDRAVRRRRKTGRFPGGNVGFVTFQSAASAQIASQTVHYPMPAYCATSMAQEPRDIIWSNIDLSNNDRRVRQVLVSIFMVAVLVFYIPPLVFLASFVSPGAIKKYAPWLDRLLDTDQRLRALVQNNLPSLVVIGFNALLPLVLEYSSYLQGLKARSLVEYSLLKKYYLFLMVSVVFIFLIATTAWGVLQELAENPMRVIDKLAASLPKARFFSLSYVILQGIALQPLQLLQLPTLILRAFYRVFLTRTPREFAELNAPPTLAMGNVYPQALLIFTLCILYSIVSPLIVIFGTVYFGIAYVVNKYKLLYVFYKPYESQGQAWPISASRCIWALVLFHIFQFSLFSVRKELWMSTGLLPLIVFTFWFNGHLETTFGPLTEHVNLSSVVEVLKEREVDPRLAELAQNGPPGVVRAEVGVGQGVVSTDTSAANAVGGNGGRSGTVTPSSSRSKQLLSLDPSHKIDPAFTKLALARYSPDEEDETLFVAQRDTKTDYREPPGAGYYPGVLNTGRRRYGHPAITGILPELWLPIPKQRMEQGGPDVTEADDLESATGVASATTSALGAPRLGLSNDAASATRLIRTRALSKAEPLILSLRKRKSSLMTRATSRTTCSAQRPPTADSRNDGTSIDRDRDRDAPSDDRDPDLGVWSDGVSGPQGSSSSAALGEALSGAYAVAPARQHIRNGIDTHDADDGEDEGVYIHRSATRKGAPPTGTRSGVRSAAHTAAYHD

SEQ ID NO: 434 - protein, 360 aa, Streptomyces peucetius
GSPNSTAEPTVAARPQQIDALRTLIRLGSLHTPMVVRTAATLRLVDHILAGARTVKALAARTDTRPEALLRLIRHLVAIGLLEEDAPGEFVPTEVGELLADDHPAAQRAWHDLTQAVARADISFTRLPDAIRTGRPTYESIYGKPFYEDLAGRPDLRASFDSLLACDQDVAFDAPAAAYDWTNVRHVLDVGGGKGGFAAAIARRAPHVSATVLEMAGTVDTARSYLKDEGLSDRVDVVEGDFFEPLPRKADAIILSFVLLNWPDHDAVRILTRCAEALEPGGRILIHERDDLHENSFNEQFTELDLRMLVFLGGALRTREKWDGLAASAGLVVEEVRQLPSPTIPYDLSLLVLAPAATGA

SEQ ID NO: 435 - protein, 249 aa, Hordeum vulgare subsp. vulgare
MDMGLEVSSSSPSSSSVSSSPEHAARRASPAKRPAGRTKFRETRHPVYRGVRRRGNTERWVCEVRVPGKRGARLWLGTYATAEVAARANDAAMLALGGRSATCLNFADSAWLLAVPSALSDLADVRRAAVEAVADFQRREAADGSLAIAVPKEASSGAPSLSPSSGSDSAGSTGTSEPSANGVFEGPVVMDSEMFRLDLFPEMDLGSYYMSLAEALLMDPPPTATIIHAYEDNGDGGADVRLWSYSVDM

SEQ ID NO: 436 - protein, 246 aa, Pinus banksiana
YTYNLRKKGPEDVIVKVIYCGICHSDLVQMRNEMGMSHYPMVPGHEVVGIVTEIGSEVKKFKVGEHVGVGCIVGSCRSCGNCNQSMEQYCSKRIWTYNDVNHDGTPTQGGFASSMVVDQMFVVRIPENLLLEQAAPLLCAGVTVFSPMKHFGMTEPGKKCGILGLGGVGHMGVKIAKAFGLHVTVISSSDKKKEEAMEVLGADAYLVSKDTEKMMEAAESLDYIMDTIPVAHPLEPYLALLKTNGK

SEQ ID NO: 437 - protein, 251 aa, Zea mays
  misc_feature (233)..(233): Xaa can be any naturally occurring amino acid
MASKSTMRSLVLIMGLLLLSCSGISSAARLLEEVAPKEEYPHPEVPELPKPELPPHPTVPELPKPDELPPHPVVPELPKPEVPVHPAVPELPKPELPPHPTVPELPKPEVPAHPAVPELPKPELPPHPTVPELPKPEVPELPKPEVPEHPAVPELPKPELPPHPTVPELPKPEVPELPKPEVPEHPAVPELPHPDVPEHPASVPELPKPEVPEHPTVPELPKHELPPLPEPEXHCPPKAESHYPEPGMAKP

SEQ ID NO: 438 - protein, 163 aa, Triticum aestivum
  misc_feature (91)..(91): Xaa can be any naturally occurring amino acid
  misc_feature (104)..(104): Xaa can be any naturally occurring amino acid
MSDTDEHHFESKADSGASKTYPQQAGAIRKGGHIVIKARPCKVVEVSTSKTGKHGHAKCHFVAIDIFNGKKLEDIVPSSHNCDVPHVDRQXYQLIDITDDGYVXLLTESGNTKDDLNSTDDFCLGSQDGLLMEGLICRDSAWVKKCACEGIGGGITLSGATHT

SEQ ID NO: 439 - protein, 500 aa, Atriplex triangularis
MAFPMPVRQLFIDGERREPLLKNRIPIINPSTEEIIGDIPAATAEDVEVAVVAARKAFKRNKGRDWAATSGAHRAKHLRAIAAKITERKDHFVKLETLDSGKPFDEAVLDIDDVASCFEYFAGQAEALDAKQKAPVTLPMDRFKSHVLRQPIGVVGLISPWNYPLLMATWKIAPALAAGCTAVLKPSELASVTCLEFGEVCNEVGLPPGVLNILTGLGPDAGAPIVSHPDIDKIAFTGSSATGSKIMASAAQLVKPVTLELGGKSPVIMFEDIDIETAVEWTLFGVFWTNGQICSATSRLLLHESIAAEFVDRMVKWTKNIKISDPFEEGCRLGPVISKGQYDKIMKFISTAKSEGATILCGGSRPEHLKKGYYIEPTIITDITTSMQIWKEEVFGPVICVKTFKTEDEAIELANDTEYGLAGAVFSKDLERCERVTKALEVGAVWVNCSQPCFVHAPWGGVKRSGFGRELGEWGIENYLNIKQVTSDISDEPWGWYKSP

SEQ ID NO: 440 - protein, 245 aa, Pinus armandii
YTYSLRKKGPEDVIVKVIYCGICHSDLVQMRNEMGMSNYPMVPGHEVVGMVTELGSEVKKFKVGDHVGVGCIVGSCRSCGNCNQSMEQYCSKRIWTYNDVNHDGTPTQGGFASSMVVDQMFVVRIPENLPLEQAAPLLCAGVTVFSPMKHFGMTEPGKRCGILGLGGVGHMGVKIAKAFGLHVTVISSSDKKKEEAMEVLGADAYLVSKDAEKMMEAAESLDYIMDTIPVAHPLEPYLALLKTNG

SEQ ID NO: 441 - protein, 246 aa, Pinus armandii
YTYSLRKKGPEDVIVKVIYCGICHSDLVQMRNEMGMSNYPMVPGHEVVGMVTELGSEVKKFKVGDHVGVGCIVGSCRSCGNCNQSMEQYCSKRIWTYNDVNHDGTPTQGGFASSMVVDQMFVVRIPENLPLEQAAPLLCAGVTVFSPMKHFGMTEPGKRCGILGLGGVGHMGVKIAKAFGLHVTVISSSDKKKEEAMEVLGADAYLVSKDAEKMMEAAESLDYIMDTIPVAHPLEPYLALLKTNGK

SEQ ID NO: 442 - protein, 371 aa, Acinetobacter sp. ADP1
MCKVIQFKGFQQSFKRKITMKAARFYDRGDIRIEDIPEPEVTAGTVGIQVAWCGICGTDLHEFMEGPIFIPPCGHPHPISGESAPITMGHEFSGVVYAVGEGVDDIQVGQHVVVEPYIVADDVPTGPGENYHLSKNMNFIGLGGRGGGLSEKIAVQRRWVHPISENIPLDQAALIEPLSVGHHAYVRSGAKAGDVALVGGAGPIGLLLSAILKAKGLTVIITELSSKRKEKAKESGVADYILDPTQVDVIAEVMKITQDKGADIAFECSSVNKVLDTLVASTKPTGVIVIVSIWSHPATVNVHSVVMKELDIRGTIAYVNDHQETIKLVEQGKINLAPFITQRIKLDDLISQGFETLIHNNESAVKIIVHP

SEQ ID NO: 443 - protein, 246 aa, Picea smithiana
YTYTLRNKGPEDVIVRVIYCGICHSDLVQMHNEMGMSNYPMVPGHEVVGVVTEIGSEVKKFKVGEHVGVGCIVGSCRSCSNCNGSMEQYCSKRIWTYNDVNHDGTPTQGGFASSMVVDQMFVVRIPENLPLEQAALLLCAGVTVYSPMKHFGMTEPGKKCGILGLGGVGHMGVKIAKAFGLHVTVISSSDKKKEEALEVLGADAYLVSKDAEKMQEAAESLDYIMDTIPVAHPLEPYLALLKTNGK

SEQ ID NO: 444 - protein, 147 aa, Brassica napus
MATVGRNIAAPLLFLNLIMYLIVLGFASWCLNRYINGQTNHPSFGGNGATPFFLTFSILAAVIGIASKLAGANHIRFWRNDSLAAAGSSSIVAWAVTALAMGLACKQINIGGWRGWRLRIIEAFIIILTFTQLLYVLLIHAGVFSSK

SEQ ID NO: 445 - protein, 480 aa, Triticum aestivum
  misc_feature (137)..(137): Xaa can be any naturally occurring amino acid
  misc_feature (148)..(148): Xaa can be any naturally occurring amino acid
  misc_feature (153)..(153): Xaa can be any naturally occurring amino acid
MDRADPARGRLAVLSSHLLAGVLAVVDSRTGKRYEVKVSEDGTVRATDFKKITTGKDDKGLKTYDPGYLNTAPVRSSICYIDGDEGILRYRGYPIEEVAESSSFVEVAYLLMYGNLPTQSQLAGWESAISQHSAVPXGLLDIIQSMPXDAHPXGVLASAMSTLSVFHPDANPALRGQDLYKSKQVRDKQIVRVLGKAPAIAAAAYLRLAGRPAVLPSNNLSYSENFLYMLDSLGDKEYKPNPRLARVLDILFILHAEHEMNCSTAAVRHLASSGVDVFTALSGAVGALYGPLHGGANEAVLKMLNEIGAVENIPDFIEGVKNRKRKMSGFGHRVYKNYDPRAKVIRKLAEEVFSIVGRDPLIEVAVALEKAALSDDYFIKRKLYPNVDFYSGLIYRAMGFPTEFFPVLFAIPRMAGWLAHWKESLDDPDNKIMRPQQVYTGVWLRHYTPVRERVASNQGEELGQIATSNATRRRRAGSSL

SEQ ID NO: 446 - protein, 168 aa, Cucumis sativus
GSVRAKNTMNIMLTNVLDAAAGGLFYYLFGFAFAFGTPSNPFIGRHFFGLKSIPSTAADYSFFLYQWAFAIAAAGITSGSIAERTQFVAYLIYSSVLTGFVYPVVSHWFWSPDGWASPSRTDGDLLFGTGVIDFAGSGVVHMVGGIAGLWGALIEGPRIGRFDKTGRS

SEQ ID NO: 447 - protein, 455 aa, Bacillus megaterium
TIKEMPQPKTFGELKNLPLLNTDKPVQALMKIADELGEIFKFEAPGRVTRYLSSQRLIKEACDESRFDKNLSQALKFVRDFAGDGLFTSWTHEKNWKKAHNILLPSFSQQAMKGYHAMMVDIAVQLVQKWERLNADEHIEVPEDMTRLTLDTIGLCGFNYRFNSFYRDQPHPFITSMVRALDEAMNKLQRANPDDPAYDENKRQFQEDIKVMNDLVDKIIADRKASGEQSDDLLTHMLNGKDPETGEPLDDENIRYQIITFLIAGHETTSGLLSFALYFLVKNPHVLQKAAEEAARVLVDPVPSYKQVKQLKYVGMVLNEALRLWPTAPAFSLYAKEDTVLGGEYPLEKGDELMVLIPQLHRDKTIWGDDVEEFRPERFENPSAIPQHAFKPAGNGQRACIGQQFALHEATLVLGMMLKHFDFEDHTNYELDIKETLTLKPEGFVVKAKSKKIPL

SEQ ID NO: 448 - protein, 483 aa, Burkholderia cepacia R18194
MNEFLRTGHYIGGEWHESHGASDATYPVLNPATGETIAKVAKGGADDTQRAIDAAAHAFPAWRALTAKERGARVKRWGELMLENRDALAELLTREQGKPLAEARGEVVYAASFLEWFAEEAKRMYGDVIPSPKPNSQIVVTREPVGVVAAITPWNFPLAMITRKAGPALAAGCTMVLKPSEETPLSAFALAVLAERAGVPAGVFNVVSGDAVAIGETLTSSSVVRKLSFTGSTRVGKLLAKQSADTLKKLSLELGGNAPFIVFDDADLDAAVEGAIASKFRNTGQTCVCVNRFLVQDGVYDAFTRKLADAVRKLRVGNALAGEVDQGPLINEAALGKVERHVADATAKGAHALTGGKRHALGGTFYEPTVLTGMTADMLIAEEETFGPVAGCFRFATEEEAVAAANDTPFGLSAYFYTRDLGRAWRVSGALESGMVGVNDGIISTEVAPFGGVKQSGLGREGSKYGLDEYVELKYTLMAGLGR

SEQ ID NO: 449 - protein, 119 aa, Armoracia rusticana
PGSFNKILVTYETGTYNGQWSAVGRTAVTTTLAGCTAALTTLFGKRLLSGHWNVTDVCNGLLGGFAAITGGCSVVEPWAAIICGFVAALVLLGCNKLAEKLRYDDPLEAAQLHGGCGAW

SEQ ID NO: 450 - protein, 455 aa, Bacillus megaterium
TIKEMPQPKTFGELKNLPLLNTDKPVQALMKIADELGEIFKFEAPGRVTRYLSSQRLIKEACDESRFDKNLSQALKFVRDFAGDGLFTSWTHEKNWKKAHNILLPSFSQQAMKGYHAMMVDIAVQLVQKWERLNADEHIEVPEDMTRLTLDTIGLCGFNYRFNSFYRDQPHPFITSMVRALDEAMNKLQRANPDDPAYDENKRQFQEDIKVMNDLVDKIIADRKASGEQSDDLLTHMLNGKDPETGEPLDDENIRYQIITFLIAGHETTSGLLSFALYFLVKNPHVLQKAAEEAARVLVDPVPSYKQVKQLKYVGMVLNEALRLWPTAPAFSLYAKEDTVLGGEYPLEKGDELMVLIPQLHRDKTIWGDDVEEFRPERFENPSAIPQHAFKPWGNGQRACIGQQFALHEATLVLGMMLKHFDFEDHTNYELDIKETLTLKPEGFVVKAKSKKIPL

SEQ ID NO: 451 - protein, 455 aa, Bacillus megaterium
TIKEMPQPKTFGELKNLPLLNTDKPVQALMKIADELGEIFKFEAPGRVTRYLSSQRLIKEACDESRFDKNLSQALKFVRDFAGDGLFTSWTHEKNWKKAHNILLPSFSQQAMKGYHAMMVDIAVQLVQKWERLNADEHIEVPEDMTRLTLDTIGLCGFNYRFNSFYRDQPHPFITSMVRALDEAMNKLQRANPDDPAYDENKRQFQEDIKVMNDLVDKIIADRKASGEQSDDLLTHMLNGKDPETGEPLDDENIRYQIITFLIAGHETTSGLLSFALYFLVKNPHVLQKAAEEAARVLVDPVPSYKQVKQLKYVGMVLNEALRLWPTAPAFSLYAKEDTVLGGEYPLEKGDELMVLIPQLHRDKTIWGDDVEEFRPERFENPSAIPQHAFKPYGNGQRACIGQQFALHEATLVLGMMLKHFDFEDHTNYELDIKETLTLKPEGFVVKAKSKKIPL

SEQ ID NO: 452 - protein, 150 aa, Brassica napus
  misc_feature (42)..(42): Xaa can be any naturally occurring amino acid
MAIRLMDLDSPFFNTLHRIMDLTEDAEKNLNAPTRTYVRDAXAMAATPADVKEYPNSYVFVIDMPGLKSGDIKVQVEDDNVLLISGERKREEEKEKEGGKYLRMERRLGKLMRKFTLPENANTDAISAVCLDGVLTVTVNKLPPPQPKKP

SEQ ID NO: 453 - protein, 431 aa, Glycine max
  misc_feature (22)..(22): Xaa can be any naturally occurring amino acid
MRLGKYYLGRTLGEGNFGKVKXARNTDSGQAFAVKIIDKNTIVDINITNQIIREIATLKLLRHPNVVRLYEVLASKTKIYMVLEYVNGGELFDIIASKGKHIEGEGRKLFQQLIDGVSYCHTKGVFHRDLKLENVLVDNKGNIKITDFGLSALPQHLREDGLLHTTCGSPNYVAPEVLANKGYDGATSDTWSCGVILYVILTGHLPFDDRNLVVLYQKIFKGDVQIPKWLTPGARNMIRRILDPNPETRITMAGIKEDPWFKKGYIPVNPEDEDVYVDQEAFSIHEQPNEAEQRNSGSPSLINAFQLIGMSSCLDLSGFFEKEDVSERKIRFASNLSVKDLIERIEDTATEMEFRVEKKNGKLKVIRENKVHKTLGCLSVVVEVFGISSSLYVVELRKSYGDGSVYKQLCNKLLNDLGIPPKQPLVRSAAN

SEQ ID NO: 454 - protein, 257 aa, Brassica rapa subsp. pekinensis
MNSVSTLSEVLGSQNESPVGGDYCPMLAASCPKKPAGRKKFRETRHPIYRGVRLRKSGKWVCEVREPNKKSRIWLGTFKTAEIAARAHDVAALALRGRGACLNFADSAWRLRIPETTCAKDIQKAAAEAALAFEAEKSDTTTNDRGMNMEETSAVASPAELNDTTADHGLDMEETMVEAVFRDEQREGFYMAEETTVEGVVPEEQMSKGFYMDEEWTFEMPRLLADMAEGMLLPPPSVQWGHNDDFEGDVDMNLWSY

SEQ ID NO: 455 - protein, 249 aa, Zea mays
MFGYQKGLDVEAGTSGAAATGGARQLYPGMQESPELRWALIRKIYVILSLQLLLTAVVAAVVVKVRAIPHFFTTTSAGLGLYIFLIILPFIVLCPLYFYHEKHPVNLILLGLFTVAISFAVGMTCAFTSGKVILESAILTTVVVLSLTAYTFWAVNRGKDFSFLGPFLFAALIVLLVFALIQILFPLGKLSQMIYGGLASLIFSGYIVYDTNNIIRRYTYDQYVWAAVSLYLDVINLFLSLMTLFRAAD

SEQ ID NO: 456 - protein, 488 aa, Photorhabdus luminescens
MTIINHWINGKNVSSKTYFETTNPATGEVLAEVAAGGQEEIDQAVAAAKEAFPKWADLPMKERARLMRRLGELIDENVPEIAAMETKDTGLPIHQTQNVLIPRASHNFNFFAEICQQMNGHTYPVDDKMLNYTLVQPVGVCALISPWNVPFMTATWKVAPCLALGNTAVLKMSELSPLTANRLGELALEAGIPAGVLNVVQGYGATAGDALVKHHDVRAVSFTGGTVTGRQIMKNAGLKKYSMELGGKSPVLIFEDADIERALDASLFTIFSINGERCTAGSRIFIQQSIYPEFIKRFAERANRLRVGDPQDPNTQIGALISKPHWEKVSGYIRLGIEEGATLLAGGPDKPIDLPAHLKEGNFLRPTVLADVDNRMRVAQEEIFGPVACLLPFKDEAEGLRLANDVEYGLASYIWTQDVSKVLRLARNIEAGMVFVNTQNVRDLRQPFGGVKASGTGREGGEYSFEVFAEMKNVCISMGDHHIPRWGI

SEQ ID NO: 457 - protein, 317 aa, Oleomonas sagaranensis
MTLDAQAKAILDQIARSPMPKLHQVPASVARQMFEISCKLTEIKNLPIGRVEDRVIPGPDDTELPIRIYTPVAAPPGPLPVLVFFHGGGFVIGSLDSHDAPCRLIANEARCLVVSVDYRLAPENRFPAAVDDCLAAVTWVARNAAEINADPTRIAVGGDSAGGNLSAVVSQQLRDAGGPKIVFQLLIYPATDALHEGLSRTSNAEGYMLDKDLMSWFFAQYLGDGGGVDLADPRFSPLRHANLGNLGTIHVVVAGFDPLRDEGIAYAEALKAAGNKVTLSEFKGQIHGFCSMAGVIEAGRTALVEGAALLKEAFAQA

SEQ ID NO: 458 - protein, 421 aa, Hydrogenobacter thermophilus
MLKVESVYRWEGSLKVPQEGKFIKLKEDKSIEVPNFPIIPFIEGDGIGAEIMPAMIHIVNTAVEKAYGGSRNIFWVELLAGDKAEEKTGKRMPEETIEFLKEAVVGIKGPLGTPVGKGGKSLNAILRQSMDFYSAIRPVYWLGQPAPIPNPERVNVAVFRENSDDVYMSIEYMPKEERTQKVRKFFIEEMGVSEYALPEDCGITVKPMSEFKTKRHVRKALRWALQNNKKVVAVVGKGNIMKATEGAFMNWAFEVAKEPEFEGKVITEGEPKDGQVLMVKVITDQMLMQLVLKPEAYHVIITQNLNGDYISDLASALVGGPGFVPSGNIGDGYALFESTHGTAYDIAGKGIANPLSLTLSGAMMLEYLGWKEASELIYSAVKRTIAERLGTPDIANGFRKQGLEAKELTTLEFAKAIADRI

SEQ ID NO: 459 - protein, 490 aa, Photorhabdus luminescens
MTNDVNTELLRQQAYINGQWVDADNQATFKVTNPANGQVIAHVSNMGAAETERAIAAAQQALPAWRAMTAKQRSQILQRWFQLMMANQQALAELLSREQGKSQAEAMGEIAYGASFIEWFAEEGKRTYGETIPSPMPGRRIVTIKQPIGVVAAITPWNFPNAMITRKVGPALAAGCTVILKPASETPLSALALAALAEQAGIPAGVFNVVTGVDAKTIGGVLTQSPIVRKLSFTGSTRIGKLLMAQSADTVKKLSLELGGNAPFIVFDDANIDAAVQGALIAKFRNSGQTCVCANRILVQETIYDAFAERLAQAVNKLQVGPASDAKSQQGPLINQAAVDKVEEHINDAVSRGARILAGGKPHALGGLFFEPTVLADVNESMLISQEETFGPVAPLFKFRDEAEAIHLANDTEFGLAAYFYSRDIGRIYRVAEALESGMVGINEGLISNEVAPFGGIKQSGLGREGSRYGIEDYLEVKYLCFGGIEDTGV

SEQ ID NO: 460 - protein, 347 aa, Agrobacterium tumefaciens str. C58
MRGVVIHAAKDLRVEDVAGQPLAADEVRVAVAVGGICGSDLHYYNHGGFGTVRVREPMALGHEFAGTVVEVGSSVSHLVPGMRVAVNPSLPCGTCRYCAQGRQNQCLDMRFMGSAMRSPHVQGGFREVVTVHSTQPVQIADGLSMGEAAMAEPLAVCLHAARQAGSLLGKTVLITGAGPIGMLSLLVARLAGAAHIVVTDVADAPLDLARRIGADEAVNILRDADMLEKYRFEKGVFDVLFEASGNQAALLPALDLLRPGGIIVQLGLGGDFTIPMNLIVAKELQLRGTFRFHEEFAQAVNMMGRGLIDVKPLISATLPFDQAREAFDLAGDRAKSMKVQLAFSGAA

SEQ ID NO: 461 - protein, 539 aa, Glycine max
MDSSSSSPNNNNNHHASTTKTNGFLIHPKLGFEPARSRSRLAMASPANTSEPKIVTGTAGYILEDVPHFTDYIPNLPTYPNPLQDNPAYSVVKQYFVHVDDSVPQKVVVHKDGARGVHFRRAGPRQKVYFEADEVQAAIVTCGGLCPGLNTVIRELVCGLHHMYGVKKVLGINGGYRGFYARNTITLTPKSVNDIHKRGGTVLGTSRGGHDTKKIVDSIQDRGINQVYIIGGDGTQKGASAIFEEVRKRGLKVSVVGIPKTIDNDIPVIDKSFGFDTAVEEAQRAINAAHVEAESVENGIGVVKLMGRNSGFIAMYATLASRDVDCCLIPESPFYLEGPGGLYEYIEKRLKENGHMVIVIAEGAGQELVSESVQSMSKQDASGNKLFQDVGLWISQKIRDHFAAQKTLPITLKYIDPTYMIRAIPSNASDNVYCTLLAQSAVHGAMAGYTGYTSGLVNGRQTYIPFYRITERQNHVVITDRMWARLLSSTNQPSFLDAKGDNEEKEEEEALNQLPDGHCAKDTSLASKEINSSIYPTAC

SEQ ID NO: 462 - protein, 213 aa, Desulfitobacterium hafniense DCB-2
MEFLLDSANPEEIRQAWAMGVIGGITTNPSLVAKEGRDFHQLLQELVQIVNGPISAEVIALDTEGMLGEARELAAMHPNIVVKIPMTEEGLKAVKVLKAEGIKTNVTLVFSAVQALLAARAGATYVSPFLGRLDDIGENGLLLLADICEVFGVHGLETKVIAASIRNPVHVTEAAKIGADYATVPFNVLCQLFKHPLTEAGIKKFLADWQKLK

SEQ ID NO: 463 - protein, 282 aa, Triticum aestivum
MPHKNTMASLVFLMALLLSCSSMTSAARHLEEALPKEYPPHPIVPELPKPQLPPHPAVPELPEPEPPHPLVPELPHPMVPEVPKHELPPHPLVPEVPHPMVPEVPKHELPPHPAVPELPKPKVPHPAVPEVAKEPEVPHPIVPEVPNKHEQPHPMVPEVPKHELPPHPVMPELPKPELPHPVAEVPKEHELPHPIVPEVPKEHELPHPAIPELPKTEMPHHAVPEVPKEPHVPHPEVPEVLKEPELPHPAVPEVPKHEMPPFPKAELPPKPELHFLEPEAKP

SEQ ID NO: 464 - protein, 246 aa, Pseudotsuga menziesii
YTYILRNIGPEGVLLRVIYCGICHSDLVQMRNEMGMSNYPMVPGHEVVGIVTEIGSEVKKFKVGEHVGVGCIVGSCRSCGNCNQSMEQYCSKRIWTYNDVNHDGTTTQGGFASTMVVDQMFVVRIPENLPLEQAAPLLCAGVTVFSPMKHFGMTEPGKKCGILGLGGVGHMGVKIAKAFGLHVTVISSSDKKKEEALEVLHADAYLVSRDAEKMMEAAESLDYILDTIPVSHPLEPYLALLKTNGK

SEQ ID NO: 465 - protein, 246 aa, Pseudotsuga menziesii
YTYILRNIGPEGVLLRVIYCGICHSDLVQMRNEMGMSNYPMVPGHEVVGIVTEIGSEVKKFKVGERVGVGCIVGSCRSCGNCNQSMEQYCSKRIWTYNDVNHDGTTTQGGFASTMVVDQMFVVRIPENLPREQAAPLLCAGVTVFSPMKHFGMTEPGKKCGILGLGGVGHMGVKIAKAFGLHVTVISSSDKKKEEALEALHADAYLVSRDAEKMMEAAESLDYILDTIPVSHPLEPYLALLKTNGK

SEQ ID NO: 466 - protein, 246 aa, Larix gmelinii
YTYTLRNKGPEDVIVRVIYCGICHSDLVQMRNEMGMSHYPMVPGHEVVGIVTEVGSEVKKFKVGEHVGVGCIVGSCRSCGNCNQSMEQYCSKRIWTYNDVNHDGTPTQGGFASTMVVDQMFVVRIPENLPLEQAAPLLCAGATVFSPMKHFGMTEPGKKCGILGLGGVGHMGVKIAKAFGLHVTVISSSDRKKEEALEVLHADAYLVSKDAEKMMEAAESLDYILDTIPVSHPLEPYLALLKTNGK

SEQ ID NO: 467 - protein, 119 aa, Lepidium sativum
PGSFNKILITYETGTYNGQWSAVGRTAVTTTLAGCTAALTTLFGKRLLSGHWNVTDVCNGLLGGFAAITGGCSVVEPWAAIICGFVGALVLLGCNKLAEKLKYDDPLEAAQLHGGCGAW

SEQ ID NO: 468 - protein, 246 aa, Larix gmelinii
YTYTLRNKGPEDVIVRVIYCGICHSDLVQMRNEMGMSHYPMVPGHEVVGIVTEVGSEVKKFKVGEHVGVGCIVGSCRSCGNCNQSMEQYCSKRIWTYNDVNHDGTPTQGGFASTMVVDQLFVVRIPENLPLEQAAPLLCAGVTVFSPMKHFGMTEPGKKCGILGLGGVGHMGVKIAKAFGLHVTVISSSDRKKEEALEVLHADAYLVSKDAEKMMEAAESLDYILDTIPVSHPLEPYLALLKTNGK

SEQ ID NO: 469 - protein, 384 aa, Xanthomonas campestris pv. campestris str. ATCC 33913
MNDTVIPGFKPKKSVALSGTAAGNTALCTVGRSGNDLHYRGYDILDLATSSEFEEIAYLLVHGKLPNSGELRGYKAKLRSLRGVPAAVKTALEQLPPSAHPMDVMRTGVSVLGCLQPEKDDHNHPGARDIADKLMASLGSMLLYWYHYSHNGKRIEVETDDDSIGGHFLHLLHGFAPKESWVRAMHTSLILYAEHEFNASTFASRVIAGTGSDMYSAIAGGIGALRGPKHGGANEVAFEVQKRYDTPDEAEADIKARVERKEVVIGFGHPVYTVSDPRNKVIKDVARELSDEQGSRKMYDIAERLETVMWDIKKMFPNLDWFSAVSYHMMGVPTAMFTPLFVLARTAGWSAHIIEQRVDGKIIRPSANYTGPEDQAFVPLDQRA

SEQ ID NO: 470 - protein, 287 aa, Triticum aestivum
MDGSIMGMGGNKVNYGGLYNIQGWGAPYFTVNMEGNLCVKADGQETKAGQEMDVLHVIQAAKQKRKDIQFPMILRFPNVLKHRLDALHAAFHTAISRARYTNTYQGVFPVKVNQNRAIVHDLVCFGHAYSYGLEAGSKPELLIAMSCLTKEANSRAFLVCNGYKDAEYVRLALSARAIGLNAIMVLDMEEELDIIIHQSSKLGVEPVIGVRAKLLTKIPGHYGSTAGKHGKFGLPADRIYEVAKKLKGLNKLHWLKLLHFHVGSMIPTTELVAKAATEAADIYCTLV

SEQ ID NO: 471 - protein, 119 aa, Capsella bursa-pastoris
PGSFNKILVPYETGTYNGQWSAVGRTAVTTTLAGCTAALTTLFGKRLLSGHWNVTDVCNGLLGGFAAITGGCSVVEPWAAIICGFVAALVLLGCNKLAEKLRYDDPLEAAQLHGGCGAW

SEQ ID NO: 472 - protein, 1341 aa, Gibberella zeae PH-1
MTESSPRAVRFQGSEDDGRPDKVRGHRLETPIESNGDPHATERHDELGNLIGYGATGHTGSLTSLAPGTVINGVSKAQRGPNTGDDGTAYTPNGSWPQRPLGPARTPSNTYNPATSRKPAHPPATPSFTESIRSSSKTRPRNESRFRAQERAYVQKLRQDYSGGYFTSYSNLNGNDSDSEGETPSSEGPYDDRFDQETIMFYGNDTLQPTDEDLKDPENRERLEWHGMLEAVLTGDVVRQEKKRLIGSADQQAGKSAHKTELWLGIRSKVCGRHIPVQRRMLEESRSTLDRTLDEIINFQIKGESEAGKPPYEQVKDMVAKIQMCENLYPSWAALATEHKAADSATFKESHDAIISWYNTNEMINTELNILKKWVGNEELDFTRTKQRSPAVNGINNDETSFLDRLMKEDGLQSLYNDDNGNLEKGMLAPISTVISKAKDTLIRNSEAFRKRHLPPYLEELLTLISFPSRLIEEITRLRLAYARRVKESAQQNPLMQDQMISQFQLLLKFAIRIKIECTSIANPEPGWDLPPCIDESFDQVVLEALKYYFKMLNWKLSGNKNTFKEAELLFQEWDFANEIGSHLQRGHIEVAEQFSSLTFKALHRLSQTFEKELQAKPKETATEMSKRYKACLDSVRVRQRMLQRFTRMLNDNYEHASDYSISFPPETMQKFYDQLVASGHFQVDTRLLEQDNIYVIASPELRERLEDIQAMMAITSKDQFPDELGEQYLLILRPEDPLNWFGETIEVPLRDLNIDLKRGHIRLCASSPQTLHNARRAFIENVDMHVDLVQEARSNIQKVNSRLTEIRRVAYKLSNNFMDSVEIIRKQARGKDCQELIQTCFVFATEFGQRSLLYMDSNRRQMNNLKLTKLALDWVSFICDDCVASDRKTFRWAVLALELAMGMTRGRHILALGEGEYAKLRSKVAGCMSLLISHFDVMGARSNLAAQAEKERIEALVGQFRKLDKNRMMNDEEASRCVTEQRMSELERVDEYRCEKIAERQGVGRVLEGNNEVDRSLAYLSSSATNVTMRWQQGQFVGGGTFGNVYAAMNLDTGHLMAVKEIRLQDPKLIPQVAEQIREEMGVLEVLDHPNVVSYYGIEVHRDRVYIFMEFCSGGSLANLLEHGRIEDEQVIMVYALQLLEGLVYLHESGIAHRDIKPENILLDHNGIIKYVDFGAAKWIARQGRTLAGDVQPSLPNRSMTGTPMYMSPEVIKGENPGKPGAVDIWSLGCVILEMATGRRPWAQLDNEWAIMYNIAQGNPPQLPPSDQLSPQGLDFLKRCFTRDPRNRSSAVELLQHDWITSIRSQVVEPATPSDTSSSAQSTPTVGSISSKLGGSDGFY

SEQ ID NO: 473 - protein, 235 aa, Mesorhizobium sp. BNC1
MTDAKTLKIEAARVALGYVEDGMKLGIGTGSTAEEFVRLLATRVSSGMKIVGVPTSERTAALCRELSVPLSTLDETPELDLTVDGADEVGPDLTLIKGGGGALLREKIVAAASRRMIVIADESKVVDVLGTFPLPIEVNPFGLRATRIAIEAAAARLGLAGEMRTRMAGQEPFVTDGGHFIIDASFGRIQAPRALAEALNAIPGVVEHGLFIGLAGAAIIAGRNGVRTLDAGSRI

SEQ ID NO: 474 - protein, 325 aa, Zea mays
GRAEIPKAQTKSKRKRGQSRKGGGTRHRQPLLTGPHSHTNQPTSSACRFSCCGRSQLQVLEEDIRFHYCACGGSEEPVAEASIFGGRNKFPAWLGGPRRTDGMHRLLPGVLQRFSTAAAVEEPITPSVHVNYTKLLINGNFVDSASGKTFPTLDPRTGEVIAHVAEGDAEDINRAVAAARKAFDEGPWPKMTAYEKSRILLRFADLIEKHNDELAALETWDNGKPYEQAAQIEVPMVARLMRYYAGWADKIHGLIVPADGPHHVQILHEPIGVAGQIIPWNFPLLMFAWKVGPALACGNTLVLKTAEQTPLSALYISKLLHEAGL

SEQ ID NO: 475 - protein, 255 aa, Zea mays
  misc_feature (13)..(13): Xaa can be any naturally occurring amino acid
  misc_feature (15)..(15): Xaa can be any naturally occurring amino acid
  misc_feature (23)..(23): Xaa can be any naturally occurring amino acid
GRARHPVPAARIXRXWKHMWILXKIALAVPVLVFRSFDLVLQDLIDRTFEITLHSGAKTLNSFHLKQLKQCVKRYSSFDFLTEVVSKVPDLGGADSCGDERGLPRRRKSNGSDPENDESRSSKMAIRNANISPRGRGRGRGRGRGRPPTKRKEVGYVQFEDESSMFAEQGEPLPGEETVQEINGNETMPQSTQPPVEAPPTALAQATTSSKAEEANSDHQSDWPMPDAIGSIGVVPSGFGHLTVQVEDEDYDNED

SEQ ID NO: 476 - protein, 127 aa, Neurospora crassa
MIQLKTMLNCIDNSGAALVECAMVVGQKRHASIVVVVQKQRGADSAGMAASSAATKVKRGDIRHAVVVRTKQKVQRRDGSVVRFDDNACVLINKAGDPIGSRINGVVGQELRKKKWSKILSMAPMQA

SEQ ID NO: 477 - protein, 494 aa, Bacillus cereus ATCC 14579
MLKTNIELKPKVEAFLNEEIKMFINGEFVAAIGGKTFETYNPATEDVLAVVCEAQEEDIDAAVKAARSAFESGPWAEMTTAERAHLIYKLADLIEEHREELAQLEALDNGKPYQVALDDDISATVENYRYYAGWATKIIGQTIPISKDYLNYTRHEPVGVVGQIIPWNFPLVMSSWKMGAALATGCTIVLKPAEQTPLSLLYTAKLFKEAGFPNGVVNFVPGFGPEAGAAIVNHHDIDKVAFTGSTVTGKYIMRQSAEMIKHVTLELGGKSPNIILEDADLEEAINGAFQGIMYNHGQNCSAGSRVFVHRKHYETVVDALVKMANNVKLGAGMEKGTEMGPLVSKKQQERVLHYIEQGKKEGATVAAGGERALEKGYFVKPTVFTDVTDDMTIVKEEIFGPVVVVLPFDSTEEVIERANNSSYGLAAGVWTQNIKTGHQVANKLKAGTVWINDYNLENAAAPFGGYKQSGIGRELGSYALDNYTEVKSVWVNIK

SEQ ID NO: 478 - protein, 201 aa, Triticum aestivum
MSIAPESEFVIPNQSTINLGVQLKEKDDLQLVEIPVPKPEKDHVQVQLKCVGICGSDIHLWKYGEIGIFPVTQPQLLGHEGAGIVTAVGENVTSLRVGDRVAIEAGIPCSFCDQCMSGRYHLCPDVIFKSTPPYDGILAKYITHPARWLHKIPASISFEEGALLEPLSVAIAAVDRVRAKFGKSLLITGCGPVGLLILAGA

SEQ ID NO: 479 - protein, 488 aa, Agrobacterium tumefaciens
MKNSVQLITYVDRLSGGGFPELRALLDGRLQGLFGGVHALPFFNPIDGADAGFDPTDHTIVDPRLGSWDDVRTLAGSVEIMADLIVNHVSAQSSWFQDFIAKGPDSEFADMFMTFGKVFPRGASEQDLLNIYRPRPGLPFSKATLGDGSQRMLWTTFTPQQIDIDVHSAHGALYLETILDRFAEANVTAIRLDAAGYAIKKAGTSCFMIDETYAFLAKLAEKARDRGMEVLVEIHSYYRDQIEIARKVDRVYDFALPPLILHSLFTGDATALARWLEISPRNAITVLDTHDGIGVIDVGAHGHGRAGLLEPQAIDHLVEEIHRRSEGQSRLATGAAASNLDLYQVNCTYYDALGRSDNDYLIARAIQFFAPGIPQVYYVGLLGGLNDMELLRKTGVGRDINRRFFEDREIDLALESPLVKRLSDLIRFRNTHPAFNGSFEVATDDTGSLVLSWNFDAEFARLVVSFSQGKATITASGCYDFTFSGDVA

SEQ ID NO: 480 - protein, 300 aa, Zea mays
  misc_feature (138)..(138): Xaa can be any naturally occurring amino acid
SARVSLDDGSLYVDVSGGALWEDVLKRCVSEFRLAPRSWTDYLGLTVGGTLSNAGVSGQAFRYGPQTANVTELEVVSGKGETLVCSESQNSELFFATLGGLGQFGIITRARVPVQQAPDMVRWIRVVYTEFGDFTRDXEWLVTLREGDGFDYVEGFVFVNSDDPCNGWTTVPVGPNQYFDPVRIPSTAGPVLYCLELALHYRNQDHPSAVDMEVDRLLGRLRFVEGLKFSVDVTYMEFLLRVKRVEEDAKANGIWDAPHPWLNMFVSKSNIAEFDREVFKKILKHGVGGPILVYPLLRSK

SEQ ID NO: 481 - protein, 175 aa, Triticum aestivum
MAPAVMASSATTVAPFQGLKSTAGLPVSRRSGSAGLSSVSNGGRIRCMQVWPIEGIKKFETLSYLPPLSTEALLKQVDYLIRSKWVPCLEFSKVGFVFREHNSSPGYYDGRYWTMWKLPMFGCTDATQVLNEVEEVKKEYPDAYVRVIGFDNMRQVQCVSFIAFRPPGCEESGKA

SEQ ID NO: 482 - protein, 158 aa, Staphylococcus epidermidis ATCC 12228
MSIYDIAVENYDGSTYLLKRYKGKVLIIVNTATNCTLNDQFNKLEMLYKKYHKYGLEILSFPCNDFNNQEPELIKDIYRVYKYKFGITFPIHAKINVNGEHEHPLYTLLKCKQPGLFGSQIKWNFTKFVVDQQGNIVKRFLPCDNPNQMEKLIRQLLK

SEQ ID NO: 483 - protein, 395 aa, Corynebacterium efficiens YS-314
MNPMTPSTPGNPLQLNREEIFAAHEGGKLSITSARPLADMHDLSLAYTPGVATVCEAIAADPAVARTHTGRGRTVAIISDGTAVLGLGDIGPEAALPVMEGKAQLFSSFAGLNAIPIVLDVHGVDELVDTIAAMAPSFGAINLEDISAPRCFEVERQLIERLDIPVMHDDQHGTAVVILAALRNALRLLDRQIGEARIVVSGAGAAGVAAVEMLRGAGARDVVVLDSRGIIHAGREDLNPVKQALAATTNPRGVTGGMAEALTGADVYIGVSGGHVAEEALQLMADQPILFSLANPSPEIDPELAGRYGAIVATGRSDLPNQINNVLAFPGIFHGALAARARSITPGMKLAASQAIADIAAETLDVGHVVPSPLDPRVAPAVSAAVQAAAEAEGA

SEQ ID NO: 484 - protein, 363 aa, Hypocrea jecorina
MATQTINKDAISNLSFVLNKPGDVTFEERPKPTITDPNDVLVAVNYTGICGSDVHYWVHGAIGHFVVKDPMVLGHESAGTVVEVGPAVKSLKPGDRVALEPGYPCRRCSFCRAGKYNLCPDMVFAATPPYHGTLTGLWAAPADFCYKLPDGVSLQEGALIEPLAVAVHIVKQARVQPGQSVVVMGAGPVGLLCAAVAKAYGASTIVSVDIVQSKLDFARGFCSTHTYVSQRISAEDNAKAIKELAGLPGGADVVIDASGAEPSIQTSIHVVRMGGTYVQGGMGKSDITFPIMAMCLKEVTVRGSFRYGAGDYELAVELVRTGRVDVKKLITGTVSFKQAEEAFQKVKSGEAIKILIAGPNEKV

SEQ ID NO: 485 - protein, 473 aa, Bacillus megaterium
GAMTIKEMPQPKTFGELKNLPLLNTDKPVQALMKIADELGEIFKFEAPGRVTRYLSSQRLIKEACDESRFDKNLSQALKFVRDFAGDGLFTSWTHEKNWKKAHNILLPSFSQQAMKGYHAMMVDIAVQLVQKWERLNADEHIEVPEDMTRLTLDTIGLCGFNYRFNSFYRDQPHPFITSMVRALDEAMNKLQRANPDDPAYDENKRQFQEDIKVMNDLVDKIIADRKASGEQSDDLLTHMLNGKDPETGEPLDDENIRYQIITFLIAGHETTSGLLSFALYFLVKNPHVLQKAAEEAARVLVDPVPSYKQVKQLKYVGMVLNEALRLWPTAPAFSLYAKEDTVLGGEYPLEKGDELMVLIPQLHRDKTIWGDDVEEFRPERFENPSAIPQHAFKPFGNGQRACIGQQFALHEATLVLGMMLKHFDFEDHTNYELDIKETLTLKPEGFVVKAKSKKIPLGGIPSPSTEQSAKKV

SEQ ID NO: 486 - protein, 304 aa, Shewanella oneidensis MR-1
MSERYLENGIRQLVSEFIAAGCPSVREQSLEERRQGYIASTVLAGEPEAVFEVKSVSLEGIELTLFKPSADNNLPVVIYYHGGCFVSGGIATHNQQLRKIANDSGALVVAVSYRLAPEHVYPAAHDDAFNAANLVQQHCHQWGGDNTNITLMGDSAGGHLALVTCLRLKAKGEWLPKKQVLIYPMLDATAKSQSYIDNGDKYIITRDTLLTGFDMYLDWHPRTDVEASPLRSHDLAGLPETHIITAEFDPLLDEGEQLFRHLLAAGVDAHCRRYLGVIHGFFQLAGVSQSARDAMAQVTHIIRA

SEQ ID NO: 487 - protein, 192 aa, Blumeria graminis
MAEIRRKLVIVGDGACGKTCLLIVFSKGTFPEVYVPTVFENYVADVEVDGKHVELALWDTAGQEDYDRLRPLSYPDSHVILICFAVDSPDSLDNVQEKWISEVLHFCCGLPIILVGCKKDLRHEQKTLEELHKTSQKPVTPEQGEEVRKKIGAYKYLECSAKTNEGVREVFEHATRAALLTKKKKEKRCIIL

SEQ ID NO: 488 - protein, 246 aa, Larix gmelinii
YTYTLRNKGPEDVIVRVIYCGICHSDLVQMRNEMGMSHYPMVPGHEVVGIVTEVGSEVKKFKVGEHVGVGCIVGSCRSCGNCNQSMEQYCSKRIWTYNDVNHDGTPTQGGFASTMVVDQMFVVRIPENLPLEQAAPLLCAGVTVFSPMKHFGMTEPGKKCGILGLGGVGHMGVKIAKAFGLHVTVISSSDRKKEEALEVLHADAYLVSKDAEKMMEAAESLDYILDTIPVSHPLEPYLALLKTNGK

SEQ ID NO: 489 - protein, 207 aa, Triticum aestivum
  misc_feature (22)..(23): Xaa can be any naturally occurring amino acid
LKLFEVMASKSKIYFVLEYAKXXAKLFNKITKGKLSEDAARKYFHQLISAVDYCHSRGVYHRDLKPENLLLDENENLKVSDFGLSALAESTRQDGLLHTTCGTPAYVAPEVLSRRGYDGAKADIWSCGVILFVLVAGFLPFHDTNLIEMYRKISRAEYRCPRPFSVELRDLLYKILDPDPSTRASVSRIKRSAWYRKPGRCKWTGDL

SEQ ID NO: 490 - protein, 321 aa, Bartonella grahamii
TYIDGDKGILLYRGYPIDQLAEKGDFLESCYLLLYGELPTQQEKNEFDRCIMQHTMVHEQFARFFHGFRRDSHPMAVMVACLGAMSAFYHDSIDITDPHQRMIASVRLISKVPTLAAMAYKYSIGQAFVYPRNDLSYAANFLRMCFAVPCEEYKTNPVLARAMDQIFILHADHEQNASTSTVRLAGSSGANPFACIAAGVACLWGPAHGGANEACLKMLQEIGSIERIPEFIARAKDKNDPFRLMGFGHRVYKNYDPRAKIMQKTCHEVLKELNIQDDPLLDIAIELEKIALSDEYFIEKKLYPNVDFYSGITLKALGFPT

SEQ ID NO: 491 - protein, 194 aa, Bartonella sp. Mf49
DGNEGILLYRGYPIDQLAEKGDFLESCYLLLYGELPTKQEKNDFDRCIMQHTMVHEQFARFFHGFRRDSHPMAVMVACLGAMSAFYHDSIDITDPQQRMIASVRLISKVPTLAAMAYKYSIGQAFVYPRNDLSYAANFLRMCFSVPCEEYKNNPVLTRAMDRIFILHADHEQNASTSTVRLAGSSGANPFACIA

SEQ ID NO: 492 - protein, 307 aa, Bartonella sp. 16/40
YIDGDKGILLYRGYPIDQLAKKGDFLESCYLLLYGELPTKQEKNDFDRCIMQHTMVHEQFARFFHGFRRDSHPMAVMVACLGAMSAFYHDSIDITDPQQRMIASVRLISKVPTLAAMAYKYSIGQAFVYPHNDLSYTENFLRMCFCVPCEEYKINPVLARAMDRIFILHADHEQNASTSTVRLAGSSGANPFACIAAGVACLWGPAHGGANEACLKMLQEIGSVEQIPKFIARAKDKNDPFRLMGFGHRVYKNYDPRAKIMQQTCHEVLKELNIQDDPLLDIAIELEKIALNDEYFVEKKLYPNVDF

SEQ ID NO: 493 - protein, 318 aa, Ralstonia eutropha JMP134
MPLDPQARAMLDAMAAMPSPDFTTLRAADYRAAVAAMPAFAPGDSVAAQQDLTIDGAAGPLPARLYRPDDSAGPPLIVYFHGGGFVLCGLDSHDNICRSLARRSGALVLSVDYRLAPEARFPAAADDAVAAVRWAAGHAAELGVDPARLAVAGDSAGGNLAAVVCQQLRGSGIALKHQLLLYPYLDCTDAAADSASYRACAEGYFLSARELDWCRAQYLANPDAAADVRASPLHQRDLQGLPAATIITAEFDPLRDQGEAYGEALRGAGGAATVRRWPGQFHGFMSMQGVLDAASHALDAAAASLRQAFAASGTQEAA

SEQ ID NO: 494 - protein, 449 aa, Xanthomonas axonopodis pv. citri str. 306
MSRTVIVNARLVNEGKEFDADLLIEGGRIAKIDSKIVPAPGDTVVDAAGRWVLPGMIDDQVHFREPGLTHKGDIATESGAAVAGGLTSFMDMPNTNPPTLDAAALQAKYDAAAGRAWANYGFYMGASNDNLAHIQSLDPKTAPGIKVFMGASTGNMLVDNPETLDAIFRDAPTPIITHCEDTPTIDATMAQYKEKYGDALTPEMHPDIRSRQACLKSSQLAVSLARKHNTRLHVLHISTADELSLFEAGPLVDADGKLRKRITAETCIHFLRFDRSDYARLGNLIKCNPAIKDAEDRLALIDALAEDVIDVLATDHAPHTWEEKQKPYAQAPSGLPLVQYALVAALELVHEGKLPITRIVQKFAHAPAQLFDVEERGFLREGYFADLVMIDNTPFTVKREQVLSKCGWSPFEGTTFRSRIAATWVNGQQVWDGEQLVGSAAGQRLTFDR

SEQ ID NO: 495 - protein, 173 aa, Zea mays
PNVDPELALALRLSMEEERARQEAIAKKAAEDTSNTENINASSSNSDSVMAEAELASNAAAGDKQEQPKDDDDLLQQALAMSMEGGASGSAAVTDSAMAEAALQMSVQDANMSSDTDMSKVFEDRTFVSSILNSLPGVDPNDPSVKDLLASLHSQGEQEKKEDKSDKTEDEKN

SEQ ID NO: 496 - protein, 187 aa, Zea mays
  misc_feature (30)..(30): Xaa can be any naturally occurring amino acid
  misc_feature (33)..(34): Xaa can be any naturally occurring amino acid
MIEFSVVLLFGYWEICLVAVVYCRPAVGHXRVXXDFFRMVVESRYQRVAEGRSRLARLILVQALHLVAGGLLLLLSLSKGAAVNKFAVLSMAAGFLAIVVGELGRMRTMSVLLRLYTSLSSIAVAFSVTCIIRSELFLKVMKQNTEAITSYEMLDAVRVALGILLQMVVIATTTRLLQNMSPPKRAS

SEQ ID NO: 497 - protein, 294 aa, Saccharomyces cerevisiae
TTPLVHVASVEKGRSYEDFQKVYNAIALKLREDDEYDNYIGYGPVLVRLAWHTSGTWDKHDNTGGSYGGTYRFKKEFNDPSNAGLQNGFKFLEPIHKEFPWISSGDLFSLGGVTAVQEMQGPKIPWRAGRVDTPEDTTPDNGRLPDADKDADYVRTFFQRLNMNDREVVALMGAHALGKTHLKNSGYEGPWGAANNCFTNEFYLNLLNEDWKLEKNDANNEQWDSKSGYMMLPTDYSLIQDPKYLSIVKEYANDQDKFFKDFSKAFEKLLENGITFPKDAPSPFIFKTLEEQGL

SEQ ID NO: 498 - protein, 496 aa, Oryza sativa (japonica cultivar-group)
MHNIRQYQLPLQKYMAMMDLQEGNERLFYKLLIDNVEELLPVVYTPTVGEACQKYGSIFSRPQGLYISLKEKGKILEVLKNWPERSIQVIVVTDGERILGLGDLGCQGMGIPVGKLALYTALGGVRPSACLPITLDVGTNNEALLNDEFYIGLRQKRATAQEYADFLHEFMTAVKQNYGEKVLIQFEDFANHNAFELLAKYGTTHLVFNDDIQGTASVVLSGLVAALKLVGGSLSEHSYLFLGAGEAGTGIAELIALEISRQTKAPIEECRKKIWLVDSKGLIVSSRKETLQHFKKPWAHEHEPVGNLLDAVKTIKPTVLIGTSGKGQTFTQEVVEAISSFNERPVIFALSNPTSQSECTAEQAYTWSKGRAVFASGSPFDPVEYDGKIYVPGQANNAYIFPGFGLGVVMSGAIRVHDDMLLAASEALAQQVTQENFDKGLTYPPFSNIRKISAHIAANVAAKAYELGLASRRPRPKDLVKYAESCMYSPLYRNYR

SEQ ID NO: 499 - protein, 388 aa, Oryza sativa (japonica cultivar-group)
MGIPVGKLALYTALGGVRPSACLPITLDVGTNNEALLNDEFYIGLRQKRATAQEYADFLHEFMTAVKQNYGEKVLIQFEDFANHNAFELLAKYGTTHLVFNDDIQGTASVVLSGLVAALKLVGGSLSEHSYLFLGAGEAGTGIAELIALEISRQTKAPIEECRKKIWLVDSKGLIVSSRKETLQHFKKPWAHEHEPVGNLLDAVKTIKPTVLIGTSGKGQTFTQEVVEAISSFNERPVIFALSNPTSQSECTAEQAYTWSKGRAVFASGSPFDPVEYDGKIYVPGQANNAYIFPGFGLGVVMSGAIRVHDDMLLAASEALAQQVTQENFDKGLTYPPFSNIRKISAHIAANVAAKAYELGLASRRPRPKDLVKYAESCMYSPLYRNYR

SEQ ID NO: 500 - protein, 424 aa, Leptospira interrogans serovar Copenhageni str. Fiocruz L1-130
MIKKISGRIVTHEKDFLGTVEWDSKTGLILTVLEQKESIPILNSQHQENEIQFNSLETVIFPGFGDIHIHAREDESGKHTYKEDFVSASAAAVNGGVIHVADMPNNPIPPIDENSYSKKRKLADRSNIHITLYAGIGPDTKPLKKSVPYKVFMGPSIGELFFHNNQTLEDTISSYVGENVSFHCEDPEILEKHQNETFHEDRRPAEAETTATDFALYLIEKYNLRGKLCHYSTGEGLNKIKFAKQKGVKVTCEVTPTHLFFDRSMLTPENRHWFQMNPPLRSKEDRERMLEGVKQGWIDYLATDHAPHSIEEKRKGTSGISQLDTYSLFVTWLVLKAGVELKTVARICAKNPGDFVNEYLPEKFGKGFGRIEPGYSANFTVLNLKKPKKFLKEEIKSKSGWSPFENFEFPGSIEAVFFLGKQMK

SEQ ID NO: 501 - protein, 165 aa, Zea mays
MDGRMFGLETPLMVALQHLLDVPDGDAGAGGDKASGAAAGGGPTRTYVRDARAMAATPADVKELPGAYAFVVDMPGLGTGDIRVQVEDERVLVISGERRREEREDAKYLRMERRMGKFMRKFVLPDNADMDKISAVCRDGVLTVTVEKLPPPEPKKPKTIEVKVA

SEQ ID NO: 502 - protein, 185 aa, Thermobifida fusca
MFSLARHRRSTAGTAAAVLLALTATGCGVLIGPSNGEVSDDITVTSPMLREGEKIPDRYTCAGEGMSPPLRWSGLPAETESLALVVDTVYESGGAAVHWVVYGLDPDNPELPEGTVPIPAQQGMNSFDTASYQPLCPEKGNEHEFRFTVYALSERVELGEAAPLDVALGAIATRTLARGRLTSVP

SEQ ID NO: 503 - protein, 123 aa, halophilic eubacterium NRCC 41227
MALTQEDIINAVAEMSVMEVAELVSAMEEKFGVSAAAAVVAGPGGGEAEEAEEQTEFDLVLTSAGEKKVNVIKVVREITGLGLKEAKAAVDGAPATLKEGMSKEDGDEAKTKLEEAGASVELK

SEQ ID NO: 504 - protein, 481 aa, Brucella suis 1330
MPAIGFIIDGKESGGASGKTFERKDPITGKVATVAAAASLADVDTVAEAAAKAFESWSETGPNARRALLNKAADLMDSRTAEFTRLMLEETGATAPWAGFNVHLGANILREAAALTTQITGEIIPSDKPGIMSMAVRQPVGVVLGMAPWNAPVILGVRAVAAALACGNTVILRSSETCPGVHHLIIKILNDAGFPAGVANVISNAPDDAPEIVAALIAHPAIRRINFTGSTQVGRIIARRAAGHLKPVLLELGGKAPFIVLEDADLDQAVDAAAFGAFMNQGQICMSTERFIVHEKVADAFAEKLAAKARSLPAGDPRGNVVLGSLVDLKSAQRMDALIADAVAKGGRVLAGGKRDGAVVEATIIDGVTPQMDIYTQESFGPVKPIIRVKSAEEAIRVANDTEYGLSSAIFSQNVKRALALSRKLETGICHINGPTVADEAQVPFGGVKSSDYGRFGGKAAINEFTELRWITIEGPQHYPF

SEQ ID NO: 505 - protein, 485 aa, Neurospora crassa
MGLRPPKIRDSGLFGIKFIKTNVKMAAEHKNLQFWQQMFRSIGGYTGEVRLVGHRIIFTSEPENMKAILATQFEDYGKGEGFHQEWKDFLGDSIFTTDGDLWHASRQLIRPQFIKNRVSDLQCFENHMQMLFRTIANGGALNGEDQMVDMEAGNGKPVDISDLFFRYTLDAATDFLLGKDIKSLSTPVQPFADAFQEVQRVQIVIARAGPLNRFVPKKTFWEGLKVIDETINFYIDRALRLDEEELASKSKGDEGYTFLHALAGFTKNRQVLHDQLMAVLLAGRDTTACTLSWAIYELARHPEAVAKLRAEILSVVGPDRAPTYDDLKSMKYLQNVMNETLRLVRMALKDTTLPRGGGPDGSQPIVILKDTPVGYSPLAMQRRPDLYPPVSEKFPDVEMFSPDRWFHWQPKPWQYIPFNGGPRICIGQQFALTEMGYVLTRLFQRYDRVVSYMDEIDGGKPRMKTDIVLMPGDGVKVAFFEAKRE

SEQ ID NO: 506 - protein, 190 aa, Triticum aestivum
  misc_feature (72)..(72): Xaa can be any naturally occurring amino acid
MAPTVMASSATSVAPFQGLKSTAGLPVSRRSSSAGLSSVSNGGRIRCMQVWPIEGIKKFETLSYLPPLSTEXLLKQVDYLIRSKWVPCLEFSKVGFVFREHNSSPGYYDGRYWTMWKLPMFGCTDATQVLNEVEEVKKEYPDAYVRVIGFDNLRQVQCVSFIAFRPPGCEESGQGLNYELKQWPMYEGLL

SEQ ID NO: 507 - protein, 433 aa, Thermobifida fusca
MTRTLWHNWADTCRITPTRIATPTSTAEVVAEVRAAAAAGSRIRMVGSGHSFTDIAATDGTLLSPAALASVRSVDLAAGRATVEAGMRLCDLNETLAAHGAALTNMGDIAVQTLAGATQTGTHGTGRASASLAAQIQQLELVLADGSVVTCSRDEDPDLFDAARAGLGAFGVVTAITMAVEPAFLLHARETPMPLGEVLERLEELRTTNDHFEFFWFPHTERTITKRNNRVPGPARPLSAFRAWLDDEFLSNSVFEVVNRMARRLPRLIPAINQISARALTAREYVDVSYRVFTSPRRVKFVEMEYAIPVEHLPDVLHDMRAVFASSRHRISFPVEVRFAPADDVWLSPGYGRESAYVAVHVYQGCPWQEYFADLEAIFTAAAGRPHWGKMHTRTLSYLDKVYPRLRDALEVRERVDPHRRFTNAYLDRVWGE

SEQ ID NO: 508 - protein, 228 aa, Weissella paramesenteroides
MLKATGISRENLFVTTKIQVEFKDYQTAKKSIDESLQRLNLNYLDLLLIHSPEPWVEFHNKENHYFEENIEVWRAMEEAVNNGKVRSIGVSNFKKADLNNILEHSTIKPVVNQLLIHIGNTDFGLLEQAQQNNVLVEAYSPVAHGEILQNPEIKQMADKYQISIPQLAIRYCLELGTLPLPKSQTLSHVANNADVDFEISKQDLEELKKLPQINSYGDSSSFPVFSGK

SEQ ID NO: 509 - protein, 732 aa, Zea mays
MDLASFITSVLTSFLIFVALVLLFTWLSRRPGNAPVYYPNLLLRGLDPWAGRGRGTRSPVGWLRDAISASEPDVVAAGGVDAAVYLVFLSSVLSILVYSGIVLLPVLLPVAATGGALSTIPIPTNKSAQSAQNFSSIERLGMGNVAEKSMRLWAFLLSVYWVSFVTYFVLWKSYKHVSNLRATARSAPDVKPEEFAVLVRDIPRPSPDETIKDSVDSYFRALHPNTFYRSMVVTDHTKADKIYQEIEGHKQKIARAEVVYANSKTESNTEGTRPTHRTGFLGLIGTKVDTIEYCSEQIKELLPKLEAEQKTTLHEKQQRAAIVVFNSRSAAAFASQTLHAQVYDKWTVMEAPEPRQIIWSNLPRKLYDRQIRQCVVYCIVFLIVVFYIVPLTAIAAVTTLENLEAKLPFLKPVVEQPAIKTVLEAYLPQIALIVFLALLPTLLMFLSKQEGIPSQGHAVRAASGKYFYFIVFNVFLCYTLGSTLFKSLTTIINHPAEIVNMLAKSLPGSATFFLTFVALKFLVGYGLELSRLVPLIIFHLKRKYLCKTEEEVRAAWAPVDLGYNTRVPNDMLIATVVLCYSVIAPLIIPFGVAYFALGWLIARNQILRVYVPSYESYGRMWPHMHTRIIAALMVYQTTMIGFISLKKFAYASVLVPLLPASIIFAYVCHMRFYPAFAKTPLEVVVRHDLKETPNMEAIYTAYIPPCLKPDKLEDLDAFEDAQSRATSRVPSI

SEQ ID NO: 510 - protein, 152 aa, Pennisetum glaucum
MSLVSRSSVFDPFSMDLWDPFDSMFRSIVQSAGSPDSDTAAFAAARIDWKETPEAHVFKADLPGVKKEEVKVEVEDGNVLVISGQRSKEKEDKNDRWHRVERSSGQFMRRFRLPGNAKVDQVKAGLENGVLTVTVPKAEEKKPEVKAIEISG

SEQ ID NO: 511 - protein, 279 aa, Saccharomyces cerevisiae
MSIVSLLGIKVLNNPAKFTDPYEFEITFECLESLKHDLEWKLTYVGSSRSLDHDQELDSILVGPVPVGVNKFVFSADPPSAELIPASELVSVTVILLSCSYDGREFVRVGYYVNNEYDEEELRENPPAKVQVDHIVRNILAEKPRVTRFNIVWDNENEGDLYPPEQPGVDDEEEEDDEEEDDDEDDEDDEDDDQEDGEGEAEEAAEEEEEEEEKTEDNETNLEEEEEDIENSDGDEEEGEEEVGSVDKNEDGNDKKRRKIEGGSTDIESTPKDAARSTN

SEQ ID NO: 512 - protein, 285 aa, Xylella fastidiosa Temecula1
MTTNDTWFTEHFQTTGSAIGFRVTGKLDEVQSPFQKIEIYNSTDWGKLMVIDGALMLTSRDNFLYHEMISHPALFTHTAPKCVVIIGGGDCGTLREVLKHPDIEQVTQCDIDEQVTRMAEKHFPELCTSNNDPRATLLFSDGVAYMADCPTNSVDVIIVDSTDPVGPAKGLFNRTFYESCFRALKNDGLLIQQSESPLALLELIKEMRHEMSKAGFKAFKTLPFPQPCYPTGWWSVTLSSKQPNANFAFRQTDAQTKPFDTLYYNAHLHHGVLVPPPFIAHALGE

SEQ ID NO: 513 - protein, 432 aa, Picrophilus torridus DSM 9790
MSFDVSWLNTGNNAWMLTAATLVGLQSIPGLALYYAGMTKRKYMVNAMMMALYAFSAVLVVWVIAGYSFGFGTVPLLKIDGYYIFSMPVPVGSASFIAGQAIVGPERIALSIPNSTVIFFQFVFAAITPVLLMGGILERMNFKAWMVFVPVWSFLVYSPVAYWLFAGGWLNQLGAVDFSGGYVIHLDAGVGALAAALAIGPRIKEDMNLKANNLGLVMLGLGLIWLGWDGFNGGDPYGSGIDAAIAIINTNVATAVSMITWMLMDMKFFKKASLIGASVGAIAGLVGITPAAGYVNIYGAMVIGIATGIIPWIALYKIEPHFKIDDALGVFSSHAVAGIVGGILTGVLADPFITQYIDPGLRGAIYGDFYQLGIQALAAAVVFAYTFAMTIAILKIIGLFIPLREKEENLKLGDLAIHGEIGFEDSYQAVRK

SEQ ID NO: 514 - protein, 246 aa, Tsuga canadensis
YTYNLRNKGPEDVIVRVIYCGICHSDLIQMRNEMGMSHYPMVPGHEVVGIVTELGSEVKKFKVGEHVGVGCIVGSCRKCGNCNESMEQYCSKRIWTYNDVNHDGTPTQGGFASSMVVDQMFVVRIPENLPLEQAAPLLCAGVTVYSPMKHFGMTEAGKRCGILGLGGVGHMGVKIAKAFGLHVTVISSSDKKKEEALEVLHADAYLVSKDAEKMQEAAESLDYILDTIPVAHPLEPYLSLLKTNGK

SEQ ID NO: 515 - protein, 307 aa, Chloroflexus aurantiacus
MASKKQRIGVLTSGGDAPGLNAVIRAVVKSASGLGWEVIGIHDGFEGLLGTKSYRVLTNADVQVLLPRGGTILRTTNKGHFGPRRSDELSEADPYVRAVKAIEEMGLRALITIGGEGTQRIALELHKLGAPVIGVPKTIDNDLAGTDRTFGFDTALQVATDAIDRLHTTAASHNRVMVLEVMGRHTGWIALHAGLAGGADVILIPEIPFSIERVAEKVMARDQQGSSFSIIVVAEGARPRGGSEMYIAEGRLGGIGHWVGEQLEKLTAKEVRVVVLGHLQRGGSPSPYDRLLSTRYGAAQCRGSSGI

SEQ ID NO: 516 - protein, 121 aa, Glycine max
MDCLVMPVSLIRRRSTGSRMGYMALPKEEPVKVVVGKEKRVFLVEPFILQENPFQILMDISMKKDPAGHFTSNHSQSERRVIFVDVDDILFEHMLWLMHNDASSLFQLNLKEIIDFYTHDI

SEQ ID NO: 517 - protein, 445 aa, Saccharomyces cerevisiae
MDDKVSEKESSPKQTEEDSEGKMAHVQPASYVNKKKYVFGKTLGAGTFGVVRVRKNTETGEDVAVKIVIKKALKGNKVQLEALYDELDILQRLHHPNIVAFKDWFESKDKFYIITQLAKGGELFDRILKKGKFTEEDAVRILVEILSAVKYMHSQNIVHRDLKPENLLYIDKSDESPLVVADFGIAKTLKSDEELLYKAGTALGYVAPEVLTQDGHGKPCDIWSIGVITYTLLCGYATIDRKVQDFLDECTTGEYPVKFHRPYWDSVSNQAKQFILKALNLDPSKRPTAAELLEDPWIICTELKTHNLLPGLKEGLDARQKFRNSVERVRLNMKIQKLRDLYLEQTESDSDFDEGSQANGSVPPLKATDTSQLSKKLSEEEQSKLKSELTSKAFAQLVNTVLAEKEKFLNINRVCSSDSDLPGSDIKSLDEAKEKPEGKDTKTEE

SEQ ID NO: 518 - protein, 289 aa, Mesorhizobium loti MAFF303099
MTPGHEFSGIVEAIGKAVSGFAVGDRVTGDPNIACGRCPHCHAGRVNLCRNLNAIGIHRDGGFAEYVVLPQKQAFILPADLPPTHGAFCEPLGCCLHGVDLAQIKPGSSVVVLGGGVIGLLTVQLAKLAGATTIILSTRQASRRVLAEELGATATVDPTAGDVIDAIAGSEGLMPGGADVVFECAGVRDTVEQSMRLARAGGTVVIVGVTPQGMKAEFEPFDLLFRELKVVGSFLNPYTHRRAAELIASGAIEIDRLISRQVPLEEAADVIANPPAPGEVKVLVVPRQG

SEQ ID NO: 519 - protein, 472 aa, Bacillus sp. KSM-K16
MNHALFINNECVATDDMIEVENPATKEVIGTVANGGKQEALAAVDAAAAALPEWRAKTAAERGAYLQKWYELIQREEEEIAKLMTLEQGKPFAEALGEVRYANSFLSWYAEEGKRVYGETVPAAATNKRIFVQKQAIGVIAAITPWNFPAAMLTRKLGPALAAGCTAVMKPSELTPFTAYRIVELAKVAGIPKGVVNMITGDAQQIGETWMADERVRKVSFTGSTRVGKLLMRQAADTVKKLSLELGGHAPFIVTAQADIQKAVDGLIASKYRNGGQTCVCANRIYVHESIKAPFVEAFAAEMKKLKVGNGMEPDSHIGPLINEAAVAKVQKHIEDAQAKGGEVIFGQEADATNGYFQTPALIANATDDMLCMKEETFGPLAPIATYTSTEDVIERANHSPYGLAAYVYSNDLSEAVTIAERLEYGIVGLNDGLPSVAQAPFGGMKESGLGREGGHWGIEEYVEVKYISLQL

SEQ ID NO: 520 - protein, 152 aa, Brassica napus
MGSIRESAPTANSSTTVVMSSIPPFLSKTYDMVDDPSTDEVVSWSSGSNSFVVWNVPEFSKQFLPKYFKHNNFSSFVRQLNTYGFRKVDPDRWEFANEGFLKGQKQLLKSIIRRKPTQVQPPQQPQVQHSSVGACVEVGKFGLEEEVERLQR

SEQ ID NO: 521 - protein, 474 aa, Escherichia coli K12
MQHKLLINGELVSGEGEKQPVYNPATGDVLLEIAEASAEQVDAAVRAADAAFAEWGQTTPKVRAECLLKLADVIEENGQVFAELESRNCGKPLHSAFNDEIPAIVDVFRFFAGAARCLNGLAAGEYLEGHTSMIRRDPLGVVASIAPWNYPLMMAAWKLAPALAAGNCVVLKPSEITPLTALKLAELAKDIFPAGVINILFGRGKTVGDPLTGHPKVRMVSLTGSIATGEHIISHTASSIKRTHMELGGKAPVIVFDDADIEAVVEGVRTFGYYNAGQDCTAACRIYAQKGIYDTLVEKLGAAVATLKSGAPDDESTELGPLSSLAHLERVGKAVEEAKATGHIKVITGGEKRKGNGYYYAPTLLAGALQDDAIVQKEVFGPVVSVTPFDNEEQVVNWANDSQYGLASSVWTKDVGRAHRVSARLQYGCTWVNTHFMLVSEMPHGGQKLSGYGKDMSLYGLEDYTVVRHVMVKH

SEQ ID NO: 522 - protein, 279 aa, Bacillus cereus G9241
MKNLQSTTTLHNGVEMPWFGLGVFKVEDGPELVEAVKSAIKAGYRSIDTAAIYGNEKAVGEGIRAGIKEAGISREDLFITSKVWNSDQGYETTLAAYEESLKKLELDYLDLYLVHWPVEGKYKDTWRALETLYKEKRVRAIGVSNFQIHHLQDVLADAEMKPMINQVEYHPRLTQKELQAFCKEQGIQMEAWSPLMQGQLLDNETLQEIAHKYGKTTAQIILRWDLQNEVVTIPKSTKEHRIIANADVFNFELTKEDMEKIDALNQNHRVGPDPDNFDF

SEQ ID NO: 523 - protein, 417 aa, Nicotiana tabacum
AADGYARARGVGACVVTFTVGGLSVLNAIAGAYSENLPLICIVGGPNSNDYGTNRILHHTIGLQDFSQEPRCFQTVTCYRAVVNNLEDAHELIDTAVSTALKESKPVYISIGCNLPGIPHPTFSREPVPFALSPRLSNMMGLEAAVEAAAEFLNKAVKPVLVGGPKMRVAKASDAFVELSDACGYAVAVMPSAKGLFPEHHSHFIGTYWGAVSTAFCAEIVESADAYLFAGPIFNDYSSVGYSLLLKKEKAIIVQPDRVTIGNGPAFGCVLMRDFLAALAKRLKHNPTAFENYHRIYVPEGHPLKCEPKEALRVNVLFQHIQNMLSGDSVVIAETGDSWFNCQKLKLPKGCGYEFQMQYGSIGWSVGATLGYAQAAPEKRVIACIGDGSFQVTAQDISTMLRCGQRTIIFLINNGGY

SEQ ID NO: 524 - protein, 484 aa, Sphingomonas chungbukensis
MTILNFIDGSYREGSEGKSFSNVNPATGAEIGVVHEASQAEVEDAVEAAKAALTGPWGKMTTARTGQADHRVATEIERRADDFLAAEVADTVKPRHVVSHIDIPRGAANFRMFADVVSTMPGESFNTPTPDGGQAFIYTVSKPKGVDAAVCPRNFPLLLMIWKVGPELACGNTAVVKPSEEIARTAALLGDVIDAGVNHHGVFNVAQRFGPASAGEFLTSNPDVDAITFTGETGTGQAIMQKAATGVRDISFELGGKNPAIVFADADLDKAVEGLSRSVFLNTGQVCLGTERVYVERPIFDAFVARMAAAAQDFKPGVTGDRAYLGPLISAEHREKVLAYYPRAVEDGPTVFTGGGVPEISGAETGGFFVEPTLWIDVAHGDTVMREEIFGPCCDILPFDSEDEVIALANDTVYGLCASVWTENLSRGHRVAAAMEVGVCWVNSWFLRDLRTAFGGSGHSGIGREGGVHSLEFYTEITNICVKL

SEQ ID NO: 525 - protein, 1064 aa, Saccharomyces cerevisiae [sequence omitted]

SEQ ID NO: 526 - protein, 1374 aa, Neurospora crassa
MGSSSRTRPGQTSNSGIAKGQTKDVKEVNLSRSNRSKPSNSARHPPMKRARTPVGGHSADTSSSTSSEDIAPEIVVWTGDMDVMDSEESPFPESPLPTDDSSQLPSLSRAPEGPSVLDGDASSQFSSPLSEPPESSPIISPQDDIAVEQENPIPQSASSLSDQHSNSSSHAPSVTSKATTPVDADRLKEPPTRQELSEPQPSPPVSPSPEPPVEEQQPKPTVEEPPQPDEQPQTELQEEPTAQPERVARLLPLPVIDEPPLAAIESAAPPQGPKSPMNERKIKQESPEEVVLESARQASLPQDAGTLDVLMEEAPGTDAVVQEAPMQDVSMLEAPPQDTPDREAPPLDIVMDEPPAYESLTHEAPAGNPAAQSLSTLDAPAQEKTAQEASIYATPVHEVPAQPTPVQGFLPQNAGTNTVSTDTPRRRYNVRPKVTIPPDLPLPDYAMQCITAAEASRLNPYALHQEEYLMLRDHISHAQVTTYLNIRNGILRLWVRNPQIAVTREEAVGCAKDTRWFDAASLCFDWLVRRGYINFGCVDYRHSKRHTSKDPPATTLKRRTVAVLGAGMAGLGCARQLEGLFAQYAKKFRDMGEEPPRVIVIEGRNRIGGRVYSRPFASKPARTPDNFHGKRFTAEMGGMIITGFERGNPINILLRAQLGIPYRPLRPDTTLYDSNGKPVDLHRDQLVENLYNDCLDRVSEYKFKQPTSKLIEGNRELIDEGKDSSAEAYKTIRQVEESTAAQPHAPPVSEQSIAPQVNLVPISSDRATGRVHTEPGTPGALKAAYKAKLLGWALKQGVSEDADLDLETPAKEPGANLGSVVDNMFAQYRDIVDLTAQDYRLLNWHVANLEYSNAINYNKLSLQGWDIDAGNEWEGSHTMVIGGYQSVPKGLMLLPTPLDVRRRSPVNKITYTTESTAGPAVIECEDGFKVEADFVVNTIPLGVLKHGNIKFEPPLPEWKSSAIERIGFGVLNKVILVYKEAFWDEDRDIFGVLRNPSNRHSLDQKDYASQRGRFFQWFNVTQTSGLPVLLALMAGDAGYDTEQTCNDDLVKEATDVLRRVYGSKVQQPIEAIVTRWASDKFARGSYSSAGPDMKADDYDTMAKPVGNLFFAGEHTCGTHPATVHGAYLSGLRAASEVLETMLGPIEIPTLLITPKESSSLSLKRKAAALSSEFTTTTVTNSYGTMSSTRNPEQARLEAYDISLWDSITSQIGLRPQKPSKPVVSGYIFFSKAHYDDARKRCEAGRRPGKGKASGNEVRMMSAKMWKDASPEEKRPFEELAEESKRAYAVAMKEWTEKAQEWDRKATELKEIYERENPYVPLSALVVKSEEGVAAAASVSSGSNGRNGRRARWAGEKVGSYAEDGGSDVDVAMTG

SEQ ID NO: 527 - protein, 640 aa, Zea mays
  misc_feature (43)..(43): Xaa can be any naturally occurring amino acid
MGNTCVGPSITMNGFFQSVSTALWKTPQEGDALPAAANGPGGXPAGAGSQSALPKPASDVHHVAVQSEAPEPVKIAAYHSEPAPAVRSEAPEPVKIAASHSEPAPMAAKPGGAAANASPSPSPRPRPQVKRVSSAGLLLGSVLRRKTENLKDKYSLGRRLGQGQFGTTHLCVERATGKELACKSILKRKLGSDDDVEDVRREIQIMHHLAGHPSVVGIRGAYEDAVAVHLVMELCGGGELFDRIVRRGHYTERKAAELARVIVGVVEACHSMGVMHRDLKPENFLFADHSEEAALKTIDFGLSIFFRPGQIFTDVVGSPYYVAPEVLKKRYGPEADVWSAGVIIYILLCGVPPFWAENEQGIFEEVLHGRLDFESEPWPSISDGAKDLVRRMLVRDPRKRLTAHEVLRHPWVQVGGVAPDRPLDSAVLSRMKQFSAMNKLKKMALRVIAENLSEDEIAGLREMFKMIDADNSGQITFEELKVGLEKVGANLQESEIYALMQAADVDNNGTIDYGEFIAATLHLNKVEREDHLFAAFQYFDKDGSGYITADELQVACEEFGLGDVQLEDLIGEVDQDNDGRIDYNEFVAMMQKPTVGGSRRRPICRTASASGSASGSGRRSGWPRPLCLWLPCCLRVGVDD

SEQ ID NO: 528 - protein, 115 aa, Arabidopsis thaliana
DVSTMIRCGQKTIIFLINNGGYTIEVEIHDGPYNVIKNWNYTAFVEAIHNGEGKCWTAKVRCEEELVKAINTATNEEKESFCFIEVIVHKDDTSKELLEWGSRVSAANSRPPNPQ

SEQ ID NO: 529 - protein, 445 aa, Bacteroides thetaiotaomicron VPI-5482
MKRILIKNAVIVNEGRKVPGSVVIEGEKIAEILVDGQEAAMPCDETIDASGCYLLPGAIDEHVHFRDPGLTHKADITTESHAAAAGGVTSIMDMPNTNPQTTTLEALNDKLALLAEKSSVNFSCYFGATNNNYPLFSQLDKNRVCGVKLFMGSSTGNMLVDRMASLRNIFGGTDLLIAAHCEDQGIIKENTDKYKKEYGDDVPLALHPVIRSEEACYRSSALAVQLARETNARLHIMHISTAKELSLFSKAPLAEKRITAEACVSHLIFTEEDYQTLGARIKCNPAIKTAEDRKALQEAVNSGLIDAIATDHAPHSLSEKEGGALKVMSGMPTIQFSLVSMLELADKGAFSIEKVVEKMSHAPAQMYEIRNRGFIRKGYQADLVLVRPDSEWTVTTDCILSKCKWSPLEGHTFHWKVEKTFVNGHLLYNNGTIDENYRGQELRFR

SEQ ID NO: 530 - protein, 312 aa, Sulfolobus solfataricus P2
MINREDLLKNPVEDITLSDLKKYNDIVSVFDKIYGFSSEGIVNGSKILKEMIKNADLRFLSFTANLVSTGLRGLFADLIKKGYFNIVVTTGGTIDHDLARSFGGVYYKGSFDIDDTMLKDLEIHRLGNVLVPFESYGKVIEDVVRKFLPEITKDRKEISAYELLWEFGKRITDSNSILRAAYDKNVPIIVPGILDGSFGTNLFIQSQFLNFRINLFEDMRLIKDLIFSSKKSGALIIGGGISKHHTIWWNQFKDGLNYAIYITTAQEYDGSLSGAKPREAISWNKIRPDAKHVTIYGDATIIVPILAASLLS

SEQ ID NO: 531 - protein, 131 aa, Sulfolobus solfataricus P2
MSITYTTVGELKVGSYVVIDGEPCRVVEVTKAKTGKHGSAKANVVAIGVFSGAKKTLMAPVDQQVEVPIIEKHIGQIIADMGNKIQVMDLESYETFEIEKPTEDELASKIKPNAELEYWEIMGRRKIVRVK

SEQ ID NO: 532 - protein, 497 aa, Arabidopsis thaliana
MDKKKNSFPDNLPEGTISELMQKQNNVQPSVIVIGSGISGLAAARNLSEASFKVTVLESRDRIGGRIHTDYSFGCPVDMGASWLHGVSDENPLAPIIRRLGLTLYRTSGDDSILYDHDLESYGLFDMHGNKIPPQLVTKVGDAFKRILEETEKIRDETANDMSVLQGISIVLDRNPELRQEGMAYEVLQWYLCRMEAWFAVDANLISLKCWDQDECLSGGHGLMVQGYEPVIRTIAKDLDIRLNHRVTKVVRTSNNKVIVAVEGGTNFVADAVIITVPIGVLKANLIQFEPELPQWKTSAISGLGVGNENKIALRFDRAFWPNVEFLGMVAPTSYACGYFLNLHKATGHPVLVYMAAGNLAQDLEKLSDEATANFVMLQLKKMFPDAPDPAQYLVTRWGTDPNTLGCYAYDVVGMPEDLYPRLGEPVDNIFFGGEAVNVEHQGSAHGAFLAGVSASQNCQRYIFERLGAWEKLKLVSLMGNSDILETATVPLQISRM

SEQ ID NO: 533 - protein, 204 aa, Glycine max
  misc_feature (173)..(173): Xaa can be any naturally occurring amino acid
  misc_feature (189)..(189): Xaa can be any naturally occurring amino acid
GIPWERLNYSRDKYRETRLKQYKNYQNFSLSPHHLHKECFQVQKGQTFYDFFFNTRLVKSTIVHFQLRNLLWATSKHDVYLMQNYSVMHWSALLQRSKEVLNVAKPIIPTLTHPGFLAQPVSRVQISTMTVKENLMVAGGFQGELICKNLKQPGVLFCGKITTDGNAITNAVXDVYRNPAGSLRVITAXNDSQASGFDAENFAS

SEQ ID NO: 534 - protein, 343 aa, Salmonella typhimurium LT2
MEVKTQSCVVAGKRAVAVTEQNIEWNNKGTLVQITRGGICGSDLHYYQEGKVGNFTVKAPMILGHEVIGKIVHSDSDLLREGQPVAINPSEPCGHCKYCLQHEENHCTEMRFFGSAMYFPHVDGGFTRFKAVDTAQCIPWPEQADEKAMAFAEPLAVAIHAAHEAGDLQGKRIFISGVGPIGCLIVSAVKTLGAAEVVCADISTRSLSLARQMGADTLVNPQHDSLDDWKAEKGYFDISFEVSGHPSSISTCLEVTRAKGVMVQVGMGGAVPNFPMMMVISKEISLKGSFRFTTEFNTAVSWLANRVINPLPLLSAEYPFTDLEAALIFAGDKTQAAKVQLVF

SEQ ID NO: 535 - protein, 136 aa, Methanocaldococcus jannaschii
MVIIMPGTKQVNVGSLKVGQYVMIDGVPCEIVDISVSKPGKHGGAKARVVGIGIFEKVKKEFVAPTSSKVEVPIIDRRKGQVLAIMGDMVQIMDLQTYETLELPIPEGIEGLEPGGEVEYIEAVGQYKITRVIGGK

SEQ ID NO: 536 - protein, 211 aa, Agrobacterium tumefaciens
MIHSFDLGPQSSETHNEKLDRSISRKGADPGAVIWLTGLSGSGKSTVAVSVDRILHERGRSSVVLDGDIIRRGLSKDLGFEHRDRYENVRRIAEVAKLLAEAGFTVLVSCISPLEKDRQSARRIIAPVRFLEVFVETPIEECIRRDPKGLYRKALSGEIKNFTGISSPYEAPLKPDLCIRTADADSETLAALVVRTVCERGDAAFAFHQSG

SEQ ID NO: 537 - protein, 229 aa, Zea mays
  misc_feature (186)..(186): Xaa can be any naturally occurring amino acid
LAIELSKREDELLRQKTEVTKIADTLKLAFTESKRIIDEKRANARLEIESAKASVQKIQSALKEQEIFSQRTGEQDVDELKEEVQEARRVKMLHCPSKAMDIENEIQVLRDQLAEKSSDSLRLLKELELHRSYGENDMPLYELKGLETLGSTLHIVVHDCASVDFWNSSIQWFRIQPEGSKKEIIXGTTKPAYAPEPHDVGRYTQAEVKSGGQTSITKIAGSVDPGMVS

SEQ ID NO: 538 - protein, 101 aa, Zea mays
  misc_feature (23)..(23): Xaa can be any naturally occurring amino acid
MSDGTATCIDIILAIILPPLGVXFRFGCGVGFWICLILSLLGYLPGFLYAARAITKEPAGALACIAPAGGSGGGGLGAPGSGDVVPSLLGRWRLGLAAEVW

SEQ ID NO: 539 - protein, 259 aa, Zea mays
  misc_feature (101)..(101): Xaa can be any naturally occurring amino acid
  misc_feature (113)..(113): Xaa can be any naturally occurring amino acid
  misc_feature (238)..(238): Xaa can be any naturally occurring amino acid
MEIAMVCTRVNLLILILSLCSPYKFIQSPMDFGPLNLLPTTIAASSDFGRILFHSPSAVLKPQSPRDISLLLSFLSASSLGKVTVAARGAGHSIHGQAQAXDGIVVEMRCLPXEIELHRGGEGDVSYADVSGGAMWIELLEQSLKAGLAPRSWTDYLYITIGGTLSNAGISGQTFKHGPQISNVLQLEVVTGRGETVTCSPTKNAELFSAVLGGLGQFGIITRARILLQEAPQKVKWXVRAFYDDFGTFTKDQELLVSM

SEQ ID NO: 540 - protein, 410 aa, Triticum aestivum
  misc_feature (281)..(281): Xaa can be any naturally occurring amino acid
MAAQNYGELYNILGWGEPYFTVNRDGHLCVKTHGHETKPGQEIDVVSVAEAAKEKGVQFPMILRFPDVLKHRLDSLHVAFEKAIKHTGYTAPYQGVYPVKVNQNRAIINDFVSFGHRHSYGLEAGSKPELLIAMSYLTKAKPGAFLVCNGYKDADYVALALSARAMGLNVIIVLEMEEELDIIIEHSSKLGVEPVLGVRAKLLTKIPGHFGSTAGKHGKFGLLADKIYEVAKKLKDLNKLHWLKLLHFHIGSMIPTTDIVSSAAREASGIYCTLVKQYGAXWTTLDCGGGLGVDYDGTRSGSDMSVAYGLEEYASSIVQAVRVKCEDNGVDHPVLCTESGRAMVSHHSMIILEALSAIPEPKDDEETTPEELQAMIDDLSSKKWLKGDDDAAVAKPMSSHAAEIKEHGIE

SEQ ID NO: 541 - protein, 166 aa, Triticum aestivum
  misc_feature (52)..(52): Xaa can be any naturally occurring amino acid
MAQESLRLVCPPVSAHEGRLPRQYTLEGQGAKKDISPPLEWYGVPDGTRSLXAVVVQDVDADERVPWTHWVVVNISPEEKGLPEGFSGAGGNANAGGGDGGVQEGVNDWKQPGWRGPVPDSHGHRIQFRLYALDDVLSLGNKVTVDKVMEAIEGHVLGEAEITAVF

SEQ ID NO: 542 - protein, 131 aa, Triticum aestivum
  misc_feature (66)..(66): Xaa can be any naturally occurring amino acid
MEGVGARLGRSSARYGPAMTFTGPVRKWRKEWVTISAATATATSAAASSTGTGSRGNNLILFKWTXLNGANERDEEQTAPAKTATRRRLYVPVSVVQDQRQESAKSDDENKANDGEPSSTETEQSIGKTNM

SEQ ID NO: 543 - protein, 371 aa, Nicotiana tabacum
MAKRTLPLLRHLLSSPSHGFSHSLTSTRSVTYMPRPGDGTPRAVTLIPGDGIGPLVTGAVEQVMDAMHAPVYFERYDVHGDMKSVPPEVMESIRKNKVCLKGGLKTPVGGGVSSLNVQLRKELDLYASLVHCFNLQGLPTRHENVDIVVIRENTEGEYSGLEHEVVPGVVESLKVMTKFCSERIAKYAFEYAYLNNRKVLTAVHKANIMKLADGLFLESCPEVATKYPGIKYNEIIVDNCCMQLVSRPEQFDVMVTPNLYGNLVANTAAGIAGGTGVMPGGNVGADHAVFEQGASAGNVGNEKILEQKKANPVALFLSSAMMLRHLQFPSFADRLKTSVKRVIAEGKYMTKDLGGNCTTQEITDAVIANLD

SEQ ID NO: 544 - protein, 204 aa, Glycine max
MALELVIKLDWVDLIMMDWLVQIEMSAVNITNVTVLDNPASFLTPFQFEISYECLTALKDDLEWKLIYVGSAEDETYDQLLESVLVGPADPPDPSKIREEDIIGVTVLLLTCSYLGQEFIRVGYYVNNDYDDEQLREEPPPKVLIDRVQRNILSDKPRVTKFPINFHPENNENEEQLPPSEHPSETGEDPLAVVDRDPPDEKDS

SEQ ID NO: 545 - protein, 443 aa, Rubrivivax gelatinosus PM1
MTRGPDTLAERSRRAVWHPCTQMKRHEREPLLAIARAQGPWLFDPDGHRYLDAVSSWWVNLFGHGHPQLRDALAEQLATLDHVMLAGLTHEPVVELSERLAALTGLGHAFYASDGASATEIALKMSAHSWRNRGRPQKCEFVGLAGGYHGETVGALSVTDIALFREAYAPLVRLSAALPSPDTRHAAPGEDAAAHARRCAASLEAYLDQHHERTAALIVEPLVQCAAGFGMHDPEYLRLARALCDRYQVHLICDEIAVGFGRTGTLFAHQQAGIRPDFICLSKGLTGGTLPLSAVLTTDAVYESFYDDLASRGFLHSHSYTGNPLACRAALTVLDLFEQPIDGEPVLAHNRRTAARLTALCEPLNAHPRVRAVRQLGMLWAWDIDDDGVVGFSSAYHLAAREQGLLLRPIGNTLYFMPPYVLDDGALEQLAGGALRALEVALA

SEQ ID NO: 546 - protein, 338 aa, Streptococcus pyogenes MGAS315
MKAVVVNQASTGVEVVEHDLPNVGHGEALVKVEYCGVCHTDLHVAHGDFGQVPGRILGHEGIGIVEEIGEGVTSLKVGDRVSIAWFFEGCGHCEYCTTGRETLCRSVKNAGYSVDGGMSEYAVVTADYAVKVPEGLDPAQASSITCAGVTTYKAIKEAGAAPGQWIVIFGAGGLGNLAVQYAKKVFNAHVVAVDINNDKLELAKEVGADIVVNGKEIEDVPGYIQEKTGGAHGVVVTAVSKVAFNQAIDSVRAGGTVVAVGLPSEYMELSIVKTVLDGIKVVGSLVGTRKDLEEAFAFGAEGLVVPVVEKVPVDTAPEVFDEMERGLIQGRKVLDFIS

SEQ ID NO: 547 - protein, 129 aa, Malus x domestica
MMTCKLKFLELKAKRTYRFIVFKIDEKKNEVIVEKLGEPAESYEDFTANLPDNECRYAVYDFDFVTVENCHKSRIFFVGWSPDTARVRNKMIYASSKDRFKRELDGIQVELQATDPSEIGLDVIKSRAN

SEQ ID NO: 548 - protein, 178 aa, Triticum aestivum
  misc_feature (16)..(16): Xaa can be any naturally occurring amino acid
  misc_feature (39)..(39): Xaa can be any naturally occurring amino acid
MAGVSRSMVAPLLVLXNLVMYIVVIGLASWNLNHFINGXTNYAGVAGNGATFYFLLFAILAGVVGAASKLAGVHHVRTWRGDSLSTSASSALVAWAITALAFGLACKEIHVGGHRGWRLRVLEAFIIILAFTQLLYVMALHAGLFGNQFGDGYGGAEHQYGDHHHHKGMGTAAATARV

SEQ ID NO: 549 - protein, 300 aa, Bartonella sp. sa192up
PIDQLAEKGDFLEICYLLLYGELPTKQEKNDFDNCIMQHTMVHEQLARFFHGFRRDSHPMAVMVACLGAMSAFYHDSIDITDSQQRMIASVRLISKVPTLAAMAYKYSIGQAFVYPRNDLSYAANFLRMCFCVPCEEYKINPVLTRAMDRIFILHADHEQNASTSTVRLAGSSGANPFACIAAGVACLWGPAHGGANEACLKMLQEIGSVERIPEFIARAKDKNDPFRLMGFGHRVYKNYDPRAKIMQKTCHEVLKELNIQDDPLLDIAIELEKIALSDEYFVEKKLYPNVDFYSGITLK

SEQ ID NO: 550 - protein, 486 aa, Azotobacter vinelandii
MRKIENFIAGEYVAAASGRRFDKRSPLDNRVIASIAEAGRAEVDAAVGAARGALAGDWGRLSTEQRVELLYGVANEITRRFDDFVEAEMADTGQPAHVMKQVFIPRGAANFKVFADVVKNVASESFQTATPDGRGALNYALRVPKGVIGVICPWNAPFMLMTWKVGPALACGNAVVVKPSEESPQTAALLGEVMNAVGIPKGVYNVVQGFGPDSAGEFVTQHPGVDAITFTGETRTGAAIMKAASEGMRDVSFELGGKNAGIVFADCDFEAAVEGIFRSAFLNSGQVCLGTERVYVERPIFERFVQALKVKAESVRFGRPDDHDANYGPLISQEHRQKVLSYYRKALEEGATLVTGGGVPEMPGELAEGAWVQPTIWTGLPESAAVVREEIFGPCCHIRPFDAEDEVVQLANATDYGLSTTLWTNDLARAHRLAARVEVGITWINSWFLRDLRTAFGGAKQSGIGREGGVHSLEFYTETRNVCVKL

SEQ ID NO: 551 - protein, 128 aa, Rubrobacter xylanophilus DSM 9941
MALSKEELIEAIENMTVLELSELVKALEERFGVSATAVAAAPAAAGAAGAEAAAAEEEKTEFDVILQDAGAKKIQVIKEVRAATGLGLKEAKALVDEAPNPVKEGLPKEEAEALKAKLEEAGATVELK

SEQ ID NO: 552 - protein, 300 aa, Bartonella sp. af82up
SIDQLAEKGDFLESCYLLLYGELPTKQEKIDFDQRIMQHTMVHEQFARFFHGFRRDSHPMAVMVACLGAMSAFYHDSIDITDSQQRMIASIRLISKVPTLAAMAYKYSIGQPFVYPRNDLSYAANFLHMCFSVPCEEYKINPVLARAMDRIFTLHADHEQNASTSTVRLAGSSGANPFACIAAGVACLWGPAHGGANETCLKMLQEIGAVQKIPEFIARAKNKNDRFRLMGFGHRVYKNYDPRAKIMQQTCHEVLKELNIQDDPLLDIAMELEKIALNDEYFIEKKLYPNVDFYSGITLK

SEQ ID NO: 553 - protein, 300 aa, Bartonella sp. ma106up
PIEQLAEKGDFLESCYLLLYGELPTQQEKNDFDRRIMQHTMVHEQFSRFFQGFRRDSHPMAVMVACLGAMSAFYHDSIDITDPQQRMIASIRLISKVPTLAAMAYKYSIGQAFVYPHNSLSYAANFLRMCFAVPCEEYQVNPVLTRAMDRIFILHADHEQNASTSTVRLAGSSGANPFACIAAGVACLWGPAHGGANEACLKMLKEIGSVKKIPEFIARAKDKNDPFRLMGFGHRVYKNYDPRAKIMQKTCHEVLKELNRQDDPLLDIAIELEHIALNDEYFIEKKLYPNVDFYSGITLK

SEQ ID NO: 554 - protein, 226 aa, Glycine max
VTARQDLHHRNRPSDHYRLLKSNVDALNLIQVGLTLTDAAGNLPDLAGNRSIWEFNFRDFDVARDAYAPDSIDLLRRQGIDFARNTADGVDSTCFAELMMSSGLVCNDAVSWVTFHSAFDFGYLVKILTRRNLPTRLEEFLKTVKVFFGDNVYDVKHMMRFCDTLYGGLDRVARSLNVDRAVGKCHQAGSDSLLTWHAFQKIVDIYFVKDEHRKHAGVLFGLEAFC

SEQ ID NO: 555 - protein, 300 aa, Bartonella sp. af170up
PIDQLAEKGDFLESCYLLLYGELPTKQEKHDFDRCIMQHTMVHEQFARFFHGFRRDSHPMAVMVACLGAMSAFYHDSIDITDPQQRMIASVRLISKVPTLAAMAYKYSIGQAFVYPRNDLSYAANFLRMCFCVPCEEYKVNPVLTRAMDRIFILHADHEQNASTSTVRLAGSSGANPFACIAAGVACLWGPAHGGANEACLKMLQEIGSVERIPEFIARAKDKNDPFRLMGFGHRVYKNYDPRAKIMQKTCHEVLKELNIQDDPLLDIAIELETIALNDEYFVEKKLYPNVDFYSGITLK

SEQ ID NO: 556 - protein, 366 aa, Streptomyces avermitilis MA-4680
MDTSTPLTRPPDLYGRPRSDSFMQKLAALSDHAVTRLARRSTPPRHPQAAETPAIRELVVATKHQEAEDVVSLRLAAPDGGILPPWQPGAHIELHLPSGRKRQYSLCGDPADRHRYRIAVRRIANGQGGSAEVHDALSDGMRVAITGPRNAFPFAAEASILLIAGGIGITPILPMAREAARRGLDWRLVHTGRSRGSMPFAAELAELTAAAPGRVTIRPDDESGAPEAADLLSLSPATGAVYCCGPAPMIDGVRRAFGDSRASALHFERFAPAPITDGRPFELQLGETGRVLPVPYDRSALDVLHDALPDLPFSCRQGFCGTCRVQVAHGHVDHRDRRLTATERAAGAMLPCVSRAPEGERLVLEL

SEQ ID NO: 557 - protein, 392 aa, Aegilops tauschii
MKTFLIFVLLAMAMKIATAARELNPSNKELQSPQQSFSHQQQPFPQQPYPQQPYPSQQPYPSQQPFPTPQQQFPQQSQQPFTQPQQPTPLQPQQPFPQQPQQPQQPFPQPQQPFPWQPQQPFPQTQQSFPLQPQQPFPQQPQQPFPQPQLPFPQQSEQVIPQQPQQPFPLQPQQPFPQQPQQPFPQPQQPIPVQPQQSFPQQSQQSQQPFAQPQQLFPELQQPIPQQPQQPFPLQPQQPFPQQPQQPFPQQPQQSFPQQPQQPYPQQQQSFPQQPQQPFPPTTTKPFPQQPQQPFPLRPQQPFPQQPQQSQQSFLQPQPQQPQQPSILQPQQPLPQQPQQPFQQPQQQLSQQPEQTISQQPQQPFPQQPHQPQQPYPQQQPYGSSLTSIGGQ

SEQ ID NO: 558 - protein, 427 aa, Arabidopsis thaliana
MDRISNLSDDLLLKIVSSLPTKDVVVTMLLSKRWKFLWMMVPKLRFDDEFELEPSYYGRFLKYVDKSMVLNRAQVLETVKFNVGPCCSSEDIATWIRIGMVRNMRELEISHCEGYFREHRSIKLPKSLYTYEKLEVLKLASTVVLNVPIDVCFPSLKSLHLVCVEYKTKKSHRRLLSGCPVLEELVLDKSYNSFHVRSFYVEIPTLQSLSILDTSGELYGDFTFVVNAPALKYFNFVDFYGDLCLRDNMPEVVDVNIKVIYRNPKKLLGPLKSVKRLSLCLSPSTTLHNHMEFYQLVHLELCGDALMWWDLLTWMLQSSPKLQVLKIYECKCEEHDYLDDPIEEHWEEPSSVPQCLLFHLNIFEWKYYNAGDEEKKVVAYILKNARQLKTATFSAASYLYPKEERSRELNELVYMARASSSCQLLLD

SEQ ID NO: 559 - protein, 1415 aa, Nicotiana tabacum
MSLQSHLENSVVCADTDQTLIPDDEQHVKKSPENFLDLPPESFWIPKDSEQDWFDENATIQRMTSMMKLGFFGKANHHSKSFSHRSFTSTLFNHHQKPKSTSLFALPQSKKTSSTEGNLKQKKVPKSLFRSRSEPGRKGIRHVREPGSPKVSCIGRVDYALQKAISQLAPTQQRKVELLIKAFETVVPPQGDNSQVAFPKLFVSRRGKEGRASSEEHLQKTNKENEEEWMLAGDTGIKAEKVISRSKKDRGIRTGFWKKLRNILKIRPRAKSVANVETVKSAGSVDVKRLETSGRSESMGLCTSKPGIDSKCEEKDIQPSIPRQKLDEVCSKYKDDDSASKDEVLVEAKAQKEDKQFNKETSSVVSAKQEDSSNDEKAPKAVRGFSLLLAMQKQKSNDEDSDAASQNKQVRNYISMWHMKSQKKDEDNSHVLSQEDSNVASSVGNELLDGDKTDDEVSNSDSPVARNSPLPASEFYSPSVKPSSSSVNNSTPGEDQCVTTTNNEGKKSPFFPSPAHYFFSKVKPKTPARSPATNPTKRFFGFSFKSKSTAKRPFPPPSPAKHIRAVLARRLGSNSSAIPEGAKAEGGGVGKLDKKGRKGEVGRGHFGHTCWAKFKKGELKNPQVAVKIISKAKMTTAIAIEDVRREVKILKALSGHQNLVRFYDAYEDVNNVYIVMELCEGGVLLDRILSRGGKYTEEDAKSIVVIQILNVVAFCHLQGVVHRDLKPENFLFTRKEEDAPQKVIDFGLSDFIRPDQRLNDIVGSAYYVAPEVLHKSYSVPIEADMWSIGVIAYILLSGSRPFWARTESGIFRADNNLLNNKEDHPKWWPSVSAEARDFVKRLNKDHPRKRMTASQALSHPWLRTSNDAKVPLDILIFKLMRAYLRSSSLRKAALKALSKTLTVDELFYLKEQAKALKKWRMMARKKKAVSHKSTVVSCMHLKEQFALLEESSDTNSSIDETKVKQDIKAGAYEFPSPTATRAQFLEPKSLNNFLTKQMTDAMIDELASELPLSPSLHDHARHHDWLGPSDGKLNFLGFVKFLHGVTSRSIKTHSHHAPTGTRTCNSRQDFTDTKDEPDTSREDHNPKSHNGRNFCRDDAVEAKNSSNSTEESLTNHDMSEDGKMFDQTKPNTIITEEERALPLEAAKNKPEPKPQKSKNWSKLKKLQLLPPTPDLLPEPETVDLRHQMTDERKKAEKWMLDYAMQHIVTTLTPARKNLLKRSIKALEKARKFNPRAPKLIREAVNEILTTPIQDDSSDTDITMDQEFSEMERVAMLVEAFEAVVPLPEIMTAPCCLYEASCPGSPLLRVKPKSMAEFACYEVFGTERPQTSNNRTLEQMLQLMRALGQFGLKLGGYLRERGSKAQVRKLFSKKITSFEKIQSIRPRAKSVANVETVKSAGSVDVKRLETSGRSES

SEQ ID NO: 560 - protein, 80 aa, Brassica napus
MATNRKTIVWFRRDLRIEDNPALAAAAREGSVFPVFIWCPEEEGQFHPGRASRWWMKQSLAHLNQSLKSLGSHLTFIKYT

SEQ ID NO: 561 - protein, 251 aa, Zea mays
  misc_feature (239)..(239): Xaa can be any naturally occurring amino acid
MAAKCYPTVSDEYLAAVAKAKRKLRGFIAEKNCAPLMLRLAWHSAGTFDVATKTGGPFGTMKCPAELAHGANAGLDIAVRLLEPIKEQFPILSYADFYQLAGVVAVEVTGGPEVPFHPGRQDKPEPPPEGRLPDATQGSDHLRQVFSTQMGLSDQDIVALSGGHTLGRCHKERSGFEGAWTANPLIFDNSYFTELLSGEKEGPSSLPSAKALLSDPSFRPLVDKYAADEDAFFADYAEXHLKLSELGFAEA

SEQ ID NO: 562 - protein, 357 aa, Nicotiana tabacum
MARKSFPILKQLIQQSTNRFFTTNASPRAVTLIPGDGVGPLVTDSVEQVMQAMKAPVYFERYEVRGDMKCIPEEVIDSIKKNKVCLKGGLKTPVGGGVSSLNVLMRKELDLSASIVHCFTFPGLPTRHEDVDIVVIRENTEGEYAGLEHEVVPGVVESLKVITKYCSERIAKFAFEYADVNKRKKVTAVHKANIMKLADGLFLKSCREVASKYPEIQYEEIIVDNCCMQLVSRPEQFDVMVTPNLYGNLIANTAAGLAGGTGVLPGGNVGLIKPVFEQGASPGNVGHEKILKLKKANPVALLLSSAMMLRHLEFPSFADRLETAVKRVIAEGKVRTKDLGGDSTTQEVVDAIIAALD

SEQ ID NO: 563 - protein, 604 aa, Glycine max
  misc_feature (76)..(76): Xaa can be any naturally occurring amino acid
LKYKSEEGVRVLLLVWDDKTSHDKVFLKTAGVMGTHDEETRKFFKHSSVMCVLSPRYASSKMSFLKQQEIGFFVSXFSVESNVKCPVFCGLSSKQWVVGTVFTHHQKCVIVDTQAAGNNRKITAFIGGLDLCDGRYDTPEHRLFRNLDDVFDGDFHNPTFPAGTRVPRQPWHDLHCRIDGPAAYDVLINFEQRWRKATKWKEFAILFKKTSQWHDDALIRIERISWILSPSGAATLKDKSDYYTVPEDDPLVWVSSEDDPENWHVQIFRSIDSGSLKGFPKRVDIALSQNLICAKNLVIDKSIQTAYIQAIRSAQHFIYIENQYFIGSSYAWPAYKDAGADNLIPMELALKIASKIRAKERFAVYIILPMWPEGDPKTGAMQEILFWQGQTMQMMYDVVARELKSMQLTDVHPQEYLNFYCLGNREHFNEDSSSTNGAQVSTAYKYRRFMIYVHAKGMIVDDEYVIIGSANINQRSMAGTKDTEIAMGAYQPHYTWSAKKRHPHGQIYGYRMSLWGEHLGMLDETFEEPGRLECVEKVNEIAENNWKLFASEDFSLLQGHLLKYPVQVDSDGKIRSLPDCENFPDAGGKILGAHSTTIPDILTT

SEQ ID NO: 564 - protein, 411 aa, Bacillus sp. KSM-K16
MSTVMLKEESKRLVKATVPILAAHGETITKHFYKRMFHHHPELLNVFNRTNQKIGRQPQALANSIYAAAQHIDNLEAILPVVKRIAHKHRSLNIKPEQYPIVGENLLAAMKEVLGEAASDDVIEAWREAYEIIAGVFIEVEKQMYDQAGKAPGGWSGFRSFVVEKKKQESKAITSFYLKPKDGNEIASYQPGQYMTVKVNIPGDTYTHMRQYSLSDAPGKGYYRISVKREEGNTECPPGVVSNYLHQHIREGDVLEMTAPAGDFTLKQGEERPIVLISGGVGITPLMSMFNTLMQQGTKQKVTFIHAAIDGTYHAMHDHVAQTASQKENVHYAVCYERPTSEDQMNPYMKKEGYIDEQFLRSMIEDHHADFYFCGPIPFMKTVYHILNNWGVPEEQIHYEFFGPAGTLASS

SEQ ID NO: 565 - protein, 344 aa, Oryza sativa (japonica cultivar-group)
MPMLSSSPICAGRDSPAAPPPDPCLPPREEAGRGEEAAVRQMGSFTRCGRSLGHAAASSPPGLTRRDGGVELGAATTPPMLKRLPPPPLDRPAPLRSPPRFLCHCLATFGWWGIDRGEMKSPIKPRPPRPIDAIVFASIETRNRLRGFDRSFCCSAPPETYVFLPRARETIVLRANIIKMSSEQQASAGQPVLCASGCGFYGNPATLDMCSVCYRQHCLLNGATMATGPSSSVAAASAATVATGAVTSDSCSVPSAEVNGAAFSSKNNPEPATVVEKKAPANRCASCKKKVGLLGFACRCGATYCGTHRYPEKHACGFDFKGASRDAIARANPLIKGEKLTNKI

SEQ ID NO: 566 - protein, 151 aa, Brassica napus
FGHRVYKNYDPRAKVIKKLADEVFSIVGRDPLIEVAVALEKAALSDEYFVKRKLYPNVDFYSGLIYRAMGFPPEFFTVLFAVPRMAGYLSHWRESLDDPDTKIMRPQQAYTGVWLRHYEPVRERTLSSDSDKLGQVSISNASRRRLSGSAL

SEQ ID NO: 567 - protein, 354 aa, Burkholderia cepacia R1808
MKAAVWHGRNDIRVEEVPVPGHPPAGWVQIRVHWCGICGSDLHEYVAGPVFIPVDAPHPLTGLKGQCILGHEFSGEIAALGAGVTGFALGERVTADACQHCGTCWYCRHGMYNICENLAFTGLMNNGAFAEYVNVPAELLYKLPDNFPTEAGALIEPLAVGMYAVKKAGNIVGQTVVVVGAGTIGLCTIMCAKAAGAGRVIALEMSAARKQKALEVGATVVIDPKASDAIAEVKALTGGYGADVSFECIGHTATAKLAIDVIRKAGKSVMVGIFEEPTSFNFFDIVSTEKEVIGSLAYNGEFADVIRFIADGRIDVQPLITGRIALGDIVARGFEELVNHKDRNVKIIVQPVAA

SEQ ID NO: 568 - protein, 175 aa, Triticum aestivum
MAPTVMASSDTSVAPFQGLKSTAGLPVRRRSNGSSLGSVSNGGRIRCMQVWPIEGIKKCETLSYLPPISTEALLKQVDYLIRSKWVPCLKFSKVGFIFREHNASPGYYDGRYWTMWKLPMFGCTDATQVINEVEEVKKEYPDAYVRIIGFDNMRQVQCVRFIAFKPPGCEESGKA

SEQ ID NO: 569 - protein, 364 aa, Mentha x piperita
MEASFENGRKRSSSSSSEEESAFSFAMELAAGSVLPMVIKSAIDLNLLELIKRGGEEGASAYELAAQINAENPKAAAEMIDRILQLLAAHSVLTCRVETPPSRRRRYSLAAVCKFLTRDEDGASLAPLSLLVQDRVFMEPWYHLKDVIVEGGVAFERAYGVHAFEYHAKDPKFNKIFNQAMHNQSIIFMKRILEIYKGFEGVKSLVDVGGGTGASSKMIVSKYPLIKAINFDLPHVIQDASPHPEVEHVGGDMFVSVPKADAIFLKWICHDWSDEHCRKLLKNCYDAILGNGKVIIAESTLPEDPNSGPDTIHAIRGDVIMLTVNPGGKERTEKEFRTLALQAGFKRLVKVCAAFHTCIMECHK

SEQ ID NO: 570 - protein, 200 aa, Clostridium acetobutylicum ATCC 824
MNNKKSTNVVWQETKIKRQNREKMLKQKGAVLWFTGLSGSGKSTVASALEKKLYEMGYLTYLLDGDNLRYGLNSDLGFKSEDRTENIRRVSEVAKLFADAGIITITTFISPFIEDRNNARKLLGKDFVEVYIDCPIEVCEKRDPKGIYKKARNGEIKNFTGIDSPYEKPEKPEITVETYKDTEEKCVDNIIEYLKQHKIL

SEQ ID NO: 571 - protein, 360 aa, Populus tomentosa
MGSTGETQMTPTQVSDEEAHLFAMQLASASVLPMILKTAIELDLLEIMAKAGPGAFLSTSEIASHLPTKNPDAPVMLDRILRLLASYSILTCSLKDLPDGKVERLYGLAPVCKFLTKNEDGVSVSPLCLMNQDKVLMESWYYLKDAILEGGIPFNKAYGMTAFEYHGTDPRFNKVFNKGMSDHSTITMKKILETYKGFEGLTSLVDVGGGTGAVVNTIVSKYPSIKGINFDLPHVIEDAPSYPGVEHVGGDMFVSVPKADAVFMKWICHDWSDAHCLKFLKNCYDALPENGKVILVECILPVAPDTSLATKGVVHVDVIMLAHNPGGKERTEKEFEGLANGAGFQGFEVMCCAFNTHVIE

SEQ ID NO: 572 - protein, 636 aa, Zea mays
MLSTRTAAVAASASPASPWKLGGRSEGGASCDGCRTYRNTLRRRAAPAKVRALPPRRVDAVAMVSNAETETEKEQEEAAAASEELPVMPWATSVASGYTLLRDPHHNKGLAFTEEERDGHYLRGLLPPAVLSQELQIKKFMNTLRQYQTPLQRYIAMMNLQETDERLFYKLLIDNVVELLPFVYTPTVGEACQKYGSIFGRPQGLYVSLKDKGKVLEVLRNWPHRNIQVICVTDGERILGLGDLGCQGMGIPVGKLALYTALGGVDPSVCLPITIDVGTNNEKLLNDEFYIGLRQKRATGEEYDELIEEFMSAVKQFYGEKVLIQFEDFANHNAFDLLEKYSKSHLVFNDDIQGTASVVLAGLLAALKMVGGTLAEQTYLFLGAGEAGTGIAELIALEISKQTNAPIEECRKKVWLVDSKGLIVDSRKGSLQPFKKPWAHEHEPLKTLYDAVQSIKPTVLIGTSGVGRTFTKEIIEAMSSFNERPIIFSLSNPTSHSECTAEQAYTWSQGRSIFASGSPFAPVEYEGKTFVPGQSNNAYIFPGLGLGLVISGAVRVHEDMLLAASKALADQATQDNFEKGSIFPPFTSIRKISAHIAAAVAAKAYELGLATRLPPPSDLVKYAENCMYTPVYRNYR

SEQ ID NO: 573 - protein, 468 aa, Novosphingobium aromaticivorans DSM 12444
MIIDGARVSGGGRRTHAVVNPATGETIGELPLAEVADLDRALEVAAKGFRIWRDSTPQQRAAVLQGAARLMLERQEDLARIATMEEGKTLPEARIEVLMNVGLFNFYAGEVFRLYGRTLVRPAGQRSTITHEPVGPVAAFAPWNFPLGNPGRKLGAPIAAGCSVILKAAEETPASALGVLQCLLDAGLPKEVAQAVFGVPDEVSRHLLGSSVIRKLSFTGSTVIGKHLMRLAADNMLRTTMELGGHGPVLVFGDADIDKALDTMAASKYRNAGQVCVSPTRFIVEESVFERFRDGFAERVGRIKVGNGLDQDAQMGPMANARRPEAMDRLIGDAVTRGARLHTGGERVGNAGYFYAPTVLSEVPLDAAIMNEEPFGPVALINPFGGEEAMIAEANRLPYGLAAYAWTDSAARAKRLAREIETGMLGLNSTMIGGADSPFGGVKWSGHGSEDGPEGVMACLVTKAVHEG

SEQ ID NO: 574 - protein, 488 aa, Arabidopsis thaliana
MESGGKTNRQLRKAICVSTDEKMKKKRSPSVIVIGGGMAGISAARTLQDASFQVVVLESRDRIGGRVHTDYSFGFPVDLGASWLHGVCKENPLAAVIGRLGLPLYRTSGDNSVLYDHDLESYALFDKAGNQVSQELVTKVGENFEHILEEICKVRDEQDEDMSIAQAFSIVFKRNPELRLEGLAHNVLQWYLCRMEGWFAADAETISAKCWDQEELLPGGHGLMVRGYRPVINTLSKGLDIRLSHRITKISRRYSGVKVTTEKGDTFVADAAVIALPLGVLKSGMITFEPKLPQWKQEAINDLGVGIENKIILNFDNVFWPNVEFLGVVAETSYGCSYFLNLHKATSHPVLVYMPAGQLARDIEKKSDEAAANFAFSQLQKILPDASSPINYLVSRWGSDINSLGSYSYDIVNKPHDLYERLRVPLDNLFFAGEATSSSYPGSVHGAYSTGVLAAEDCRMRVLERYGELEHEMEEEAPASVPLLISRM

SEQ ID NO: 575 - protein, 124 aa, Bromus inermis
MAARRAHAAATLALLAAVLVLSAAPAPAEGAVSNCGQVVSYLAPCITYATGRAPGPNGGCCSGVRSLNAAASTTADRQATCSCLKQQTSGMGGIKPDLVAGIPSKCGVNIPYAIKPSTDCTKVR

SEQ ID NO: 576 - protein, 169 aa, Brassica napus
SVNNVTASPDGKLVAVLGDSPECLLADAGSGKVIHALEGHLDYSFSSAWHPNGQILATGNQDTTCRLWDVRNLSKSLKVLKGNMGAIRALRFTFDGRFLAMAEPADFVHVFDTEAGYSQCQEIDMFGEVAGISFSPDTEALFVGVADRTYGSLLEFSRKRNHLYLDSIF

SEQ ID NO: 577 - protein, 380 aa, Zea mays
  misc_feature (123)..(123): Xaa can be any naturally occurring amino acid
SESESEAASRRQGEMGKGAQGSDAAAAGGEVEENMAAWLVAKNTLKIMPFKLPPVGPYDVRVRMKAVGICGSDVHYLREMRIAHFVVKEPMVIGHECAGVVEEVGAGVTHLSVGDRVALEPGXSCWRCRHCKGGRYNLCEDMKFFATPPVHGSLANQVVHPADLCFKLPDGVSLEEGAMCEPLSVGVHACRRAGVGPETGVLVVGAGPIGLVSLLAARAFGAPRVVVVDVDDHRLAVARSLGADAAVRVSPRAEDLADEVERIRAAMGSDIDVSLDCAGFSKTMSTALEATRPGGKVCLVGMGHNEMTLPLTAAAAREVDVVGVFRYKDTWPLCIDFLRSGKVDVKPLITHRFGFSQRDVEEAFEVSARGRDAIKVMFNL

SEQ ID NO: 578 - protein, 256 aa, Zea mays
RTRGRTRGRTRGRTRGRTRGRTRGRLPSCAAVSISTPPSSAAPLHYGHRTPLASPFPLSPPCPRILRAAVAVSSLDLRPITGGFALFSMAAASSATSVHDFTVKDASGKDVDLSTYKGKVLLIVNVASQCGLTNSNYTELSQLYEKYKDQGFEILAFPCNQFGGQEPGTNEEIVQFACTRFKAEYPIFDKVDVNGDNTAPIYKFLKSSKGSLFGDNIKWNFSKFLVDNEGRVVERYAPTTSPLSIEKDIKKLLGSS

SEQ ID NO: 579 - protein, 364 aa, Cupriavidus necator
MSRCGRRAELLHAAGTGSGSASFPMSAAPSSSPDAPATPGLPSSPLDPQVAALLELIARAKRPPIHAMEPEDAKIAYEKSAPILDINPPPVYMAEDLLAPARDGHAIPLRLYTPREASWTEPLPLLVYFHGGGFTVGSVDSHDPLCRLLCGQADCMVLSVDYRLGPQWRFPTAANDAFDVLHWVFAEAGRLGADPARIAVGGDSAGGTLAAACAVEARNAGLAPVLQLLIYPGTCARQDTPSHRALADGYLLTADMIRWFFAQYLDQEASRDDWRFAPLDGGGAGAEVRGTCPAWIAVAGYDPLHDEGVAYAEKLRAAGVAATLADYPGMIHDFFKLGRFVPAVAQAHAEAVAALRAAFGTPHN

SEQ ID NO: 580 - protein, 439 aa, Arabidopsis thaliana
MDKNGIVLMRKYELGRLLGQGTFAKVYHARNIKTGESVAIKVIDKQKVAKVGLIDQIKREISVMRLVRHPHVVFLHEVMASKTKIYFAMEYVKGGELFDKVSKGKLKENIARKYFQQLIGAIDYCHSRGVYHRDLKPENLLLDENGDLKISDFGLSALRESKQQDGLLHTTCGTPAYVAPEVIGKKGYDGAKADVWSCGVVLYVLLAGFLPFHEQNLVEMYRKITKGEFKCPNWFPPEVKKLLSRILDPNPNSRIKIEKIMENSWFQKGFKKIETPKSPESHQIDSLISDVHAAFSVKPMSYNAFDLISSLSQGFDLSGLFEKEERSESKFTTKKDAKEIVSKFEEIATSSERFNLTKSDVGVKMEDKREGRKGHLAIDVEIFEVTNSFHMVEFKKSGGDTMEYKQFCDRELRPSLKDIVWKWQGNNNNSNNEKIEVIH

SEQ ID NO: 581 - protein, 202 aa, Zea mays
LSVFALTRAPAFCELSLPLTKEKAAFSPSDPAMQRHVASGRPSGTDGSDFSYRMVVESRYQRVAEGRSRLARLILVQALHLVAGGLLLLLSLSKGAAVNKFAVLSMAAGFLAIVVGELGRMRTMAVLLRLYTSLSSIAVAFSVTCIIRSELFLKVMKQNTEAITSYEMLDAVRVALGILLQMVVIATTTRLLQNMSPPKRAS

SEQ ID NO: 582 - protein, 211 aa, Zea mays
GRVGGRVGGRVGGRVGCAPLMLRLAWHSAGTFDVATKTGGPFGTMKNPAEQAHGANAGLEIAIRLLEPIKEQFPILSYADFYQLAGVVAVEVTGGPDVPFHPGRQDKPEPPPEGRLPDATQGSDHLRQVFSTQMGLSDQDIVALSGGHTLGRCHKDRSGFEGAWTSNPLIFDNSYFKELLSGEKEGLLQLPSDKALLSDPSFRPLVDKSQF

SEQ ID NO: 583 - protein, 79 aa, Triticum aestivum
  misc_feature (35)..(35): Xaa can be any naturally occurring amino acid
  misc_feature (68)..(68): Xaa can be any naturally occurring amino acid
EVKVSEDGTVRATDFKKITTGKDDKGLKTYDPGYXLNTAPVRSSICYIDGDEGILRHRGYPIEEVAEXSSFVEVAYLLM

SEQ ID NO: 584 - protein, 463 aa, Bradyrhizobium japonicum USDA 110
MTPTMLPSSQQARDVAYQLHAYTNARSHQRAGPLIIERGEGPYVFDTAGKRYLDAMAGLWSAGLGFSEKRLIEAAHRQMQILPFYHTFASRSNGPSIALAEKLVKMSPVPMSKVFFTNSGSEANDTVLKLIAYRSNAAGQPQRKKVISRLRGYHGVTIGAASLTGFPDNHRSFDLPLPNIMHTGSPHFYKDSRAGESEETFATRRAEELESLIQREGADTIAAFFGEPVMGAGGVIVPPPTYWDKIQSVLKKHSILLVADEVICGFGRTGKMFGCETYNIAPDVIVVSKQLTSSYFPLSAIIMNDYMFEPIADESNKVGLLAHGFTGGGHPVGAAVALENLKLIEERGLIANVGRIGAYMQERLRTLVDHPLVGEVRGVGLIAAIELVLDKKRKVAATTPGDVGSIASRLLHERGIIVRNVDDALSICPPLIVNKDQIDELIDGITGMLHDLKATVVNCREPH

SEQ ID NO: 585 - protein, 205 aa, Triticum aestivum
ARRRYPGYDDPMQLAAQTAFSVSEVEALFELFKTISGSVIDDGFINKEEFQLALFKSKMDNIFANRIFDLFDVKKRGVIDFADFVQALNVFHPSIPMEEKIDFSFKLYDMDNTGFIERKEVKQMLIALLSESGMRLSDETIESIIDKTFSDADVNQDGKIDRAEWENFVSRNPSLMKIMTLPYLKDITTTFPSFVFNSKVDDIVT

SEQ ID NO: 586 - protein, 397 aa, Bacillus halodurans C-125
MANPNLKEEAIALHQKHSGKLEIVGKMEITDEKDLSLVYTPGVADVCKQIAEQPDKVNSLTSRGNMVAIVTDGTAVLGLGNIGPKAAMPVMEGKALLFKKFANIDGFPVCLNTQDTDEIVQIIKALSPTFAGINLEDIAAPRCFEIEERLKEELDIPVFHDDQHGTAIVVLAALTNALKVVNKLNQPIKMVINGAGAAGTAIANLLLHAGFKDITLVSLEGVVAKGEAWLNPMQAKMAEVTNLAGVKGTLKDAITDADVFIGVSGPGAMKKEHIQAMAKDPIVLALANPIPEIYPEEAIEAGAAVVGTGRSDYPNQVNNLLAFPGIFRGALDAGAKTITMEMKIAAAYAIADVLSDKEVNANMIIPDALDARVAQRVAEAVATTALQRERVAALSAN

SEQ ID NO: 587 - protein, 183 aa, Amaranthus hypochondriacus
MASSMLSNAAMATTAATAGAQASMVAPFNGLKSFATFPITKKSSNDFSSLPSNGGRVQCMQVWPPVGKKKFETLSYLPPLSDAQLLAQVQYLLNKGWIPCIEFELEHPFVYRENHRSPGYQDGRYWTMWKLPMYGCTDPAQVLNEVEEAKKAYPSAFIRIIGFDNKRQVQCVSFIAYKPAGGL

SEQ ID NO: 588 - protein, 244 aa, Brassica napus
MEVITHPTPRTVDEVFTDFRGRRAGLIKALTTDMVKFYQTCDPEKENLCLYGLPNETWEVNLPVEEVPPELPEPALGINFARDGMQEKDWVSLVAVHSDSWLLSVAFYFGARFGFGKNERKKLFQMINELPTIFEIVTGNAKQSKDLSGNNNTSSKSKSNGLKVPKMSSPPPKEEDESEAEDEDDEQGAVCGACGDSDGTDEFWICCDACEKWFHGKCVKITPAKAEHIKPYKCPSCSNKRARP

SEQ ID NO: 589 - protein, 109 aa, Glycine max
MSGVWVFKNGVVRLVENPGGEAVEGSRGGRRKVLVHRASNEVITSYAVLERKLYSLGWERYYDDPDLLQFHKRSTVHLISLPRDFNKFKPMHMYDIVVKNKNAFEVRDM

SEQ ID NO: 590 - protein, 431 aa, Corynebacterium efficiens YS-314
MSNVGTPRTAQEIQQDWDTNPRWNGITRDYTAEQVAELQGSVVEEHTLAKRGAEILWDAVSAEGDDYINALGALTGNQAVQQVRAGLKAVYLSGWQVAGDANLAGHTYPDQSLYPANSVPNVVRRINNALLRADEIARVEGDTSVDNWLVPIVADGEAGFGGALNVYELQKGMITAGAAGTHWEDQLASEKKCGHLGGKVLIPTQQHIRTLNSARLAADVANTPTVVIARTDAEAATLITSDVDERDRPFITGERTAEGYYHVKPGLEPCIARAKSYAPYADMIWMETGTPDLELAKKFAEGVRSEFPDQLLSYNCSPSFNWSAHLEADEIAKFQKELGAMGFKFQFITLAGFHSLNYGMFDLAYGYAREGMPAFVDLQNREFKAAEERGFTAVKHQREVGAGYFDTIATTVDPNSSTTALKGSTEEGQFH

SEQ ID NO: 591 - protein, 122 aa, Hordeum vulgare subsp. vulgare
MARLNSKAVAAAVVLAAVVLMMAGREASAALSCGQVDSKLAPCVAYVTGRASAISKECCSGVQGLNGLARSSPDRQTACRCLKSLATSIKAINMGKVSGVPGKCGVSVPFPISMSTDCNKVH

SEQ ID NO: 592 - protein, 248 aa, Chlamydomonas reinhardtii
MASAFERPRHAAGLDFDVEKGAALNAFAERTVRQGFVRKVFGLLAVQLALTTVIAGTFVTSTAVKTFVAAHPWVLMLGMLAGFGILLTLTLSSSARQSHPTNLILLFVFTAAEGVLVGAASSASRTDVVLLAFGLTAGITAAMTVYALTTKNDLTMSGAALYSCLWGLLLAGLVGMFVRTSAFNILLSAVGAVVFSVYIAYDVQCLLGGEHKYAVSPDEYVLGAIAIYLDIINLFMHILRLLNEANRN

SEQ ID NO: 593 - protein, 215 aa, Triticum aestivum
  misc_feature (19)..(19): Xaa can be any naturally occurring amino acid
  misc_feature (98)..(98): Xaa can be any naturally occurring amino acid
RGRGRGVNACIGSCGGLCXGVNTVMRELECGLAHMYNVNNIFGIQNGYKGFYSSNYVAITPKTVTDIHKRGGTVLGTSRGGHDTKKIADNIQDRGINXVYIIGGDGSQKGAYEIYKEIRKRGLIVAVAGVPKTIDNDIAIIDKSFGFDSAVEEAQRAINSAHVEACSAENGIGLVKLMGRYSGFIAMYATLASRDVDCCLIPESPFYMDGEGGLL

SEQ ID NO: 594 - protein, 486 aa, Xylella fastidiosa Temecula1
MMHHNVHQSEILADPCDLQRAERWRQRDLRVLWHPCTQMREHPDTLPLVPIVRGEGVWLVGHDGRRYLDAVSSWWTNLFGHADPRISAAIAAQARTLEHVMLAGFSHEPAVRLAEALLRLAPRQDGREPLSKVFYADNGSAGVEVALKMAFHYFRNRGEEQRTRFIALHNGYHGETIGALAVGDIPLYRRVYAPLLTEVLFAPSPDAYLAEPGQSAAEYALQAAEALEALFKRYSGQICALILEPLLQCAGGMRMHHPVYLHRVRELCDAHGALLICDEIATGFGRTGTLFACEQACSAISTDTDDKDLGIMPDLLCLSKGLTGGFLPLAAVLTTQQLYEEFLDDSRERAFLHSHSYTGNPLACIAALTTLDIFENDCIIERNQVTAARMTQLAASLSGHPHVADVRQTGMVVAFELTRDGNKRTPFPPQARLGLHVYRAALARGVILRPLGDVVYWMPPYCVDEQQLHLLAETTRVAIDEAIACV

SEQ ID NO: 595 - protein, 449 aa, Arabidopsis thaliana
MDIFDNSDLEYLVDEFHADFDDDEPFGEVDVTSESDSDFMDSDFDFELSESKTNNETSALEARNGKDIQGIPWESLNYTRDRYRENRLLHYKNFESLFRSREELDKECLQVEKGKNFYDFQFNTRLVKSTIAHFQLRNLVWATSKHDVYFMNNYSLMHWSSLLQRGKEVLNVAKPIVPSMKQHGSLSQSVSRVQISTMAVKDDLIVAGGFQGELICKKINEPEVAFCTKLTSADNDITNSVDIYNAPSGSLRVMTANNDCTVRLFDATNFALLNRFAFHWSVNNISTSPDGKLVAVLGDSPECLLADTGSGKVIHGLEGHLDYSFSSAWHPNGQILATGNQDTTCRLWDVRNLSQSLKVLKGNMGAIRALRFTSDGRFLAMAEPADFVHLFDTEAGYSQCQEIDLFGEIAGISFSPDTEALFVGVADRTYGSLLEFNRKRNHSYVDSIF

SEQ ID NO: 596 - protein, 155 aa, Triticum aestivum
MAAFLRSKCSSVGRAMMGSLGNNLYGGATSSIETVARPSRSDAVCQQIRTFIQMRTNLKVVDNSGAKRVMCIQSLRGKKGARLGDMIIGSVKEAQPRGKVKKGDVVYGVVVRAAMKKGRSDGSEVQFDDNAIVIVNNKGELIGTRVFGPVPHELR

SEQ ID NO: 597 - protein, 123 aa, Pyrus communis
LVEACKNSLEKLQLDYLDLYLVHYPMPTRHNAIGKTASLLGEDKVLDIDVTISLQQTWEGMEKTVSLGLVRSIGLSNYDLFLTRDCLAYSKIKPAVSQFETHPYFQRDSLVKFCIKHGVLPTA

SEQ ID NO: 598 - protein, 459 aa, Capsicum chinense
MANITNEFMGHDMLAPFTAGWQSDMEPLVIEKSEGSYVYDINGKKYLDTLSGLWCATLGGSETRLVEAANKQLNTLPFYHSFWNRTTKPSLDLAKELLNMFTANKMAKVFFTNSGSEANDTQVKMVWYYNNALGRPQKKKIIARAKAYHGSTYISAGLSGLPPMHQKFDLPPPFVLHTECPHYWAYHLPGETEEEFSTRLANNLESLILKEGPETVAAFIAEPVLGAAGVILPPATYFDKVQAILRKHDILFIADEVVCGFGRLGTMFGSDKYNIKPDLVSVGKALSSGYMPIAAVLVSQKISSVILSESNKIGAFCHGFTYSGHPVACAVALEALKIYKERNITEVVNKISQKFQEGLKAFADSPIIGEIRGTGLALSTEFVDNKSPNDPFPYEWAVGTYFGAQCAKYGMLVSSTGDHVNMAPPFILSLEELDELIRIYGKALKDTEKRVEELKSQKQ

SEQ ID NO: 599 - protein, 199 aa, Zea mays
  misc_feature (62)..(62): Xaa can be any naturally occurring amino acid
  misc_feature (74)..(74): Xaa can be any naturally occurring amino acid
  misc_feature (80)..(81): Xaa can be any naturally occurring amino acid
MAYSMLSSAAVVTSPAQATMVAPFTGLKSSSAFPVTRKANNDITSIVSNGGRVSCMKVWPPXGKRKFETLSYLXPDLTEXXNWVRKVDYLSPATGGFLGGESRVGATGFGYRGSTGKHPPETTKGRYWEKGETFPLGRKGPHLWLKGVKEAPKGEKGEPPNRLSTGILGFQNTPGEAGGSCFFPPKKTTNFSGGLKLPL

SEQ ID NO: 600 - protein, 357 aa, Streptomyces griseoflavus
MTITASGSLPPSAPVAVQILDLLMGGWRAGVVSTFAELGVADGLAAGGLTPAQLAVRLGLEHDTAERFFRAGASVGLLRRGEHDTLELTELGRALASDDGSMRNFARWTGSTAERATWAHLATAVRTGRSPFAAMHGSGVWEFMESDPDTAAVFNSAMTELSKRVIQPVIEAFDFSRFSSVTDVGGGRGALLAAVLRKHPEMTGVLFDQPDVVSRSLPELSDAAVAHRVTVKSGSFFDGVPSGSDLFMISNVLHDWDDGRSRLILRNIAEAMHEGAHIAVVEAVAGLDDTADKAISLMDMDMLLLCEGKQRTVEEFRLLMAEVGIELVGVSRAGLQSVVEGRKVSGETGTPGSPRSR

SEQ ID NO: 601 - protein, 338 aa, Glycine max
QIIPWNFPLVMFAWKVGPALACGNTIVLKTAEQTPLTALFVAKLFHEAGLPDGVLNVVSGYGPTAGAALASHMDVDKLAFTGSTDTGKVVLELAARSNLKPVTLELGGKSPFIICEDADVDKAVELAHFALFFNQGQCCCAGSRTFVHERVYDEFLEKSKKRALRRVVGDPFKKGVEQGPQIDVEQFEKVLRYIRSGIESHATLECGGDRLGSKGFFVQPTVFSNVQDDMLIAQDEIFGPVQSILKFKDIDEVIRRANKTRYGLAAGVFTKNVSTANTLMRALRAGTVWINCFDVFDAAIPFGGYKMSGIGREKGIYSLHNYLQVKAVVSPVKNPAWL

SEQ ID NO: 602 - protein, 498 aa, Streptomyces griseoflavus
MTASVPPFTVGREDPRYIELSHSDNHRFVVEPEEFFLPATPDDVVASLQKAVTEGRGVACRSGGHCGQDFVGTPRRDLVLDLHNLHAIGPAADGAGVRVGSGATVDQVQKALFRRWNAALPLGACSAVGMGGLVAGGGYGPLSRQLGLVVDHLHAVEVAVVDESRTVRLVTARADDTGDLGELFWAHTGGGGGNFGVVTAYEFRSPEHLATEPVGLPRAAGRLHVQKVVFPWAMIDETSFVTVMRRFFEWHERHSEPGSPESSLFATFFVNHVSSGVLQLMVQQDADVDPEGEILARFVASLTEGTGVVGIPRGGVMSWLTGTRYMSQADCGDVMGARSASKSAYHRAAPTDEQLSVLHRHLHADHPGQASYVMFNSYGGEINRRGPSDAAVPQRDSVVKSSWFSAWQDAELDELHLGWLRGLYEEFFAGTGGVPVTGGRTDGCYINYPDADLLDPARNRSGEPWHHLYYKDNYARLRSAKRAWDPLNTFHHSMSIGL

SEQ ID NO: 603 - protein, 448 aa, Bacillus sp. KSM-K16
MLDLCITGGRVVLPSGVEETDVGIQAGKIARIGPINKKEARCIMNANGQYVFPGAVDTHVHFSEPGRTEWEGFFTGSRSLAAGGTTTYVEMPLNALPATTNRANLQRKLEAAKGQNYVDYSFYGGLVPTNLHELADLSASGVVAFKCFLSPCGSDIPGDFRNVDLNGLRAGMRLLAEKGQLLCVHAEDPSMISQLEAKLLSPVGADAYVASRPVEAEVKAVCDTLAAARETGCRIHFVHISSAAAIEAIERAKEEGVDVTVESCPHYFLLSAEELAELGPLAKCQPPLRPKQEQAKLWACLLDGQIDWLASDHSPCTPDLKDGDFLTAWGGISGCQNNIDIMFDAAVKRRGMPPEQLARLIATNPAKRMNLREKGEIAIGKDADFAFVDDRQSYTLTKEQLYYKNKHSPYVGRTIGCKVRRVLLRGQTIYTEEKGIIGKPSGELLHIH

SEQ ID NO: 604 - protein, 473 aa, Thermobifida fusca
MSQRPFWLAGSATTGDNELTVTNPYTGQTVATVAVPSPEQVDQAVAAAHGALDATAALPAHVRATALAHVARRLQERSEEIAQLITAESGKPILWARAEVGRAVSVFTWAAEEVRRDSGRVQRLDTDSAGEGRIALIRRVPKGAVLAISPFNFPLNLVAHKVAPAIAVGAPIVVKPAPATPLSALVLGEILAETDLPAGAFSVLPMPNELAQPLITDERLPVISFTGGQFGWELRKMAPNKHVTLELGGNAAAVVLADADLDWAARRIALFGNNQAGQVCIGVQRVIVEDAVYDEFAAKLVQRVEELVTGDPADEATQVGPLINEAAAARVEQWVNEAVAGGATVLTGGTRDGVTMAPTVLADVPDDAKVVCEEVFGPVMVLRRVSGVDEAFAEVNNSKYGLQAGVFTRDLATAFRAHRELKVGGVIIGDVPTYRADQMPYGGVKKSGVGKEGVRSAMDDLTDERVMVLTGVL

SEQ ID NO: 605 - protein, 116 aa, Avena fatua
SQVYQKYKDQGLEILAFPCNQFGGQEPGTNEEIVEFACTRFKAEYPIFDKVDVNGKEVSPLYKFLKSSKGGLFGDSIKWNFSKFLVDKEGRVVDRYAPTTSPLSIEKDIKKLLGTS

SEQ ID NO: 606 - protein, 286 aa, Lactobacillus plantarum WCFS1
MTALTKLTDTYTLNNGTKIPIVGFGTWQTPDGQVAYDSVLAALKAGYRHIDTAAAYGNEESVGKAIADSGVAREDLFVTTKLWNADHGYDAAKKALDTSLAKLGLDYVDLYLIHWPNPAAMRDNWEQLNADTWRAMEEAYTARKARAIGVSNFRPKHLDALLKTAKVVPAVNQIFLNPSDMEDEVVAYNRKHDILSEAYSPLGTGKIFSIPELKTLADKYDKSVAQVVLRWSLQHGFLPLPKSVHADRIEQNTELFDFELSDDDMKVIDGFHGVAGLANDPDQVNF

SEQ ID NO: 607 - protein, 233 aa, Porphyra purpurea
MSTNVVWHEGLITREARAKLLGQKGATVWLSGLSGSGKSTVSVELEQQLFAKKVLSYRLDGDNIRQGLNKNLSFSPADRKENIRRISEVAKLMCDIGVVVTTAFISPYTEDRDMAREIHKAASIPFIEVFVDCPLEVAESRDPKGLYKKARSGEIKNFTGIDAPYEKPPSPEITLDTSKQTIAECAAVILTYLTEKGLISSEPKEEAKPAKELEVAPAAPAAEAEAEKVPAAV

SEQ ID NO: 608 - protein, 266 aa, Triticum aestivum
MQLEVMANRGKILMERYELGRLLGKGTFGKVHYARSLESNRSVAIKMLDKEKVLKVGLSEQIRREVTTMRLVAHKNIVQLHEVMATRNKIYFVMEYVKGGELFDKVAKSGKLTEGAAHKYFQQLISAVDYCHSQGVYHRDLKLENLLLDENENLKVSDFGLSALSESKRQDGLLHTTCGTPAYVAPEVISKTGYDGAKSDIWSCGVILFVLVAGYLPFHGSNLMDMYRKIEQGDFRCPNWFSHKLQKLLFKILDPNPSTRASIQKI

SEQ ID NO: 609 - protein, 214 aa, Glycine max
MEQEEHEVYGADIPDEEIDMDADAEQQDEQLAPNHTNKELEDMKKRLKEIEEEASALREMQAKVEKEMGAVQDSSGTSATQAEKEEVDARSIYVGNVDYACTPEEVQQHFQSCGTVNRVTILTDKFGQPKGFAYVEFVEIDAVQNALLLNESELHGRQLKVSAKRTNVPGMKQYFGRRPAGFRSRRPFMPAPFFPPYGYGRVPRYRRPTRYRPY

SEQ ID NO: 610 - protein, 496 aa, Enterococcus faecalis V583
MSKKEINQVVASSYQLYINGEWTTGSGNKMIASYNPSNGEKLAEFVDATNADVDRAVEAAQEAFQTWKDVDVVTRSNLLLKIADLIEENQEHLAMVETLDNGKPLRETQSIDVPASADHFRYFASVIRGEEGSVKEFDKDTLSIVVKEPIGVVGQIIPWNFPLLMGAWKLAPALAAGNTVVIHPSSSTSLSLLELFKIFDQVLPKGVVNLITGRGSDSGNYMLAHPGFDKLAFTGSTEVGYTVAKAAADRLIPATLELGGKSANIIFEDANWERALEGVQLGILFNQGQVCCAGSRVFVQSGIYDQFVEALKEKFEQVNVGFPWEKDVEMGAQINEHQLEEILKYVEIGVKEGATLITGGQRLTENGLDKGAFLAPTLLANGTNAMCVAQEEIFGPVATVIKFETEEEVIRLANDSEYGLGGAVFSQDINVALRVARGVRTGRMWVNTYNQLPAGAPFGGYKKSGIGRETHKSMLDAYTQMKNIYIVTKEEADGLY

SEQ ID NO: 611 - protein, 99 aa, Brassica napus
MAAAAKLSFKDSLKALEADIQHANTLALDYPREKDGARVQMRLSYSPAAQFFLFLVQWTDCHLAGSLGLLRVLIYMTYADGKTTMSVYERKASIREFYA

SEQ ID NO: 612 - protein, 246 aa, Glycine max
MTSASELFHSRRHRLGRSALDLGLDTELNAADSLRRHYHLRRLRHHPERASDRIDGRYRRSFASESVDSEENVRSSLRGSDSERLPVGVVLARARLLQRLRGEPLSTNSATQYDRDSFGEDPESESSNEDPSGASLVTELTSQMARSQFLQELSTKPPGLTQEALDCLHQEVFSSNASEIGLDSRVLQDCSICLESFTDGDELIRLPCGHKFHSVCLDPWIRCCGDCPYCRRCIVVNTHSSLNEDE

SEQ ID NO: 613 - protein, 512 aa, Oryza sativa (japonica cultivar-group)
MEKLKSELWMTAVATCMSLLLYLTILRRRHASGGRSLALPPGPTPLPLIGNLLCLGGIFHQTLAKLARVHGPVMTLKLGLTTAVVVSSAEAAREAYTKHDQRLAARPVPDAFRANGFSERSIVFSPSSDPQWKNLRGIHATHIFSPRALAALRGIRERKVRDIVGYIRTVAGEEMCVREVVHNGVLNLISTSFFSMDMADVRSESARGLRGLIEDIIATVAGPNVSDFFPFLRQLDLQGLRRQTGSHLGIVFGLLDDIIDRRMAETRDHPDKQRHGDFLDALISLASAGKIPRYHITYLLFDVFAAGADTMTTTVEWAMAELLRNPRVMAKVRAEVTDALGGRESFDEGDAASLTYLQCVFKEAMRLHPVGSILVPHLAVQDGVEIGGYAVPKGTTVIFNAWAIMRDPAAWESPDQFLPERFLHKEESSSPPLELRGKDYEYIPFGSGRRLCPGLPLAERAVPFILASLLHAFEWRLPDGMSPDDMDMTEKFATANVLATPLKAVPVASHTS

SEQ ID NO: 614 - protein, 143 aa, Pichia angusta
MSRSGVAVSDEALKAFNDLKLGKKFKSIIYKLNDAKTEIVVDSTSTEDAYDAFVEDLPENDCRYAVYDFEYEVGQGDGKRNKIVFYQWSPDTASVRAKMVYASSKDALRRALNGIGTEIQGTDFSEVAYESVLEKISRTTGLH

SEQ ID NO: 615 - protein, 441 aa, Zea mays
MSQPKIKRRVGKYEVGRTIGEGTFAKVKFARNSETGEPVALKILDKEKVLKHKMAEQIRREVATMKLIKHPNVVRLYEVMGSKTKIYIVLEFVTGGELFDKIVNHGRMSENEARRYFQQLINAVDYCHSRGVYHRDLKPENLLLDTYGNLKVSDFGLSALSQQVRDDGLLHTTCGTPNYVAPEVLNDRGYDGATADLWSCGVILFVLVAGYLPFDDPNLMNLYKKISAAEFTCPPWLSFTARKLITRILDPDPTTRITIPEILDDEWFKKEYKPPIFEENGEINLDDVEAVFKDSEEHHVTEKKEEQPTAMNAFELISMSKGLNLENLFDTEQGFKRETRFTSKSPADEIINKIEEAAKPLGFDVQKKNYKMRLANVKAGRKGNLNVATEIFQVAPSLHMVEVRKAKGDTLEFHKFYKKLSTSLDDVVWKTEDDMQMRETK

SEQ ID NO: 616 - protein, 128 aa, Glycine max
  misc_feature (51)..(51): Xaa can be any naturally occurring amino acid
VCSMISSPAVTTVNRAGACMVAPFTALKSMVGFPWRKTTIDITFVAINGGXVQCMLVSPPIANKKFETLSYSPYLNDAQLLYEVKYHLKTGWIPCSQFDTDHGLGYHDHNRAPGYYYGLYWTMWKLPM

SEQ ID NO: 617 - protein, 95 aa, Glycine max
  misc_feature (54)..(54): Xaa can be any naturally occurring amino acid
ASSKISFPVVTTDNRAGAGMVAPFTGLIFMAGFPTIKTNIDITSIASNGGRVQXFQVWPPAGNKKFETLTFLTDLDNAQLSNEVKYLLKKGWIPC

SEQ ID NO: 618 - protein, 399 aa, Candida tropicalis
MMNIDQHHQQLQQQSQAQAQAQAQAQAQAQAQAQAQAQAQAAAAAVAASSQRQVSFNVSDHYQILEIVGEGAYGIVCSAIHKPSNQKVAIKKIEPFERSMLCLRTLRELKLLKHFNHENIISILAIQRPLNFESFNEIYLIQELMETDLHRVIRTQNLTDDHIQYFIYQTLRALKAMHSANVLHRDLKPSNLLLNSNCDLKVCDFGLARSIASQEDNYGFMTEYVATRWYRAPEIMLTFQEYTTAIDVWSVGCILAEMLSGRPLFPGRDYHNQLWLIMEVLGTPNMEDYYNIKSKRAREYIRSLPFCKKIPFQELFSNKPGINPLALDLLEKLLIFNPAKRITVEDALKHPYLQLYHDPNDEPISDKIPEDFFDFDKKKDSLTIEDLKKMLYEEIMKPL

SEQ ID NO: 619 - protein, 147 aa, Pyrus communis
VVGAGPIGLVTLLAARAFGAPRIVIADVNDERLSIAKSLGADEVVRVSTNIEDVAEEVAKIQKVLENGVDISFDCAGFNKTITTALSATRPGGTVCLVGMGQREMTLPLATREVDIIGIFRYQNTWPLCLEFLRSGKIDVKPLITHR

SEQ ID NO: 620 - protein, 397 aa, Saccharomyces cerevisiae
MSTEEQNGGGQKSLDDRQGEESQKGETSERETTATESGNESKSVEKEGGETQEKPKQPHVTYYNEEQYKQFIAQARVTVGSIVYKNFQILRTLGTGSFGRVHLIRSRHNGRYYAMKVLKKEIVVRLKQVEHTNDERLMLSIVTHPFIIRMWGTFQDAQQIFMIMDYIEGGELFSLLRKSQRFPNPVAKFYAAEVCLALEYLHSKDIIYRDLKPENILLDKNGHIKITDFGFAKYVPDVTYTLCGTPDYIAPEVVSTKPYNKSIDWWSFGILIYEMLAGYTPFYDSNTMKTYEKILNAELRFPPFFNEDVKDLLSRLITRDLSQRLGNLQNGTEDVKNHPWFKEVVWEKLLSRNIETPYEPPIQQGQGDTSQFDKYPEEDINYGVQGEDPYADLFRDF

SEQ ID NO: 621 - protein, 160 aa, Bartonella quintana
SIDQLAEKGDFLESCYLLLYGELPTKQEKIDFDRCIMQHMMVHEQFTRFFHGFRRDSHPMAVMVACLGAMSAFYHDSIDIKDAQQRMIAAIRLISKVPTLAAMAYKYSIGQAFVYPRNDLSYAANFLHMCFSVPCEEYKINPVLSRAMDRIFTLHADHEQ

SEQ ID NO: 622 - protein, 484 aa, Comamonas testosteroni
MKDIQNFINGAYVSTGRSFDKHSPLTGKVIAKVHEAGRNEVDAAVTAARTALNGPWGRMSVAERVEKLYAVADGINRRFEEFLAAECADTGKPRSVASHIDIPRGAANFKIFADVVKNVPTEFFEMATPDGRGAINYGHRGPVGVVGVICPWNLPLLLMTWKVGPALACGNTVVVKPSEESPQTAALLGEVMNEAGIPPGVYNVVHGFGPDSAGEFVTSHPGVDAITFTGETRTGEAIMKAAAKGARPVSLEMGGKNAAIVFADCDFDAAIDGTLRSAFVNSGQVCLGTERVYVERPIYERFVAALKQQIEGWKIGVPEDDDTKLGPLISKEHQAKVLSYYQLAVQEGATVVTGGGMPDLGAQYADGAWVQPTIWTGLPETARVIKEEIFGPCCHIAPFDTEEEVLTKANDNVYGLASAIWTQDLARAHRVAQRMHVGISWVNSWFLRDLRTPFGGAKQSGIGREGGVHSLEFYTELKNVCIKL

SEQ ID NO: 623 - protein, 118 aa, Glycine max
MATLDSDVTMVPAGEPSTSAGPSSSTKKPKRFEIKKWNAVSLWAWDIVVDNCAICRNHIMDLCIECQANQASATSEECTVAWGVCNHAFHFHCISRWLKTRQVCPLDNSEWEFQKYGH

SEQ ID NO: 624 - protein, 214 aa, Arabidopsis thaliana; identical to SEQ ID NO: 210

SEQ ID NO: 625 - protein, 191 aa, Zea mays
MSLCTIARRLCLSKPSSVNRLSVIWAHLYSTEAAKDTGAKKYKYPDVYDPYGPMSLPSEKVVDLADRIAALPPEEIKQIAPALLFRLNQEPPQAISGQGFSFVAQGGAGVGAGKAEKKAEKTVFDVRLEKFDAAAKIKIIKEIRTFTDLGLKEAKELVEKAPVVLKQSLTKEEAEAIIAKIKAAGGVAVME

SEQ ID NO: 626 - protein, 92 aa, Triticum aestivum
  misc_feature (14)..(14): Xaa can be any naturally occurring amino acid
  misc_feature (73)..(73): Xaa can be any naturally occurring amino acid
MAFSMLSFGTMAAXSAAQATMVAHFNGLMSSAVFPATATANNDTTCMTSNGGRGNCMQVWPTIVKKKIETLSXLSDPTDSAWAYEVDYLIRN

SEQ ID NO: 627 - protein, 206 aa, Oryza sativa
VYHPVKLVRESTKPVPNGSPPTLGGLLKTKVQEGVRVIVFLWDDKTSHDKFLLKTDGLMHTHDEEARKFFRHSGVHCVWAPRYASNKLSIFKQQVVGTLFTHHQKCVIVDTQVIGNNRKITAFIGGLDLCDGRYDTPEHRLFKDLDTVFKDDFHNPTFQVNKSGPRQPWHDLHCKIEGPAAYDILTNFEQRWRKSAKWKVSVRRAV

SEQ ID NO: 628 - protein, 332 aa, Oryza sativa
SVKGFPKLVQEAESQNLVCAKNLQIDKSIHNAYVKAIRSAQHYIYIENQYFIGSSYYWSSNRSAGAENLIPIELAIKIARKIKARERFAAYIVIPMWPEGNPTTAAMQEILFWQGQTMSMMYKIVAEALQKEGLDDTHPQDYLNFYCLGKREVSNDVSTTSQSNENSPQRLVQKFKRFMIYVHSKGMIVDDEYVLIGSANINQRSMDGSRDTEIAMGAYQPHYSWAGRKKAPRGQVYGYRMSLWAEHLGTVEECFRWPHSVECVRQVNEMAEENWARYVSPEMVNMRGHLMRYPINVERDGRVGPVHGYECFPDVGGKVLGTHSSLPNALTT

SEQ ID NO: 629 - protein, 320 aa, Botryotinia fuckeliana
MPAYSDKVMLTFNNTVKQTTGFESGATKLKNMLRDSNELIVCPGVYDGISARVALQVGFPALYMTGAGTTASRLGMADLGIAQLSDMKDHAEMIANLDPYGPPLIADMDTGYGGPLIIDKAVKSYIRAGVAGFHIEDQIQNKRCGHLQGKKVVPAEEYYMRIRAAKAAKEAMNSDIVLIARTDALQQLGYDECIKRLKVAREMGADVGLLEGYTSKEMAAKTVKEFAPWPILLNMVENGSTPIITTKEAQEMGFRIMIFSFAALAPAYLAIQETFLRLKRDGVVGTPKNLTPKALFDVCGLKDSIVVDTTAGGGAFADGV

SEQ ID NO: 630 - protein, 479 aa, Mesorhizobium loti MAFF303099
MAQFRKNLIDGEWVGDAGSHNINPSDTGDVVGEYASAGVEQAKQAIAAAKAAFPSWSRSGPLARHAVLKKASDEIMARKDEIGRNLAREEGKTLAEGIGETIRAAQIFDFFAGETLRLTGEMVPSVRPGVGVEITREAVGVVGIITPWNFPIAIPAWKIAPALAHGNTIVFKPAELVPESAWSIVDILHRAGLPKGVLNLVMGKGSVVGQAMLDSPDINAITFTGSVGTGKRVAAASVEHMRKFQLEMGGKNPLVVLDDADLAVAVDCALNGAFFSTGQRCTASSRLIVTEDIHDRFVEALKERMGKLVIGDALDAQTQIGPVVDATQLKQDEDYIAIGVREGATLAFGGERLDRKTPGFYLSPALLTEATNAMRSSREEIFGPVASVIRVKNYDEALSVANDTPFGLTSGICTTSLKHATHFKRNSEAGMVMVNLPTAGVDFHVPFGGRKGSSYGPREQGRYATEFYTTVKTAYTFAG

SEQ ID NO: 631 - protein, 511 aa, Streptomyces coelicolor A3(2)
MHNPGNATPDRFPAQDRFADGAQYIAGRLTKGTSGRTHTVVDPATGEDVLTYDLAGPDDVDAAVAAARAAFPGWAGATPGERSDALHRFAAVLAERAEDFARAESLQCGKPLKLTREFDVPGTVDNAAFFAGAARHLQGQSAGEYSGDHTSYVRREPIGVVGSIAPWNYPLQMAAWKILPAIAAGNTIVLKPAEITPLTSLMFAQAATEAGIPDGVINVVSGTGREAGEHLVAHPDVAMTSFTGSTAVGKRVAEVATATVKRLHLELGGKAPFLVFDDADLDAAVHGAVAGSLINTGQDCTAATRAYVQRPLYEAFVEKTAALMDTVRVGDPFAPGTDLGPLVSHVQRDRVAAFVDRARSYARVVTGGEVPQGDLKDGAYYRPTLVADAAQDSEVVQSEIFGPVLVVLPFDTDDEGIRLANDTPYGLAASAWSRDVYRANRATREIKAGCVWINDHIPIISEMPHGGYKASGFGKDMSAYSFEEYTQVKHVMFDNTAVAAKDWHRTVFGDR

SEQ ID NO: 632 - protein, 208 aa, Zea mays
MDEEEHEVYGQEIPVDGDMEAADVDMTAAGDDAAKELDEMKRRLKEMEEEAAALRDMQAKVAKEMQGGDANASTAEAKEQVDARSVYVGNVDYACTPEEVQQHFQACGTVNRVTILTDKFGQPKGFAYVEFLEQEAVQEALNLNESELHGRQIKVSPKRTNVPGMKQRPPRGFNPYHAYPYRSYGAPYFPLYGYGRVPRFRRPTRYRP

SEQ ID NO: 633 - protein, 305 aa, Helianthus annuus
MPSQSDLDRQIEHLMDCKPLPEEVRTLCDQARTILVEEWNVQPVKCPVTVCGDIHGQFHDLLELFRIGGSAPDTNYLFMGDYVDRGYYSVETVTLLVALKVRYRDRITILRGNHESRQITQVYGFFDECLRKYGNANVWKHFTDLFDYLPLTALIESQIFCLHGGLSPSLDTLDNIRALDRIQEVPHEGPMCDLLWSDPDDRCGWGISPRGAGYTFGQDIAAQFNHTNGLSLISRAHQLVMEGYNWSQENNVVTIFSAPNYCYRCGNMAAILEVGENMDQNFLQFDPAPRQVEPDVARRTPDYFL

SEQ ID NO: 634 - protein, 501 aa, Photorhabdus luminescens subsp. laumondii TTO1
MSSEFCFVKYGFDKNLNKLINEFQFDELSTGTILFRSTTKVSKFKSERYTAFLIGNIYNISTIRSILGKIEGRSSVLSDVEILLLSRDKFGNSIISIAEGDYCLFIEDKKGNIEVITESRGLNLVNLVQTDLIWITNSLKIVGKVEGDKAFDFKPESEVIKNSLKPDNFSPIRNVSRLKPGTINKLTFDEQRYLHLEVEYVISPVEENSFDIKESVLLEIIDSDLRNSISRLSKNNETIGVPLSGGLDSSLVTALASKYFDKVKTWSIGTELSNEFEFSKIVSDYLGTEHEVKILSEDEVISGVVKAIYYNEIFDGLSSEIQSGLFNVYELAKGKVNSLITGYGSDLLFGGILDPEKSYIEPNKILSEQVYRTKWTGEFSTHGAGNYGLNVYHPFWTNNLISLCHNLDPYFKIRDNEVKNILREYANSINILPKEIVWRKKIGIHEGSSVNKSFATMIGTEVNNYQDKTRFSYSIYKEFLTGRLSIEEANSTKLCEIIRRN

SEQ ID NO: 635 - protein, 300 aa, Sulfolobus tokodaii str. 7
MYEWHWHIEWQTPYEFHGHAITKVIAEEKTPYQRALLVELARFGKALILDGKIQSTITDEFIYHEALVHPLLLSINNPEKILILGGGEGATLREVLKHKTIKNVTMVDIDPVVIDFAKKYLQEWHQGAFDNPKSKLVIEDGYKFIKETKEKFDAVVIDLTDPIKDSPSQMLYTKEFYEEVKRISKWGIVTQATSPSFSLETFSIIYNTIKHVFKKVSAGITYVPAFDGLWGFVYASDEVNPAEFSKEEINNRIKERIDGSLRFYDGETHITMFSIPKHIREVLEKENKISTRENPVAVPA

SEQ ID NO: 636 - protein, 276 aa, Schizosaccharomyces pombe
MKPFSPSQTNFEKEQLCFGVYQLKDCYQQVIEALSLGIRVIDSAITYRNEKECEQAIQDFCHQNVNIKREDITLITKIPDSLQGFERTWKAVEQSLRRTGRPKLDVVLIHSPKWPVRRIESWRALLQHQKEGRINKIGVSNYNIHHLEEIISLGLPLPAINQVEFSAFNNRPTFLSYCFNHGILVQAFSPLTRGYRLSDIRLLDLSLKYNKTPANILLRYCLQKGVSPIFKASSFVHIHENVKAEQFMLDPSDMDVMDTWDEEFVSKPTWNPIILP

SEQ ID NO: 637 - protein, 491 aa, Ralstonia eutropha JMP134
MSLTLANAALLRSQNFINQQWRDAGLGRRLAVANPATGEVFAHVPDSDDDDAGRAADAAAEAFPAWSARPARERAQLIKRWHALILANQEDLARIISTEQGKPLKEARGEVLYGASYVEWFAEEATRICGDIVAEAVPGRKLLVLKEPVGVVAAITPWNFPLAMIARKIAPALAAGCTVVAKPAEDTPLTALALVWLAEQAGLPAGVLNIVTASRESTPNVVDAWLADSRVRKITFTGSTPVGKHLARESAGTLKKLSLELGGNAPFIVFEDADLDAAVDGLMASKFRNGGQTCVCPNRVYVHESVHDDFVERLARRVGALHVAPATDENAQIGPMINARAVDKIARHVEDAVAKGARVVTGGRRVRTADGPHYYAPTVLIDATPAMELACEETFGPVAPVFRFRDESEVIRDANDTPFGLAAYFYSNDVRRIWRVAQALETGMVGINEGAIAAEAAPFGGVKESGYGREGSRHGLDDYMHTKYLCQGQLG

SEQ ID NO: 638 - protein, 486 aa, Pasteurella multocida subsp. multocida str. Pm70
MIKHWINGKEVASEETFDNFNPATGEVICQVASGGEKEINAAVQAAKDAFPKWSKTPAKERARLMRKLGELIDQNVAKLAELETLDTGLPIHQTKNVLIPRASHNFDFFAEVCTRMNGHSYPVDDKMLNYTLYQPVGVCGLVSPWNVPFMTATWKTAPCLALGNTAVLKMSELSPLTANELGRLALEAGIPEGVFNVVQGLGSTAGHALVTHDDVRAISFTGGTATGKHILKHAGLKKYSMELGGKSPVLIFDDADLDRALDAALFTIFSLNGERCTAGSRIFIQETVYDEFVKQFAARAKRLIVGDPQDFNTQVGSMITRQHYDKVTGYIRIGLEEGATLLAGGLERPQNLPAHLQKGHFIQPTVFADVDNRMRIAQEEIFGPVVCLMKFKDEAEALRLANDVEYGLASYIWTKDIAKALRLSNGIEAGMVFVNSQNVRDLRQPFGGIKASGIGREGGEYSFEVFAELKNVCISMHDHPIPRWGL

SEQ ID NO: 639 - protein, 232 aa, Salmonella typhimurium LT2
MSFQPSFAGPQPDSRIDRTTFIRRAYLHLAVAIVGFIVLSAAWSFIGVGEYALDVLLAGGRYSWLVVLGAFMLVGMLATRLADNAGNNQTQLIGLGIYVLAESLIFAPLLTVAAYINPSSIGAAAITTLLLVGGLTFTAFSIKKDFSFLRSFLTMAGFIAFGAIIASVICGFSLGVWFSALMVLLCAGFILYDTSNIIHHYPTDRPAGAALHLFASIATMFWYILRIFMSRN

SEQ ID NO: 640 - protein, 108 aa, Triticum aestivum
MEHGSLDDSSSSTFSIMEEDHTLANSVRFVLNQDPRVAFCGYSIPHPAENKVNIRVQTTGDPAKDVLKDALQDLMVMCQHIRGTLDTAVADFRGNKTAEAMDIDLNKK

SEQ ID NO: 641 - protein, 106 aa, Brassica napus
  misc_feature (105)..(105): Xaa can be any naturally occurring amino acid
MGGCVSTPKSCVGSKLKSSKPRKSRKRRRKRAAAAAASSSSRLSDGSFDNLDHPRNNLPTPTFRASGEEAWFESNAAFETDCDDDFHSVNEGGGERVSVSSTMTXS

SEQ ID NO: 642 - protein, 132 aa, Triticum aestivum
  misc_feature (68)..(68): Xaa can be any naturally occurring amino acid
ISPDNFEGLILIYPLLRDKWGTNTSVVLPDSGSTEQVMYVVGILRSANPDEGCSHHCLQELLRRHRHXADTAGVRIGAKQYLAHHPTPAGWHQHFGPRWERFAERKNRFDPLSILGPGQGIFPKGSTGVYAS

SEQ ID NO: 643 - protein, 375 aa, Oryza sativa (japonica cultivar-group)
MMPRTPPPTSPPLDDDDANETRRRVAIAGAASSPPPPRPAMPMFPGDVGPVMLAPPPPLPFFPIAAVQSGLGFMHMSAPPEIVTARSKLNSDAPSFSPRSPAASAAADEVEVRDVWAANLEEELRSIGALLPTYPVVSMDTEFPGTVHDVATPRHLRTPRESYAVVKRNVDELHLLQLGLALSGPAGRCPVAWQFNFAGFDARRDPHSGSSVAMLAAHGVDFTALRRHGIDHGDFARAFGRSKLACGRLTWAAFSGSYDFAYLVKVLTGGRPLPSTLEGFMAKVSKIFGPAVLDVKHLAKFCGGGGGIRGGLEHVAAALGVHRAAGRAHNAGSDSLLTSDVLHAMVDRFFPNSGVLNHAGAIDGLVKCSNLYYKY

SEQ ID NO: 644 - protein, 129 aa, Triticum aestivum
  misc_feature (26)..(26): Xaa can be any naturally occurring amino acid
  misc_feature (46)..(46): Xaa can be any naturally occurring amino acid
  misc_feature (53)..(53): Xaa can be any naturally occurring amino acid
  misc_feature (58)..(59): Xaa can be any naturally occurring amino acid
  misc_feature (61)..(61): Xaa can be any naturally occurring amino acid
  misc_feature (63)..(63): Xaa can be any naturally occurring amino acid
  misc_feature (65)..(67): Xaa can be any naturally occurring amino acid
  misc_feature (69)..(69): Xaa can be any naturally occurring amino acid
  misc_feature (71)..(71): Xaa can be any naturally occurring amino acid
  misc_feature (79)..(79): Xaa can be any naturally occurring amino acid
  misc_feature (81)..(81): Xaa can be any naturally occurring amino acid
  misc_feature (88)..(88): Xaa can be any naturally occurring amino acid
  misc_feature (90)..(91): Xaa can be any naturally occurring amino acid
  misc_feature (94)..(94): Xaa can be any naturally occurring amino acid
  misc_feature (100)..(100): Xaa can be any naturally occurring amino acid
  misc_feature (104)..(107): Xaa can be any naturally occurring amino acid
  misc_feature (109)..(110): Xaa can be any naturally occurring amino acid
  misc_feature (114)..(114): Xaa can be any naturally occurring amino acid
  misc_feature (116)..(116): Xaa can be any naturally occurring amino acid
  misc_feature (119)..(120): Xaa can be any naturally occurring amino acid
  misc_feature (122)..(124): Xaa can be any naturally occurring amino acid
MSDTDEHHFESKGDSGASKTYPQQAXAIRKGGHIVIKGRPCKGVEXSTSKTGXKHGHXXCXFXAXXXFXGXKLEEIVPXSXNWDGPPXVXXQNXKLIEIXDDGXXXXSXXKGGXLXEDXXSXXXEEFAT

SEQ ID NO: 645 - protein, 187 aa, Arabidopsis thaliana
RDRDSGGGQNGNNQNGQSSLSPREQDRFLPIANVSRIMKKALPANAKISKDAKETMQECVSEFISFVTGEASDKCQKEKRKTINGDDLLWAMTTLGFEDYVEPLKVYLQRFREIEGERTGLGRPQTGGEVGEHQRDAVGDGGGFYGGGGGMQYHQHHQFLHQQNHMYGATGGGSDSGGGAASGRTRT

SEQ ID NO: 646 - protein, 371 aa, Pseudomonas syringae pv. syringae B728a
MSTVTERTAEQLSPVIPKTMQAVVCHGPEDYRLETVDVPTPGPDEILTKVELCGICMGDIKTYRGAPSFWGDAEQPRYVKPPMIPGHEFVCRVVALGPGAEKRGVQIGDRVISEQIVPCWGCRFCNHGQYWMCQKHDLYGFQNNVQGAMAQYMIFTREGIIHKVPDSIAPDEAILIEPLACSLHAAERADVDFDDIVVVAGAGTLGLGIIGAVRMRNPKKLIVLDMKPERAALALRMGADEVWNPAEVDVLAKIREITDGYGCDIYIEATGHHKAVNQGLAMLRKLGRFVEFSVFNDEATVDWSIIGDRKELDVLGSHLGPYMYPRAIDFIGNRKIDMRDVVTHKFPLAQFKEAFAVMERGDKSLKVVLEP

SEQ ID NO: 647 - protein, 175 aa, Hordeum vulgare subsp. vulgare
  misc_feature (88)..(88): Xaa can be any naturally occurring amino acid
MAAAGDAGEKKMITLKSSDGEEFEVEEAVAMESQTIRHMIEDDCADNGIPLPNVNSKILSKVIEYCNKHVQAKPADAGASSDTASAAXGAPAAPAEDLKNWDAEFVKVDQATLFDLILAANYLNIKGLLDLTCQTVADMIKGKTPEEIRKTFNIKNDFTPEEEEEIRRENQWAFE

SEQ ID NO: 648 - protein, 160 aa, Zea mays
MSTKKIVLKSSDGESFEVDEAVALESQTIAHMVEDDCVDNGVPLPNVTSKILAKVIEYCKKHVDAAASKSEAVDGGGSSDDDLKAWDAEFMKIDQATLFELILAANYLNIKNLLDLTCQTVADMIKGKTPEEIRTTFNIKNDFSPEEEEEVRRENQWAFE

SEQ ID NO: 649 - protein, 502 aa, Aspergillus nidulans FGSC A4
MKPPYYMETGCKRNPGSDSTLKVRWTLYTRLLQSANQGLGIDPGSGQVFASCPTNTVADVDAYVSSAHRSFLSYRETNPRARAKMLLNWHNLIAQSKNDIAKLVVYETGKPMAEAVGEVDYALGFAWWFAGEAERVRGSIAQPSISERRTFVIKQPIGVCIALVPWNFPVAMIIRKAAAALAAGCTVVIKPSPETPLSVLALADLALQAGFGPGVINVLTTDNLNTPDVSEALCKHPLVRKVTFTGSTAVGQLIARHCSEGLKKVTLELGGNCPFIIFDDGDLEQALAALMILKWRTAGQACTHANRVYVQSGVYDTFLRMIVNATKQLKVGHGASPGTTMGPLTTSRGIEKLERHVADALAKGARLELGGHRLQLEGNYFQPTIISGMSAYMLTTQEEIFGPLLGLYRFETEEEAVRMANDTSMGLASYFFTRDVSRTWRLLENLEAGMIGMNTGNSSAAESPFGGIKASGYGKEAGKDVAIEEYLIAKTGTLTVGAVSKL

SEQ ID NO: 650 - protein, 469 aa, Lactobacillus plantarum WCFS1
MAMLYGKHNHEAEEYLEPVFGAPSEQHDLPKYRLPKHSLSPREADRLVRDELLDEGNSRLNLATFCQTYMEPEAVELMKDTLAKNAIDKSEYPRTAEIENRCVNIIANLWHAPDDEHFTGTSTIGSSEACMLGGLAMKFAWRKRAQAAGLDLNAHRPNLVISAGYQVCWEKFCVYWDVDMHVVPMDEQHMALDVNHVLDYVDEYTIGIVGIMGITYTGQYDDLAALDKVVTHYNHQHPKLPVYIHVDAASGGFYTPFIEPQLIWDFRLANVVSINASGHKYGLVYPGVGWVVWRDRQFLPPELVFKVSYLGGELPTMAINFSHSAAQLIGQYYNFIRFGMDGYREIQTKTHDVARYLAAALDKVGEFKMINNGHQLPLICYQLASREDREWTLYDLSDRLLMNGWQVPTYPLPANLEQQVIQRIVVRADFGMNMAHDFMDDLTKAVHDLNHAHIVYHHDAAPKKYGFTH

SEQ ID NO: 651 - protein, 474 aa, Bacillus cereus ATCC 14579
MKKHLYINGSWKSVNTYKPLYAPYSEETLAEIAQGTEEDVKEAVTAAKNAMTKMNKLSAYDRATILEKVAQKMDERREEFAEIIAKEAAKPIRAARGEVDRTVQTYKFAAEEAKRIYGETLPLDAAPGADGRIAYTIRKPIGVIGAITPFNFPLNLVAHKVGPAIAAGNTVVLKPADQTPLSSYALVELFEEAGLPNGALNIISGPGPTVGEAIVKNDYVASITFTGSPKVGIGIKQKAGLKRVTLELGSNAAVIIDEDVELTDEIIERVKWGAFVNNGQVCISVQRVFVHETKIHEFLSKLKKAMESVVVGDPSLEETDVSALISKKDVERIDMWVQEAIKEGATVLCGGKKQDARIFEPTVLTNVPDHVSVQCQEVFGPLMTVNTFKEFDEAIEQVNNSRYGLQAGVFTNNLFKAMRAIDELEVGGVMINDIPTFRVDHMPYGGVKESGTGREGIKYAIEEMTEMKLVCIKK

SEQ ID NO: 652 - protein, 384 aa, Pisum sativum
MAIHHHHHHHQQLHHNSLLDALYCDEEKLEEEQEDVSSQQSDVTTNNDNNILDSTSLFPLLLLEQNLFSQDEELTTLFSKEKTQQETYYEDLKNVVDFVSLSQPRREAVQWMLKVNAHYAFSPLTATLAVTYFDRFLLTFHFQKDKPWMIQLVAVTCISLAAKVEETQVPLLLDLQVQDTKYVFEAKTIQRMELLILSTLKWKMHPVTPHSFLDHIITRLGLKTNLHWEFLRRCENLLLSVLLDSRFVGCVPSVLATATMLHVIDQIEESDDNGVDYKNQLLSILKINKEKVDECYNAIVEVTNENNYGHKRKYEQIPGSPSGVIDAVFSSDGSNDSWKVGSSSYSTSEPVFKKTKTQGQNRNLSPLNRVIVGILATASATTSP

SEQ ID NO: 653 - protein, 436 aa, Bacillus cereus ATCC 14579
MRDYLIKPLVGQPYPMISHGKGVYLYDQNGNKYFDGSSGAITAGIGHGVKEIADVIKKQAEEIAFVYRSQFTSEPAEKLAKKLSDLSVGDLNWSFFVNSGTEANETAMKIAIQHFQERGIQGKHKILSRWMSYHGIPMGALSMSGHPLRRQRFVSILEDYPTIPAPYCFRCPVQKVYPTCQLACATELERSIERIGAEHIAAFIAEPIIGAAGGAVVPPKDYYKVIKEICDHYDILFIADEVMTGLGRTGAWFAMEHWGVEPDIMTLGKGLGAGYTPMAATVVSDRVMEPILRGSRSVMSGHTLSANPLSAATALAVIEYMEKHNLPEKTAEKGEYLIKGLQKVQQQSTIIADVRGKGLLIGVELQPFTKASELISVAAKNGLLLYQAVSGQAGKEDSALLVAPPMTTTYSELDELLSIFSKSVEEMMQKGGHSIA

SEQ ID NO: 654 - protein, 499 aa, Acremonium strictum
MVRIQELTAALSLASVVQASWIQKRNSINACLAAADVEFHEEDSEGWDMDGTAFNLRVDYDPAAIAIPRSTEDIAAAVQCGLDAGVQISAKGGGHSYGSYGFGGEDGHLMLELDRMYRVSVDDNNVATIQGGARLGYTALELLDQGNRALSHGTCPAVGVGGHVLGGGYGFATHTHGLTLDWLIGATVVLADASIVHVSETENADLFWALRGGGGGFAIVSEFEFNTFEAPEIITTYQVTTTWNRKQHVAGLKALQDWAQNTMPRELSMRLEINANALNWEGNFFGNAKDLKKILQPIMKKAGGKSTISKLVETDWYGQINTYLYGADLNITYNYDVHEYFYANSLTAPRLSDEAIQAFVDYKFDNSSVRPGRGWWIQWDFHGGKNSALAAVSNDETAYAHRDQLWLWQFYDSIYDYENNTSPYPESGFEFMQGFVATIEDTLPEDRKGKYFNYADTTLTKEEAQKLYWRGNLEKLQAIKAKYDPEDVFGNVVSVEPIA

SEQ ID NO: 655 - protein, 277 aa, Arabidopsis thaliana
MAETLKEDSIMIREVWDYNLVEEFALIREIVDKFSYIAMDTEFPGVVLKPVATFKYNNDLNYRTLKENVDLLKLIQVGLTFSDENGNLPTCGTDKFCIWQFNFREFNIGEDIYASESIELLRQCGIDFKKNIEKGIDVVRFGELMMSSGIVLNDAISWVTFHGGYDFGYLVKLLTCKELPLKQADFFKLLYVYFPTVYDIKHLMTFCNGLFGGLNRLAELMGVERVGICHQAGSDSLLTLGSFRKPKERYFPGSTEKYTGVLYGLGVEDGTTTTVAN

SEQ ID NO: 656 - protein, 113 aa, Lilium longiflorum
MARSSAVCFLLLLAFLIGTASAITCGQVDSDLTSCLGYARKGGVIPPGCCAGVRTLNNLAKTTPDRQTACNCLKSLVNPSLGLNAAIVAGIPGKCGVNIPYPIRMQTDCNKVR

SEQ ID NO: 657 - protein, 446 aa, Triticum aestivum
  misc_feature (201)..(201): Xaa can be any naturally occurring amino acid
  misc_feature (277)..(277): Xaa can be any naturally occurring amino acid
  misc_feature (284)..(284): Xaa can be any naturally occurring amino acid
MDEFELEDNLEFILQSIQELIEDQGENNPFGEVNQNELLANLVNYDQDNLMPDVSVEDVVNGKDVQGIPWEKMLFPRDQYREMKMKGYKNYQNLSYAREDALQDCKQVERDGPYYDFQYNTRRARPSIVHFQLRNLVWATTKHDVYTVHNQSMTHWSSLNQISTELINGDDCIIPKQRGHGSQSVSMVQFTTMAVDNDFLXVVGGFHGELICKRLEDDGIVFSTRVTDDENAITNSLEIYQDPNGSRRLVVANNDCSVRIFDTKYFDLLNHYVFPWXSVNSVSXNPDATLFAVLGDHEDGLVVDPKCGKPIGKVRGHLDYSFSSAWHPDGNILATGSQDTTCRLWDIRNLSQSLAVLGGRLGSIRCIKFSSDGRFLATAEPIDFVHIYDCFADYGKSHEIDFFGEIAGLSFSPDTEAFYIGVADQTYGGLMEFKRRHQHHYLNCLW

SEQ ID NO: 658 - protein, 493 aa, Agrobacterium tumefaciens str. C58
MTIATPLKAQPKASHFIDGDYVEDNTGTPFESIFPATGEMIAKLHAATPAIVERAIASAKRAQKEWAAMSPMARGRILKRAADIMRERNDALSTLETLDTGKPIQETIVADPTSGADAFEFFGGIAPSALNGDYIPLGGDFAYTKRVPLGVCVGIGAWNYPQQIACWKAAPALVAGNAMVFKPSENTPLGALKIAEILIEAGLPKGLFNVIQGDRDTGPLLVNHPDVAKVSLTGSVPTGRKVAAAAAGHLKHVTMELGGKSPMIVFDDADIESAVGGAMLGNFYSSGQVCSNGTRVFVQKKAKARFLENLKRRTEAMILGDPLDYATHLGPLVSKAQQEKVLSYIEKGKAEGATLITGGGIPNNVAGEGAYVQPTVFADVTDDMTIAREEIFGPVMCVLDFDDEDEVLARANATEFGLAGGVFTADLARAHRVVDGLEAGTLWINTYNLCPVEIPFGGSKQSGFGRENSAAALEHYSELKTVYVSTGKVDAPY

SEQ ID NO: 659 - protein, 486 aa, Pasteurella multocida subsp. multocida str. Pm70
MGGISMQQFSLLKTKAYINGEYVQAKEHKTFAVTNPANQQIICELPDLSAEETEYAIACAAQAQKKWQKVTPKERANLLRRWYNLVIENQEELAQLLSLEQGKPINESRGEILYGASFIEWFAEEAKRIYGDVLPQDKENHRLLVIKQGIGVVAAITPWNFPNAMITRKAAPAFAAGCAMVLKPAQETPLSALALAELAHQAGLPAGLFNVITSTRSVEIGKVLTEHPTVRKVTFTGSTRVGKILMAQSASTVKKLSLELGGNAPSIVFDDADLENAIEGIIASKFRNSGQTCVCTNRIYVQAGIYDRFVELFSAKVAAFKVGSANEAGVNIGPLISQSAVNKIQEHIDDATAKGANLVIGGKLHTRGGTFFEPTVLRDVTQAMLVAKDETFAPLAPVFKFDTEAQVIEMANDTEFGLASYVYTQDISRIWRVSEALEYGIVGINEGLISNEMAPFGGVKESGLGREGSRYGIDEFLEIKYLCLKV

SEQ ID NO: 660 - protein, 252 aa, Triticum aestivum
  misc_feature (142)..(142): Xaa can be any naturally occurring amino acid
  misc_feature (181)..(181): Xaa can be any naturally occurring amino acid
ITPRTRSTHVRPQPCCARTPSLVFLVALLLSCSSMSSAARHLEEAVPKKENPPHPIVTELPKPQLPLHPAMPELPKPEPPHPLVPEVPHPVVPETPKEPEVPHPVVPEMPKHELPPHPAMPELPKPELPHPAVPEVPKETQXPHPIVPEVPKELDLPRPVMPEVSHPVVSEVPKEPELPHXAMPELPKPEVPHHGVPEVPSEPHVPHPEVPKEPELPHPAVPEVPKHEMPLPPKAELPPKPEFHFPEPKTKP

SEQ ID NO: 661 - protein, 342 aa, Methanosarcina barkeri str. fusaro
MSKTAAVIKGDGVGPELVDAMLKVTEAAGTDVEFVMCEAGAGWWEKHGGNSLIPNETWDVLDSSDACFKGPTTTPGGIGSPRSVAVSIRSKYNLYANVRPIKTFPNSSAPLGDVEMICVREGTEGLYIGEEIQLTDDVSIAIRKITRTASHKIASYAFEEAKRRGYDAVVPIHKSNILKLTCGSFLEEVEKVGQNYPDIEIWPYHIDNIAQQLIKNPQIFNKKVLLSTNLFMDVISEECSALVGSIGLIYSANIGDSFAMFEPAHGSAPKYAGQDKVNPVATVLAGAWMLDYLDEKEKSEAIFKATKRVISEGKYVTYDLGGNAKLSQMAGEIAKYTAEILK

SEQ ID NO: 662 - protein, 397 aa, Synechococcus elongatus PCC 6301
MAANLLEQLRGMTVVVADTGGIQSIATFTPRDATTNPSLITAAAQMPQYQSIIDDTLRQVRTELGAEAPVEAIVAEAIDELFVAFGLRILEIVPGRVSTEVDARLSYDTEATIAKARKLIGLYERAGIRRDRVLIKIASTWEGIRAAEVLEKEGIHCNLTLLFGFHQAVACAEAGVTLISPFVGRILDWYKKESGRDAFPGAEDPGVQSVTQIYNYYKKFGYATEVMGASFRNISEIIELAGCDLLTISPGLLEELRQTEALLERKLDPAIAESLELEQIHLDRDRFAELHQADRMANEKLDEGIRGFCKAIDTLEGLLKQRLAVLEGKAVFHHAAHEVFSVCDLDGDGFITREEWLGSDAVFDALDLNKDGKLNEEDLLAGLGATLQMAGRAVATV

SEQ ID NO: 663 - protein, 434 aa, Escherichia coli
MKTRTQQIEELQKEWTQPRWEGITRPYSAEDVVKLRGSVNPECTLAQLGAAKMWRLLHGESKKGYINSLGALTGGQALQQAKAGIEAVYLSGWQVAADANLAASMYPDQSLYPANSVPAVVERINNTFRRADQIQWSAGIEPGDPRYVDYFLPIVADAEAGFGGVLNAFELMKAMIEAGAAAVHFEDQLASVKKCGHMGGKVLVPTQEAIQKLVAARLCADVTGVPTLLVARTDADAADLITSDCDPYDSEFITGERTSEGFFRTHAGIEQAISRGLAYAPYADLVWCETSTPDLELARRFAQAIHAKYPGKLLAYNCSPSFNWQKNLDDKTIASFQQQLSDMGYKFQFITLAGIHSMWFNMFDLANAYAQGEGMKHYVEKVQQPEFAAAKDGYTFVSHQQEVGTGYFDKVTTIIQGGTSSVTALTGSTEESQF

SEQ ID NO: 664 - protein, 316 aa, Arabidopsis thaliana
MDRIIGLPDEVLVKILSFVPTKVAVSTSILSKRWEFLWMWLTKLKFGSKRYSESEFKRLQCFLDRNLPLHRAPVIESFRLVLSDSHFKPEDIRMWVVVAVSRYIRELKIYSSHYGEKQNILPSSLYTCKSLVILKLDGGVLLDVPRMVCLPSLKTLELKGVRYFKQGSLQRLLCNCPVLEDLFVLLLRCDDIGMFIVIVPSLQRLSLYLSPRCNLEGFVIVLDTPLEYFKLVDRNYDRHPYMIENMPKLTSAYVEVISADLKSLVESITSVKYLTIFSENYDDFVFPWNQPSTVPKCFCPVYKSSPVYKSSPGQNT

SEQ ID NO: 665 - protein, 478 aa, Ralstonia solanacearum
MHAQHFIANRLMAADSGLRIKVFDPSDGQPFAEIARGNATDISVAVHAARRAFDGIWGRLAPAERGRLLMRVALRLADHEEELARLEARDTGKPMRQARADARAIARYFEFYAGAADKLHGQTIPYQPDTTVLTVREPHGVTAHIIPWNYPMQIFGRSVGAALAVGNACVVKPAEDACLSILRVAELAAEAGLPDGALNVVTGYGHEAGAALAAHPGINHVSFTGSPETGKLIVRAAAENHVPVTLELGGKSPQILFADADLDAAIPAVVSGIVQNAGQTCSAGSRVLIERGLYETVLDRLASVFEAIKVGPSTLDLDCGPLINPRQQQRVWDFVSDAQHANIPVMAQGLVVPEAPETGYYQAPMLLRDVPPTHRLAQQEVFGPLLAAMPFDGEAEALALANGTPYGLVAAVWTRDGARQLRLARALKAGQVFINNYGAGGGVELPFGGTGQSGHGREKGFEALYGFTTVKTIAIRHG

SEQ ID NO: 666 - protein, 204 aa, Glycine max
  misc_feature (120)..(120): Xaa can be any naturally occurring amino acid
  misc_feature (130)..(130): Xaa can be any naturally occurring amino acid
  misc_feature (134)..(134): Xaa can be any naturally occurring amino acid
  misc_feature (136)..(136): Xaa can be any naturally occurring amino acid
  misc_feature (141)..(141): Xaa can be any naturally occurring amino acid
  misc_feature (148)..(149): Xaa can be any naturally occurring amino acid
  misc_feature (152)..(152): Xaa can be any naturally occurring amino acid
  misc_feature (155)..(155): Xaa can be any naturally occurring amino acid
  misc_feature (160)..(160): Xaa can be any naturally occurring amino acid
  misc_feature (163)..(165): Xaa can be any naturally occurring amino acid
  misc_feature (169)..(169): Xaa can be any naturally occurring amino acid
ERERERERERETERERERERERERKTKREAAAKKAAEDAANLEKGDEHQASSQHATVTERAAAATSEADNKTSDFMDDDSALLQQALAMPMDDSAISHDVKDTHMSEASAIDPDLALALXLSITDSAKDXSSQXDXEQIVXPDQSFGXXILXSLXGVDPXDLXXXDFLXSCDSLATISFSFLSPFPFFSFFYGLAMCGFLRCFA

SEQ ID NO: 667 - protein, 363 aa, Aspergillus nidulans FGSC A4
MPYLANPSLQVTADHQIKLVEAPVHEPGKGEVLVHIKATGVCGSDIHFWKTGRIGELIFHGDCIIGHEAAGVVLKCGEGVTDLQPGDRVAIEPGVPCENCFLCDEGRYNLCEDVAFAGVYPYAGTIQRYKVHPAKWLHKLPPSLSYLDGALLEPLSVVMRGIQVAQLELGRGVVICGAGPIGLIAAAAARASGAHPVVITDIDPSRLSFARRFLPTIQTYQNNPTLDAQGNAKAIRALFGDNEYNAPDRVLECTGVESSICTAAYTARRGGLVVVVGVGKEIINNVPFMHLSLAEIDLKFINRYRDTWPRAISCMAAGIITDLKPLISHTFPLERADEALELCADMGRPSIKVTIVDEGDATV

SEQ ID NO: 668 - protein, 189 aa, Triticum aestivum
  misc_feature (26)..(26): Xaa can be any naturally occurring amino acid
  misc_feature (53)..(53): Xaa can be any naturally occurring amino acid
WASSAPSVSPFPGVKSTAGLPSSRRXNGASLGSVSNGGRIRCMQVWPIEGIKXFESLSYLPPLSTEALLNQVDYLIRSKWVPCLEFSKVGFIFREHNASPGYYDGRYWTMWKLPMFGCTDSTQVINEVEEVKKEYPDAYVRIIGFDNMRQVQCVSFIAFEPPGCEESPPPPPAHLRQAIYEVPLQVCQV

SEQ ID NO: 669 - protein, 409 aa, Cannabis sativa
NNSHIQATILCSKKVGLQIRTRSGGHDAEGMSYISQVPFVVVDLRNMHSIKIDVHSQTAWVEAGATLGEVYYWINEKNENLSFPGGYCPTVGVGGHFSGGGYGALMRNYGLAADNIIDAHLVNVDGKVLDRKSMGEDLFWAIRGGGGENFGIIAAWKIKLVAVPSKSTIFSVKKNMEIHGLVKLFNKWQNIAYKYDKDLVLMTHFITKNITDNHGKNKTTVHGYFSSIFHGGVDSLVDLMNKSFPELGIKKTDCKEFSWIDTTIFYSGVVNFNTANFKKEILLDRSAGKKTAFSIKLDYVKKPIPETAMVKILEKLYEEDVGAGMYVLYPYGGIMEEISESAIPFPHRAGIMYELWYTASWEKQEDNEKHINWVRSVYNFTTPYVSQNPRLAYLNYRDLDLGKTNHASP

SEQ ID NO: 670 - protein, 393 aa, Burkholderia fungorum LB400
MLSAEHRAIVKATVPLLESGGEALTTHFYRILIGEHPEVRPMFNLANQASGAQPRALANSVLMYARHIDQLEQLGGLVSQIINKHVALNILPEHYPIVGQCLLRAIREVLGAEIATDAVIAAWAAAYRQLADLLIGLEEKIYAEREAAPGGWRGTRLFRVARKVRESDEITSFYLRPDDNGELLAFHPGQYIGVRLYIDGEEVRRNYSLSAMSNGCEYRISVKREANGKVSSHLHTHLNENDTIELFAPAGDFTLEPGDKPLVLISGGVGITPTLAMLQAALHTNRVVHFIHSARHGGVHAFRDTIEQLAARHPQLKRFYCYEQRRADDADADGIGYLDETRLDAWLPETRDVDVYFLGPIAFMKAVKKHLKAIGVPESQSRYEFFGPAAALE

SEQ ID NO: 671 - protein, 389 aa, Escherichia coli
TLQNGKLNVPENPIIPYIEGDGIGVDVTPAMLKVVDAAVEKAYKGERKISWMEIYTGEKSTQVYGQDVWLPAETLDLIREYRVAIKGPLTTPVGGGIRSLNVALRQELDLYICLRPVRYYQGTPSPVKHPELTDMVIFRENSEDIYAGIEWKADSADAEKVIKFLREEMGVKKIRFPEHCGIGIKPCSEEGTKRLVRAAIEYAIANDRDSVTLVHKGNIMKFTEGAFKDWGYQLAREEFGGELIDGGPWLKVKNPNTGKEIVIKDVIADAFLQQILLRPAEYDVIACMNLNGDYISDALAAQVGGIGIAPGANIGDECALFEATHGTAPKYAGQDKVNPGSIILSAEMMLRHMGWIEAADLIVKGMEGAINAKTVTYDFERLMEGAKLL

SEQ ID NO: 672 - protein, 1266 aa, Bacillus cereus ATCC 10987
MLDWMKKLFNKEEEQTAMNKEVQKQVESQPKIPRVNHYTEAREAQMASRNAGKCRFPLVPDNGFDEEDVIETGRFEEQPVQAVTYENQPIQRGIKVERSRRQHVEKVVSTYEEPEIQYEPEREPVVKKASTPAQESNRRPFRPTEMISPIYGYNRPSVEKKEEKQEEVKEREDLEISVEGKSVVDAWLEKKGYTLSHFSEGQAPTSSSHERVDEQDQQSKKEEKSVVDQWLEKNGYEIERQEPIVEEKEVAQEMSAPQEVPAAELLHETIAERMEDAKQEKDVVVENVLQTESLASKVEHEDTILSEEMKRNTEIEQPTIEVEKQAPEESVIVKAEEKLEETIIVEIPEEFEEVDVITETEESEEVEVIAEAEESEEVEVIAETEESEEMEVIAETEESEEVEVIAETEESEEVEVIAEAEESEEVEVIAEAEESEEVEVIAETEESEEVEVIAEAEESEEVEVIAETEESEEVEVIAETEESEEVEVIAETKAPEEAEPVVLEETQQEMVLNEAIEQKNEFIHVAEADEQTKKDVQSFADVLIAEEAAIEEEQSVAEETPVAEEPPVVQKEEPKREKKRHVPFNVVMLKQDRARLVERHAARTNAMQPSMKERVENKPVHQVEEQPMQQVAVEPQVEEQPMQQVAVEPQVEEQPMQQVVVEPQVEEQPMQQVAVEPQVEEQPMQQVAVEPQVEEQPMQQVVVEPQVEEKLVQQVVEPQAEEKPMQQVVEPQAEEKPMQQVVVEPQVEERPVQQVVVESQQVQKPISSTEVEEKAYVVNQRENDVRNVLQTPPTYTIPSLTLLSIPQQAALDNTEWLEEQKELLDTTFNNFHVGAHVINVSQGPAVTRFEVQPDPGVKVNKITNLSDDIKLSLAAKDIRIEAPIPGKSAIGIEVPNKESKPVFLREILRSPVFTKSESPLTVALGLDISGDPIVTDIRKMPHGLIAGATGSGKSVCINAILTSILYKAKPHEVKLMLIDPKMVELAPYNSVPHLVAPVITDVKAATAALKWAVEEMERRYELFAHAGARDLTRYNTIVSEREIPGETLPYIVIVIDELADLMMVAPGDVEEAICRIAQKARACGIHLLVATQRPSVDVITGLIKSNIPTRIAFTVSSQVDSRTIIDIGGAEKLLGRGDMLFLGNGTSKPVRVQGVYVSDDEIEKTVDHVKKQMKPNYLFKQEDLLAKTEQAESEDELFLDACQFVVEQGGASTSSVQRKFRIGYNRAARLIEEMESQGIISEGRGTKPRDVLISEDEFAAMQETNV

SEQ ID NO: 673 - protein, 385 aa, Escherichia coli
  misc_feature (191)..(195): Xaa can be any naturally occurring amino acid
  misc_feature (215)..(215): Xaa can be any naturally occurring amino acid
TLQNGKLNVPENPIIPYIEGDGIGVDVTPAMLKVVDAAVEKAYKGERKISWMEIYTGEKSTQVYGQDVWLPAETLDLIREYRVAIKGPLTTPVGGGIRSLNVALRQELDLYICLRPVRYYQGTPSPVKHPELTDMVIFRENSEDIYAGIEWKADSADAEKVIKFLREEMGVKKIRFPEHCGIGINPCSEEXXXXXVRAAIEYAIATDRDSVTLVXKGNIMKFTEGAFKDWGYQLAREEFGGELIDGGPWLKVKNPNTGKEIVIKDVIADAFLQQILLRPAEYDVIACMNLNGDYISDALAAQVGGIGIAPGANIGDECALFEATHGTAPKYAGQDKVNPGSIILSAEMMLRHMGWTEAADLIVKGMEGAINAKTVTYDFERLMEG

SEQ ID NO: 674 - protein, 319 aa, Zea mays
  misc_feature (263)..(263): Xaa can be any naturally occurring amino acid
  misc_feature (279)..(279): Xaa can be any naturally occurring amino acid
  misc_feature (281)..(281): Xaa can be any naturally occurring amino acid
  misc_feature (300)..(300): Xaa can be any naturally occurring amino acid
  misc_feature (314)..(314): Xaa can be any naturally occurring amino acid
METVTVVVAPAPVAVNQQPPQHKLAELKPSSFAGVAKSSPATKAKPAKTKKLAGGCGGYVLEDVPHLTDYLPELKSYPNPLQDHPAYSVVKQYFVNPDDTVAKKIVVHKSGARGTHFRRAGPRQRVYFQPDEVTAAIVTCGGLCPGLNTVIRELVCGLHDMYGVATVYGIEGGYKGFYARNTVELTPRSVNDIHKRGGTVLGTSRGGQDTAKIVDSIQDRGVNQVYIIGGDGTQKGAASIHEEVQRRGLKCAVVGVPKTIDNXDIAVIDKSFGFTPPWXEXAQRAINAAHVEAESAENGXGFVKLMGRNSGFIXMYATL

SEQ ID NO: 675 - protein, 257 aa, Glycine max
MTMHRESWAFVFGVMGNIISFGVFLAPLPTFYQIYKKKSTEGFQSLPYVVALFSAMLWIYYAFVKREAALLLITINTFGIVVESIYLAIFLLYAPRKPRLTTIKLLLLLNVFGFGAMLLSTLYLSKGAKRLAIIGWICLVFNISVFAAPLFIIRRVIKTRSVEYMPFTLSMFLTINAVMWFFYGLLLRDYYVALPNTLGFVFGIIQMGMYLMYRNATPVALEEPVKAQELNGHIIDVGKMGTMEPNHAATAGAVGKV

SEQ ID NO: 676 - protein, 451 aa, Zea mays
MAEHKGNVLLHKYEMGKLLGQGTFAKVYHARNTATSESVAIKVIDKEKVMKVGLIDQIQREISVMKLVRHPNIVQLYEVMATKTKIYFVLEHVKGGELFNKIQRGRLKEDAARKYFQQLICAVDFCHSRGVYHRDLKPENLLLDENSNLKVSDFGLSALAECHRQDGLLHTTCGTPAYVAPEVINRKGYDGAKADIWSCGVILFVLLAGYLPFHDKNLMDMYKKIEKADFKCPSWFSTDVRRLLQRILDPNPSRRISVEKIMENPWFRKGLGAKLLRYDLQNKNAPHVDKKADFDSLSTNVTTESKQHEEKKPTNMNAFDIISLSTGLDLSGLFEESNKKRESKFTSTNTSSTIISKIEDIAKNLRLNLTKKDGGLLKMEASKPGRKGVMGIDAEVFEVSPNFHLVEIKKTNGDTLEYQKVLNQEMRPALKEIVWAWQGEQSKQKQEQQSC

SEQ ID NO: 677 - protein, 322 aa, Chloroflexus aurantiacus
MLGVRNGFQGLIDGDIHEMDWMSVSGWATMGGAELGTNRKVPQGSELYQIARNIERFGIDGILMIGGWTGYQAIYKLYSERHIFPAFNIPMICLPATIDNNLPGSELSLGADTALNSIVSAIDRIKQSAVASRRCFIVEVMGRDCGYLALMSGLATGAERVYLPEEGISLRKLQADLDEMMRWFRAGKRLSLIIRNEKANPIYTTSFICSLFEEEGGKLFEVRQAILGHLQQGGDPSPFDRIQATRLAVRCIEFLVEHADRREPIGAFIGYRGGKVQIHQLDDMPRLMDPVHARPREQWWMSLRQMTDLLTTPPSPTVESGK

SEQ ID NO: 678 - protein, 388 aa, Escherichia coli
  misc_feature (206)..(206): Xaa can be any naturally occurring amino acid
  misc_feature (233)..(233): Xaa can be any naturally occurring amino acid
TLQNGKLNVPENPIIPYIEGDGIGVDVTPAMLKVVDAAVEKAYKGERKISWMEIYTGEKSTQVYGQDVWLPAETLDLIREYRVAIKGPLTTPVGGGIRSLNVALRQELDLYICLRPVRYYQGTPSPVKHPELTDMVIFRENSEDIYAGIEWKADSADAEKVIKFLREEMGVKKIRFPEHCGIGIKPCSEEGTKRLVRAAIEYAIAXDRDSVTLVHKGNIMKFTEGAFKDWGYXLAREEFGGELIDGGPWLKVKNPNTGKEIVIKDVIADAFLQQILLRPAEYDVIACMNLNGDYISDALAAQVGGIGIAPGANIGDECALFEATHGTAPKYAGQDKVNPGSIILSAEMMLRHMGWTEAADLIVKGMEGAINAKTVTYDFERLMEGAKL

SEQ ID NO: 679 - protein, 125 aa, Porphyromonas gingivalis W83
MADIKAIAEQLVNLTVKEVSELATILKEEYGIEPAAAAVAVAAAPGAAGAAAEEEKTSFDVVLKSAGAAKLQVVKAVKEQCGLGLKEAKDLVDAAPSTVKEGVDKATAEALKKALEEAGAEVELK

SEQ ID NO: 680 - protein, 418 aa, Burkholderia cepacia R18194
MPYQHIKVPEGGDKITVNKDFSLNVSDQPIIPYIEGDGTGFDITPVMIKVVDAAVAHAYKGKRKIHWMEIFAGEKATKVYGPDVWLPDETLQVLKEYVVSIKGPLTTPVGGGIRSLNVALRQELDLYVCLRPVQYFKGVPSPVREPQKIDMVIFRENSEDIYAGIEWAAGSEQAKKVIKFLQDEMGVKKIRFPETSGIGVKPVSTEGTERLVRKAIQYAIDNDRKSVTLVHKGNIMKFTEGLFRDAGYALAQKEFGGELIDGGPWMRVKNPKTGNEIVIKDSIADAFLQQILLRPAEYDVIATLNLNGDYISDALAAQVGGIGIAPGANLSDSVAMFEATHGTAPKYAGKDYVNPGSEILSAEMMLRHLGWTEAADTIIAAMEKSILQKRVTYDFARLMEGATQVSCSGFGEVLIENM

SEQ ID NO: 681 - protein, 497 aa, Ustilago maydis 521
MFKSFGKIMGGSSRKGKSKLQDGDDSVDASNGLPGSDSSNLLRAKSKDSLAVTENGSGNFANNGSSAPAKIEKRGGVSRHESPLPSPSPSARNVLEGQEESSEVGSSAVARSAPASDVGGPRPANDAASQSTSVPTANTILSNPLAQSGSTGFPSSVGKNAQAAAGGDQVRTFDIDDMISRLLEAGYSGKIPKPALKNAEITAVCQAAREIFLSQPTLIELSPPVKIVGDTHGQYHDLLRLFEMCGFPPSANYLFLGDYVDRGKQSLETILLLLCYKIKYPENFFLLRGNHECANVTRVYGFYDECKRRVNIKIWKTFIDVFNTLPIAAVVASKIFCVHGGLSPSLSNMDDIRRIERPTDVPDYGLLNDLLWSDPSDTALDWEDNERGVSYCFGKAVIQQFLAQYDFDLICRAHMVVEDGYEFWNERTLVTIFSAPNYCGEFDNFGAVMSVSEDLLCAFELLKPLDGAALKKEMAKNKRRSLLQHQSPPARGSQQSY

SEQ ID NO: 682 - protein, 494 aa, Pseudomonas putida
MSASSKFNVDPAGFRNRNLIGGQWKGSISGETITVENPATEEIIAHIPQGRHEDIDEAVRVARATFESPAWRKIRPIDRGRILENVARKIEEHADELAYLESLDTGKALTFAKAIDLPSTIDVFRYMGGWCSKLGGTTPPISFDGREYHTYTRREPIGVVGAITPWNYPLALGSWKIASALAAGCTMVLKPTELTPLSTLRLAELCLEAGLPEGALNIVNGHGHEAGEALARHPGVDKITFTGSTVVGKKIVEYALGNMKRVTLELGGKSPSIVFADADLDQVGLGAALAVFFNSGQICFAASRLFVQDSVYDQVVEAVAAAAAQFKVGNGLDPDTLLGPLVSRKQQERVMGYVQSGIEQGARLVCGGKSVGEKGYFLQPTVFADAAPSMRIAQEEIFGPVVSVIRFKDEAEAIRMANDTAYGLAANIWTRDIKKAHRVAHRLQAGSVWINCHGVIDPAAPFGGFKQSGWGREVSEEGLSAYTETKTVCALLDD

SEQ ID NO: 683 - protein, 498 aa, Glycine max
MDYLLLLPLITIVWISIHVLISSFKPLKSSKNPPGPHPFPIIGNILELGNQPHQALAKLSQIYGPIMSLKLGKTTTIVISSPQVAKEVLQKNDQILANRMVPDSVRALDHHILSVAWMPPLPQWRALRRACATKVFSSQQLNFTQVLRQRKMQDLMDYVKERCERGEAMDIGEASFTTVLNSISNTFFSMDLAYYTSDKSQEFKDIIWGIMEEAGRPNVVDFFPIFRLLDPQGARRRMSGYFRKLIAFFDGLVEERLRLRALENGSRECNDVLDSLLELMLEDNSQVTRPHVLHLFLDLFVAGIDTTSSTIEWVMAELLRNPEKLEKVRQELQQVLAKGEQLEESHISNLPYLQAVVKETFRLHPPTPMLLPHKSEVDIELCGFMVPKSAQILVNLWATGRDSSIWTNPDEFTPERFLESDIDFKGHDFELIPFGAGRRICPGLPLASRTLHVVLASLLYNYDWKLTDGQKPEDMDVSEKYGITLHKAQPLLVIPIQA

SEQ ID NO: 684 - protein, 323 aa, Rhodospirillum rubrum
MAPGANEVRIAIKSVGICGSDVHYFKHGRIGDFIVTEPMILGHEASGVVEEIGSAVTHLRVGDRVCMEPGVPDFSSIETLRGMYNLDPSVRFWATPPYHGCLTAEVVHPASLTYRLPDSVSFAEGAMVEPLAIGVYAAAKAQIRPGDIAVVTGAGTIGMMVVFAALAAGCAEVIVSDVAAEKLALLASHPEVTTVDLTRESLADAVAARTDGRGVDVFFEASGSTRPYETMIDLIGRGGRIVLVGMPQEKPQLDVVALQVKEISLTGTFRYANVWDRTLKLLGSGKIDLKPLISATFPFSDSVRAFDRAAQHLPSDVKIQISL

SEQ ID NO: 685 - protein, 163 aa, Glycine max
  misc_feature (87)..(87): Xaa can be any naturally occurring amino acid
  misc_feature (149)..(149): Xaa can be any naturally occurring amino acid
HAGAGMGAPFTGLKSMVGFLTRKTNNDITFIDSNGGRMQCMQVWTRVGMKKLDTLSYLPDLDDAQWAKEVQYLLRKGWIPCLECKLXHGFVYREHNRSPGYYDGRYWIMWKLPMIGCTDASQVTKELQDAKTAYTNGLIPIFGFDNVRXVQSIIFVVYKPPSF

SEQ ID NO: 686 - protein, 91 aa, Brassica napus
  misc_feature (6)..(6): Xaa can be any naturally occurring amino acid
  misc_feature (10)..(10): Xaa can be any naturally occurring amino acid
  misc_feature (15)..(15): Xaa can be any naturally occurring amino acid
  misc_feature (17)..(17): Xaa can be any naturally occurring amino acid
  misc_feature (34)..(34): Xaa can be any naturally occurring amino acid
  misc_feature (43)..(43): Xaa can be any naturally occurring amino acid
  misc_feature (49)..(49): Xaa can be any naturally occurring amino acid
  misc_feature (53)..(53): Xaa can be any naturally occurring amino acid
  misc_feature (55)..(55): Xaa can be any naturally occurring amino acid
  misc_feature (57)..(57): Xaa can be any naturally occurring amino acid
  misc_feature (61)..(61): Xaa can be any naturally occurring amino acid
  misc_feature (68)..(68): Xaa can be any naturally occurring amino acid
  misc_feature (73)..(73): Xaa can be any naturally occurring amino acid
  misc_feature (75)..(75): Xaa can be any naturally occurring amino acid
  misc_feature (77)..(77): Xaa can be any naturally occurring amino acid
  misc_feature (84)..(85): Xaa can be any naturally occurring amino acid
VDQEVXILMXKLNFXPXSVFPTDLQYVDFLDRVXKAELKLRSXNLWEVXHPWXNXFXPKSXISDFDKXVFKGXLXNXTSGPILXXPMNKDK

SEQ ID NO: 687 - protein, 480 aa, Arabidopsis thaliana
MVRRQEEEKKAEKGMRLGKYELGRTLGEGNFGKVKFAKDTVSGHSFAVKIIDKSRIADLNFSLQIKREIRTLKMLKHPHIVRLHEVLASKTKINMVMELVTGGELFDRIVSNGKLTETDGRKMFQQLIDGISYCHSKGVFHRDLKLENVLLDAKGHIKITDFGLSALPQHFRDDGLLHTTCGSPNYVAPEVLANRGYDGAASDIWSCGVILYVILTGCLPFDDRNLAVLYQKICKGDPPIPRWLSPGARTMIKRMLDPNPVTRITVVGIKASEWFKLEYIPSIPDDDDEEEVDTDDDAFSIQELGSEEGKGSDSPTIINAFQLIGMSSFLDLSGFFEQENVSERRIRFTSNSSAKDLLEKIETAVTEMGFSVQKKHAKLRVKQEERNQKGQVGLSVTAEVFEIKPSLNVVELRKSYGDSCLYRQVCHYCHFLIRLKKHISKIKMFMFDIGVGAVVRETIKRRGHILAGARDSNLGVGVFG

SEQ ID NO: 688 - protein, 282 aa, Lactobacillus plantarum WCFS1
MTVLTTMYQLANGVNIPKVAFGTWQIPGGEATYQAVRAALAAGYRHIDTALAYQNEASVGQAIRDSGIPREQIFVTTKLPAETKSYQGALNDFDRSLKNLGLDYVDLYLVHAPWPWGQVGRVYDEANLDVWQAMEAIYQSGRAKAIGVSNFAVRDLKNILNQATIPPMVNQIQYYLGFTEPKITKFSEEHAMLVEAYSPLATGGVLDNPQVQAYADKYGVSVAQLALRFVLQNGVLPLPKAVNPAHIEANTQLDFAISVADMQALNDLPDAAGSYMHNPTQG

SEQ ID NO: 689 - protein, 235 aa, Glycine max
MALFAAFSICKVAKDAAGVAGNVFAFGLFVSPIPTFRRIIRNGSTEMFSGLPYIYSLLNCLICMWYGTPLISADNLLVTTVNSIGAVFQFVYIIIFLMYAEKAKKVRMIGLSLAVLGIFAIILVGSLQIDDIIMRRFFVGFLSCASLISMFASPLFIIKLVIQTKSVEFMPFYLSLSTFLMSTSFLLYGLFNDDAFIYVPNGIGTILGMIQLILYFYFESKSRESSREPLIVSYA

SEQ ID NO: 690 - protein, 208 aa, Phanerochaete chrysosporium
GAGGETTAGTLTFVVYFLTQHPNVLQRLRQEILDVVGPSNLPTYDDIKQMKYLRAVLNETLRLYPPVPWNMRYAVKDGILPNSEPDGKPWFIPAGASVSYSVHCMHRRKDYWGPDAEEFDPDRFLDERLHKYLTPNPFIFLPFNAGPRICLGQQFAYNEMSFFLVKLLQTFEDISFERDAFEPNALPPAEWAKFPGRKGKEKFWPRHI

SEQ ID NO: 691 - protein, 318 aa, Triticum aestivum
  misc_feature (178)..(178): Xaa can be any naturally occurring amino acid
VRKATSGRSNPSGRRRGEGGTSRLACGRVRLSARHAETARAPMPPPRRAGAGDTSAFFAATLVLWAVSVGFEIGARGRRELAAVAAGFAFFQAANTAVRAAVSRDPLFVNTAVSLLHSSLTSASVIFVLLCQWRTKGLENMFQHEELVGSSWIGAYSALCFSCGYFAYEQLDMLRYRXLYSGWIPGILMHHLILLICFTLALYRNVTINYLILTLLCEMHSIFLHVRKLRRMAGFRDFNRKLVKLEWVLNWTTFVTARVICHILITYRLITDAHKFDKGIELPLALSGMAGMNVLNVSLGLDLFKAFARERNQQTHQD

SEQ ID NO: 692 - protein, 364 aa, Psychrobacter sp. 273-4
MSMMKSLIFIEPGKIEVAEKKIPDVGPNDALIKITTTTICGTDIHIFKGEYPVAKGLTIGHEPVGIIEKLGSAVMGYQEGQRVIAGAICPSFTSYASQDGFPSQDGGYIQPDGTCACHGYKATGGWRFGNIIDGTQAEYVLVPDAQANLAPVPDGLTDEQVLMCPDIMSTGFKGAENANIKIGDIVAIFAQGPIGLCATAGAKLRGASTIIAIDGNNERLAMSKKLGADITLNFKEVDVVDEIMKITGGRGVDSSIEALGLQSTFEQGIKVLKPGGTLSSLGVYSADLKIPMAYFASGLGDHTIRTALCPGGKERMRRLLNVVESGRVDFSEMVTHTYALDDIVEAYDLFMHQRDGVLKIAIKP

SEQ ID NO: 693 - protein, 243 aa, Zea mays
MFGYRKADPDLEAGGSSLLYPGMTESPELRWAFVRKIYAILTVQLAMTAAVSAFVVKVPAVSNFFVSSNAGIALYIFLIVLPFIVLCPLHYYHQKHPVNLLLLGLFTVAISFAVGMTCAFTSGKIILEAAILTAVVVNSLTAYTFWAAKRGHDFNFLGPFLIAAIMVLMVFSLIQIFFPLGKISVMIYGGLASLIFCGYIIYDTDNIIKRHTYDQYIWAAVSLYLDVINLFLSLLQLLRAADS

SEQ ID NO: 694 - protein, 117 aa, Bartonella sp. Cg2sk
WGPAHGGANEACLKMLQEIGSIERIPEFIARAKDKNDPFRLMGFGHRVYKNYDPRAKIMQKTCHEVLKELNIQDDPLLDIAIELEKIALSDEYFIEKKLYPNVDFYSGITLKALGFP

SEQ ID NO: 695 - protein, 502 aa, Agrobacterium tumefaciens
MKENQLVLVRRHILEIEMQNKVQFITYVDRLTRGGFRQLKELVDGKFAGLFGGVHVLPFFNPIDGADAGFDPTDHTIVDPRLGDWEDVRALSGSVEIMADLIVNHVSSQSGAFTDFIAKGSASEFADMFMTFEKVFPDGATEEDLLRIYRPRPGLPFSKVTLADGTQRMLWTTFTPEQIDIDVHSAKGTTYLETILDRFSEANVTAIRLDAAGYAIKKAGSSCFMIDDTYAFLEEVAGKARNRGMEVLVEIHSYHRDQIEIAKKVDRVYDFALPPLILHALFTGDATPLAKWLAISPRNAITVLDTHDGIGVIDVGARSDGRAGLLEPQAIDNLVEEIHRRSDGQSRQATGAAASNLDLYQVNCTYYDALGRNDNDYLIARAIQFFAPGIPQVYYVGLLGGVNDMDLLAKTGVGRDINRHYYGNDEIGTALETPLFHRLSNLIRFRNTHPAFGGALKATIADAGALVLSWQHGDAFAELKISFADRKASIAASGQSEMQIVE

SEQ ID NO: 696 - protein, 315 aa, Burkholderia fungorum LB400
MKYKDYYEILGLERSASQDDIKRSYRKLARKYHPDVSKHADAEERFKELGEAYEVLKDPEKRAAYDRMGSDWRNGQDFQPPPNWDEGFEFSGAGSGPGEQADFHDIFEKMFGGARGAHPHARQRSFDARGEDHHAKVLIDLEDAYRGAQRAISLQMPVVDAQGHVSLETRTLNVTIPKGIRAGQHLRLSGQGAAGATPETAGDLYLEIAFRDHPRFQVDGRDVSLELPVAPWEAALGAKVTVPTPDGSVEMTVPAGSASGRRLRLKGKGIPANPPGDLYVILNIVLPPADTESAKAAYDAMRQAFNFDPRAHFYR

SEQ ID NO: 697 - protein, 113 aa, Bartonella sp. Cg3sk
AHGGANEACLKMLQEIGSVKRIPEFIARAKDKNDPFRLMGFGHRVYKNYDPRAKIMQKTCHEVLKELNIQDDPLLDIAIELEKIALNDEYFVEKKLYPNVDFYSGITLKALGF

SEQ ID NO: 698 - protein, 250 aa, Physcomitrella patens
MAKSYPNVSEKYAALIEKARRKIRGMVAEKNCAPIILRLAWHGSGTYDQESKTGGPLGTIRFGQELAHGANAGLDIAVNLLQPIKEQFPELSYADFYTLAGVVAVEVTGGPTIPFHPGRKDHETCPVEGRLPDATKGLDHLRCVFTKQMGLTDKDIVVLSGAHTLGRCHKDRSGFEGAWTPNPLRFDNSYFQVLLEGEKDGLIMLPSDKALLDEPKTRELVELYAKDEDKFFEDYAESHMKLSELGFAEA

SEQ ID NO: 699 - protein, 120 aa, Bartonella sp. Sf2sk
HGGANEACLKMLQEIGSVKRIPEFIARAKDKNDPFRLMGFGHRVYKNYDPRAKIMQQTCHEVLKELNIQDDPLLDIAIELENIALNDEYFVEKRLYPNVDFYSGITLKALGFPTEMFTVP

SEQ ID NO: 700 - protein, 389 aa, Escherichia coli
TLQNGKLNVPENPIIPYIEGDGIGVDVTPAMLKVVDAAVEKAYKGERKISWMEIYTGEKSTQVYGQDVWLPAETLDLIREYRVAIKGPLTTPVGGGIRSLNVALRQELDLYICLRPVRYYQGTPSPVKHPELTDMVIFRENSEDIYAGIEWKADSADAEKVIKFLREEMGVKKIRFPEHCGIGIKPCSEEGTKRLVRAAIEYAIANDRDSVTLVHKGNIMKFTEGAFKDWGYQLAREEFGGELIDGGPWLKVKNPNTGKEIVIKDVIADAFLPQILLRPAEYDVIACMNLNGDYIYDALAAQVGGIGIGPGANIGEECSLFEATHGAAPKYAGQDKVNPGSIILSAEMMMRHMGWTEAADLIVKGMEGAINAKTVTYDFERLMEGAKLL

SEQ ID NO: 701 - protein, 226 aa, Aspergillus nidulans FGSC A4
MNREEMIWEWFSADPERLRLSSSFMEADRGSRPSWVEWCSLPGQLAKVFDGGVEDDFMVDVAGGRGHDLKSFTDKFPDVKGQFILEDLGHVLEQSVDGLRAKKIAFDLFKEQPFKGAYVYYLKFILHDWSDGQCHRILTHIREAMRPESKLIIEEFILPEKDCPMLSAMWDWEMMVFCNSFERSESHWRKVLSKAGFQAKFYYPPGDGQVRFLQSKGTFSVLTILE

SEQ ID NO: 702 - protein, 500 aa, Euphorbia lagascae
MEQKNLSFPSILISFLLVLILVVVMRLWKKQNPPPGPWKFPIIGNLPHLLLTSDLGHERFRALAQIYGPVMSLQIGQVSAVVISSAEAAKEVMKTQADAFAQRPIVLDAQIVFYNRKDVLFASYGDHWRQMKKIWILEFLSAKKVQSSRLIREEEMEDAITFLRSKAGSPVNITKIIYGIIISIMIRTSVGNCKQKERLLSVADAVNEAATSFGTADAFPTWKLLHYIIGAESKPRRLHQEIDDILEEILNEHKANKPFEADNLMDVLLNLQKNGNVPVPVTNESIKASVLQMFTAGSETTSKATEWVMAELMKNPTELRKAQEEVRQVFGEMGKVDESRFHDLKFFKLVVKETLRLHPPVVLIPRECRETTRIDGYEIHPNTRIVVNAWAIGRDPNTWSEPGKFNPERFKDCAIDYKGTTFELVPFGAGKRICPGITSAITNLEYVIINLLYHFNWELADGITPQTLDMTEAIGGALRKKIDLKLIPIPYQVSLGSNIS

SEQ ID NO: 703 - protein, 180 aa, Rubrivivax gelatinosus PM1
MRRLAIAALLCIVGSGAQAACPPLLDRSFPRLQDEKPQNLCQYAGKVVVVVNTASYCGFTSQYKGLEALHARYQSRGLVVLGFPSNDFGSQEPGSNQDIAAFCENTFGVRFPMFAKSSVKGSARNPLYADLAQRTGKTPAWNFHKYLIGRDGQVVLSFSSQTDPQDPVFVQEIEKLVDSQ

SEQ ID NO: 704 - protein, 493 aa, Pneumocystis carinii
  misc_feature (398)..(398): Xaa can be any naturally occurring amino acid
CTTKHTGTSASTPIAAGIIALILSKRSDLTWRDVQALIVYTAVPFNLNYHEWDQLPSGRYYNNFFGFGKLDAYAMVQQAKTFQKLNPQTIFSTQLIQVNKKFSENNGHITSTFYIHRDYPTHYKFKNLEYICVSFCYKHQYRGHLEFSITSPANVTSQLAHRRPRDKHSGIVYWTFMSVKHWGEKIVGNWTIDVEDKKDQNLDGEVFDWQLHFFGESSESEGVPPPSYPFLSRYPTTTPPPDPDATSPPDPDANLPPDSNADPQPPSEPAPPSEPESQPSSEPGSQPPSKPGPQPPSDPQPPSDLKPPSKPDARPRPPSDPSSQQDPDTSLSSNPTSTSSSEPPPPSPPPPPPPPPAPAPAPAPPRPELEPEPEPGPEPVPQPPQPQPPQPQPEPPAXPPKPQPPPPSPPEQKPTSITSSTSTTSSSKTKISTTRKASSTKASSTTKTSTRPSPTEGTFTGSSASHLSFFEKRHLLLQMILLLFFFLFLGYSF

SEQ ID NO: 705 - protein, 388 aa, Escherichia coli
TLQNGKLNVPENPIIPYIEGDGIGVDVTPAMLKVVDAAVEKAYKGERKISWMEIYTGEKSTQVYGQDVWLPAETLDLIREYRVAIKGPLTTPVGGGIRSLNVALRQELDLYICLRPVRYYQGTPSPVKHPELTDMVIFRENSEDIYAGIEWKADSADAEKVIKFLREEMGVKKIRFPEHCGIGIKPCSEEGTKRLVRAAIEYAIANDRDSVTLVHKGNIMKFTEGAFKDWGYQLAREEFGGELIDGGPWLKVKNPNTGKEIVIKDVIADAFLQQILLRPAEYDVIACMNLNGDYISDALAAQVGGIGIAPGANIGDECALFEATHGTAPKYAGQDKVNPGSIILSAEMMLRHMGWTEAADLIVKGMEGAINAKTVTYDFERLMEGAKL

SEQ ID NO: 706 - protein, 412 aa, Arabidopsis thaliana
MGLFGTKKIGKYEIGRTIGEGNFAKVKLGYDTTNGTYVAVKIIDKALVIQKGLESQVKREIRTMKLLNHPNIVQIHEVIGTKTKICIVMEYVSGGQLSDRLGRQKMKESDARKLFQQLIDAVDYCHNRGVYHRDLKPQNLLLDSKGNLKVSDFGLSAVPKSGDMLSTACGSPCYIAPELIMNKGYSGAAVDVWSCGVILFELLAGYPPFDDHTLPVLYKKILRADYTFPPGFTGEQKRLIFNILDPNPLSRITLAEIIIKDSWFKIGYTPVYHQLSDSIKDNVAEINAATASSNFINAFQIIAMSSDLDLSGLFEENDDKRYKTRIGSKNTAQETIKKIEAAATYVSLSVERIKHFKPKEIRSRSSYDLLSAEVIEVTPTNCVIEISKSAGELRLYMEFCQSLSSLLTAEVS

SEQ ID NO: 707 - protein, 356 aa, Lycopersicon esculentum
MDGKENNGVNGSNKVGIPKCCLKARVFDPELEANCHSTVVSGWFSQPPTSFDGKEKVLYFNNPMWPGEAHSLKVEKVLFKGKSEFQEVLVFESASYGKVLVLDGIVQLTEKDECAYQEMIAHLPLCSIKSPKKVLVVGGGDGGVLREISRHSSVELIDICEIDKMVIDVSKKYFPDLAIGFEDPRVNLHVGDAVEFLKNTPEGKYDAIIVDSSDPVGPAIELVEGPFFAKIARALRPGGVLCNMAESMWLHTHLIQDMISICRETFSSVHYAWASVPTYPSGVIGFLLCSTEGPFVDFKHPVNPIEKLEGALQHQRELKFYNSEMHEAAFALPCFLRREVSGLRDSPRSAGSGVKI

SEQ ID NO: 708 - protein, 221 aa, Glycine max
  misc_feature (157)..(157): Xaa can be any naturally occurring amino acid
  misc_feature (170)..(170): Xaa can be any naturally occurring amino acid
MLSISATRIFFLRSTTIRLSSSSSSLQFFSNPNRTLFRPFLHTSFKPLPSSFSFRTDHTMATSNAKSVHDFTVKDAKGNDINLGDYKGKVLIIVNVASQCGLTNSNYTELSQLYEKYKQKGLEILAFPCKQFGAQAPGSNEQIQEFVCTRFKAEFPXFDKVDVNGDKAAXLYKYLKSSKGGLFGEGIKWNFSKFLVDKEGNVVDRYAPTTSPLSIEVRQLV

SEQ ID NO: 709 - protein, 341 aa, Chloroflexus aurantiacus
MRGTALYGPYDVRSEYVPDPTIIEPTDAIIRLSATCICGSDLWPYRGVDPITRPVPMGHEYVGIVEEVGSAVKIIKPGQFVVGSFFASDNTCPICQAGYQTSCVNRQPGAPTGAQAEYARIPLADGTLVPTPDLPPADLIPDLLAASDVLGTGWFAAVAAEVGPGKTVAVVGDGAVGLLAVLSARQMGAERIILIGSRHPQRQALAQEFGATDVIEARGDEAIEMLKELTDGLGVHSTIEAVGTQESMMQAIRATRPGGHVGVVGVLHDVAIPGREFFFSHVHLHGGPAPVRRFLPELINLIWQRVIKPGKVFDLTLPLEQVAEGYRAMDERRAIKVLLKP

SEQ ID NO: 710 - protein, 589 aa, Zea mays
  misc_feature (173)..(173): Xaa can be any naturally occurring amino acid
  misc_feature (559)..(559): Xaa can be any naturally occurring amino acid
  misc_feature (572)..(572): Xaa can be any naturally occurring amino acid
MCGILAVLGCSDWSQAKRARILACSRRLKHRGPDWSGLYQHEGNFLAQQRLAVVSPLSGDQPLFNEDRTVVVVANGEIYNHKNVRKQFTGTHNFSTGSGCEVIMPLYEKYGENFVDMLDGVFAFVLYDTRDRTYVAARDAIGVNPLYIGWGSDGSVWIASEMKALNEDCVRFXSSPPGHLYSSAGGGFRRWYTPHWFQEQVPRTPYQPLVLREAFEKAVIKRLMTDVPFGVLLSGGLDSSLVASVTKRHLVETEAAEKFGTELHSFVVGLEGSPDLKAAREVADYLGTIHHEFHFTVQDGIDAIEEVIYHDETYDVTTIRASTPMFLMARKIKSLGVKMVLSGEGSDELLGGYLYFHFAPNKEEFHRETCRKVKALHQYDCLRANKATSAWGLEVRVPFLDKEFINVAMGMDPEWKMYDKNLGRIEKWVMRKAFDDDEHPYLPKHILYRQKEQFSDGVGYNWIDGLKSFTEQQVTDEMMNNAAQMFPYNTPVNKEAYYYRMIFERLFPQDSARETVPWGPSIACSTPAAIEWVEQWKASNDPSGRFISSHDSAATDHTXAVSRRWPTAAATXAANGTVNGKDVAVAIAV

SEQ ID NO: 711 - protein, 426 aa, Caulobacter crescentus CB15
MTDKATLTIGDKSYELPILKGSTGPDVIDVRKIYGESDHFTFDPGFTSTASCESKITYIDGDAGILLHRGYPIDQLAEKSSFLEVCYLLLNGELPKADEFAKFEHNITYHTMLHAQFDRFFEGFRRDAHPMAVMTGAVGALSAFYSDSINVDDAREREISAHRLIAKMPTIAARAYKYTVGQPFVSPRNDLSYSENFLRMCFAVPAEDWKPNPVLTRAMDRIFILHADHEQNASTSTVRLAGSSGAHPFACIAAGIACLWGPSHGGANQEALEMLETIGSVDNIKDYVQGVKDRKYKLMGFGHRVYKNFDPRAKVMQKTAHEVLAELGHNNDPLLQVAQELEKVALNDPYFVDRKLYPNIDFYSGITLRAMGFPTNMFTVLFALARTVGWISQWKEMFEDPTRKIGRPRQLYTGATHRDYVTLDKR

SEQ ID NO: 712 - protein, 286 aa, Buchnera aphidicola str. APS (Acyrthosiphon pisum)
MDHKKTWHEKLYCHLGQYFLIEKMLYKKKTPHHQVMIFKNSVFGKIMVIDDIVQTTERDEFIYHEMLTHVPIIAHGSIKSVLIIGGGDGGILREVCRYKMIENITMVEIDVNIIDLCKKYFPNHSNQAYQDSRLNLIIDDGLNFIKRTKEKFDLIISDSTDPIGCGKNLFRSEFYFNCKNHLEENGIFVAQNGVFFLQKNETILTYKNLKKYFYDTRFYQANVPTYYGGVMVFAWGTNNIEYRKNSLEKIQIRIKNTKLDFNYYNAKIHISSFYLPQYILNELNES

SEQ ID NO: 713 - protein, 187 aa, Agrobacterium tumefaciens str. C58
MSQESSRRASARRESPSSPRTWAGWIPVTGTGMRECVVALCLLLTLIFAAASPALAFNPDEVLKDPVLEQRARNLTSQLRCMVCQNQSIDDSNAELARDLRVLVRERLVQGDSDKAVIDYVVSRYGEFVLLKPRLSLRTLLLWGAPIGLTLAGIFAVFVFSRRRATQERPQKLSADEEERIRNLIEK

SEQ ID NO: 714 - protein, 342 aa, Coxiella burnetii RSA 493
MKVLSKLKPAPGLWLHKAPTPKPGRDEVLIKIKKTAICGTDLHIYKWDEWAQKTIPVPMHVGHEFVGEIVEVGEAASALAVGDRVSGEGHITCGDCRNCRAGKRHLCRYTVGVGVNRPGAFAEYLVIPAKNAYKIPAKISDDIAAILDPFGNAAHSALEFDLVGEDVLITGAGPVGLMSAAIARHVGARHVVITDVNDYRLALAEKVGVTAAVNSTKTPLTETMKNLGMTEGFDVGLEMSGNAEAFRSMLTVMNNGGKIAFLGIPPEPFAIDWNQVVFKSLLIKGIYGRRMFETWYKMTNLLLSGLDISPIITHEFPMKDFQQAFDVMLSGKTGKVILNWEQ

SEQ ID NO: 715 - protein, 346 aa, Escherichia coli K12
MKSVVNDTDGIVRVAESVIPEIKHQDEVRVKIASSGLCGSDLPRIFKNGAHYYPITLGHEFSGYIDAVGSGVDDLHPGDAVACVPLLPCFTCPECLKGFYSQCAKYDFIGSRRDGGFAEYIVVKRKNVFALPTDMPIEDGAFIEPITVGLHAFHLAQGCENKNVIIIGAGTIGLLAIQCAVALGAKSVTAIDISSEKLALAKSFGAMQTFNSSEMSAPQMQSVLRELRFNQLILETAGVPQTVELAVEIAGPHAQLALVGTLHQDLHLTSATFGKILRKELTVIGSWMNYSSPWPGQEWETASRLLTERKLSLEPLIAHRGSFESFAQAVRDIARNAMPGKVLLIP

SEQ ID NO: 716 - protein, 209 aa, Triticum aestivum
  misc_feature (92)..(92): Xaa can be any naturally occurring amino acid
  misc_feature (108)..(108): Xaa can be any naturally occurring amino acid
  misc_feature (116)..(116): Xaa can be any naturally occurring amino acid
  misc_feature (156)..(156): Xaa can be any naturally occurring amino acid
MAPTVMASSATSVAPFQGLKSTAGLPVSRRSNGASLGSVSNGGRIRCMQVWPIEGIKKFETLSYLPPLSTEALLKQVDYLIRSKWVPCLEFXSKVGFIFREHNASPGXYYDGRYWXTMWKLPMFGCTDATQVINEVEEVKKEYLTRIPHIGFDNMXQVQCVSSSPNGLQGSGRLNSNHTGILSAMRLEPMLWFPPLPLVSRKVHVSHMK

SEQ ID NO: 717 - protein, 254 aa, Triticum aestivum
  misc_feature (100)..(100): Xaa can be any naturally occurring amino acid
  misc_feature (139)..(139): Xaa can be any naturally occurring amino acid
  misc_feature (148)..(148): Xaa can be any naturally occurring amino acid
  misc_feature (169)..(169): Xaa can be any naturally occurring amino acid
MAKTYPVVSAEYQEAVEKARQKLRALIAEKNCSPLMLRLAWHSAGTFDVSSKTGGPFGTMKKPAEQAHAANAGLDIAVRMLEPIKEEIPTISYADLYQLXAGVVAVEVSGGPVIPFHPGREDKPQPPPEGRLPDATRGXLDHLRAVFXASRWGLSDQDIVALSGGHTLXGRCHKERSGFEGPWTRNPLKFDNSYFTELLSGDKEGLLQLPSDKTLLTDPVFRPLVEKYAADEKAFFEDYKEAHLRLSELGYAEA

SEQ ID NO: 718 - protein, 351 aa, Staphylococcus aureus subsp. aureus COL
MKALVKTREGHGNLELLDKEVATPLDDKVKIKVHYAGICGTDIHTYEGHYKVNFPVTLGHEFSGEIVEVGADVKDFKVGDRVTSETTFYVCNECEYCKSKDYNLCNHRKGIGTQVDGAFTNYVIAREESLHHIPDEVSYQSAAMTEPLACAHHGVSKIQVNSGDVAVVMGPGPIGLLVAQVLKSKGATVVVTGLDNDKVRLDKAEALHMDYVVNLQQTDLKTYINGITDGYGADVVVECSGAVPAARQGLDILRKKGFYSQIGIFKDAEIPFDMEKVIQKEITVVGSRSQKPADWEPSLQLMADGLVNAEALVTKIYDISKWDEAYQHLKSGEGIKVLLKPLDLDENEGEN

SEQ ID NO: 719 - protein, 355 aa, Arabidopsis halleri subsp. halleri
ISYLTYDRADMAFAHYGPFWRQMRKVCVMKVFSRKRAESWASVRDEVDKMVRSVSCNVGKPINVGEQIFALTRNITYRAAFGSACEKGQDEFIRILQEFSKLFGAFNVADFIPYFGWIDPQGINKRLVKARNDLDGFIDDIIDEHMKKKENQNAVDDGDVVDTDMVDDLLGFYSEEAKLVSEAADLQNSIKLTRDNIKAIIMDVMFGGTETVASAIEWALTELLRSPEDLKRVQQELAEVVGLDRRVEESDIEKLTYLKCTLKETLRMHPPIPLLLHETAEDTSIDGFFIPKKSRVMINAFAIGRDPTSWADPDTFRPSRFLEPGVPDFKGSNFEFIPFGSGRRSCPGMQLGLYA

SEQ ID NO: 720 - protein, 430 aa, Mycobacterium leprae TN
MSVLLRGVRLYGEGEQVDVLVEGEQIANIGAGIDIPDTADVIDAIDQVLLPGLVDLHTHLREPGREYAEDIETGSAAAALGGYTAVFAMPNTTPVADSPVVTDHVWRRGQQVGLVDVHPVGAVTVGLAGAELTEMGMMAAGAAQVRIFSDDGNCVHNPLVMRRALEYATGLGVLIAQHAEEPRLTVGAVAHEGPTAARLGLSGWPRAAEESIVARDALLARDAGARVHICHASTAGTVEILKWAKEQGISITAEVTPHHLLLDDSRLASYDGVNRVNPPLRETADAVALRQALADGIIDCVTTDHAPHADHEKCVEFSAARPGMLGLQTALSVVVHTMVVPGLLSWRDVAQVMSENPARIAGLPDHGRPLEVGEPANLTVVDPDVTWTVTGDGLASRSANTPYEAMTLPATVTATLLRGKVTARGQKSPV

SEQ ID NO: 721 - protein, 127 aa, Brassica napus
  misc_feature (10)..(10): Xaa can be any naturally occurring amino acid
  misc_feature (15)..(16): Xaa can be any naturally occurring amino acid
  misc_feature (25)..(25): Xaa can be any naturally occurring amino acid
  misc_feature (48)..(48): Xaa can be any naturally occurring amino acid
  misc_feature (65)..(65): Xaa can be any naturally occurring amino acid
  misc_feature (91)..(91): Xaa can be any naturally occurring amino acid
  misc_feature (100)..(100): Xaa can be any naturally occurring amino acid
  misc_feature (110)..(110): Xaa can be any naturally occurring amino acid
  misc_feature (122)..(122): Xaa can be any naturally occurring amino acid
LKIADFGWSXHTFNXXRTMCGTLDXLPPEMVESVEHDASVDIWSLGIXCYEFLYGVPPFEAMEHXDTYRRIVQVDLKFPPKPIVSASAKDXISQMLVKEXAQRLPLHKLXEHPWIVQNADPXGIYRG

SEQ ID NO: 722 - protein, 373 aa, Picrophilus torridus DSM 9790
MSISLGLEDVFIKYTSLTSIDGEKGELRYRGYDIKDLVEHCSFEEVAYLMFYGELPKRDELEHFKSNVMKNYKIPENVKNIIKNMPRDGDALAIMEAAFAALSTEEYTWEKERDREKAAEIMGRALGIVSAVFRYRDGREIKDPENKGYAEAFLNACFDSGIDEDKIKAMNAALILYIDHEVPASTTAALVASSTLSDMYSCVTAAIAALKGPLHGGAAEAAYKQFLAIKSPENVDSWFNENILNNKKRLMGFGHRVYKTYDPRMLIFKELARKNAKTDEQKKILELAERLEALGVKNFGQKKIFPNTDYYSGIVFNEIGFPLYMFTTLFALSRVVGWVAHISEYVESEERLIRPRAIYIGPEKRDVVPIDKR

SEQ ID NO: 723 - protein, 314 aa, Pueraria montana var. lobata
MAAIEIPTIVFPNSFAQHRVPVVEMGSAPDFTCKKDTKEAIIEAVKQGYRHFDTAAAYGSEQALGEALKEAVDLGLVSRQDLFVTSKLWVTDNHPHLVVSALRKSLKTLQLEYLDLYLIHWPLSSQPGKFSFPIEVEDLLPFDVKGVWEAMQECQKLGLTKAIGVSNFSVKKLQNLLSVATIRPVVNQVEMNLAWQQKKLREFCKENGIVITAFSPLRKGASRGPNEVMENDVLKEIADAHGKSIAQVSLRWLYEQGVTFVPKSYDKERMNQNLQIFDWALTQEDHHKISQISQSRLISGPTKPQLSDLWDDEI

SEQ ID NO: 724 - protein, 113 aa, Bartonella sp. Sf3sk
HGGANEACLKMLQEIGSVKRIPEFIARAKDKNDPFRLMGFGHRVYKNYDPRAKIMQQTCHEVLKELNIQDDPLLDIAIELENIALNDEYFVEKRLYPNVDFYSGITLKALGFP

SEQ ID NO: 725 - protein, 275 aa, Oceanobacillus iheyensis HTE831
MIKGLQDTFTLNNGVEMPGFGLGVYKVEDGSVAEESVRIALENGYRSIDTASFYDNEKGVGEGIKNSGVPREDIFLTSKVWNDEQGYTSTKQAFQRSLDKLGTDYLDLYLIHWPVKDTFVETWRAMEELYRDGKVKAIGVSNFHVQHLEKLFVNAEVIPAVNQVEFHPHLTQEGLRAFCRQHNIQLEAWSPLKRGQLLEEDIIQTIAKKYGKSAAQVILRWDVQHEVITIPKSITKERIIANADIFDFSLTEEEMNQIDAMNQNDRSGSNPDSFD

SEQ ID NO: 726 - protein, 497 aa, Zea mays
  misc_feature (268)..(268): Xaa can be any naturally occurring amino acid
  misc_feature (293)..(293): Xaa can be any naturally occurring amino acid
  misc_feature (317)..(317): Xaa can be any naturally occurring amino acid
  misc_feature (330)..(330): Xaa can be any naturally occurring amino acid
  misc_feature (366)..(366): Xaa can be any naturally occurring amino acid
CAETWREAAAQLGWPCCCSCSRPSQCSSHPPWPTTCSPWTSTPRRARSWTASCAPPCRPPSGGRSRSPRASSASSSTTASRRAATRPCSSRATPRSRPWGPTPRCSRGRCSSSTTSAPRCTPPAGPPCPAPTSRRSPPAPPSSRRGDPPTPCPWASATASPRRPRTTSTRSRRPPPPASRSSWRRSGAGASATWPQPLVSRLATTEFIPLPPPSPPIGRTHRASSGADRVSSTAVKAYPTVNEDYLKAVDKAKRKLRGLIAEKNCAPXSWLRLAWHSAGTFDVATKTGGPFGXTMKNPAEQAHGANAGLQIAIRRPXKEQFPILSSAECXHLPGFAAVAATRWTGRSWPVEVTRRAPDVPFHPGQXRTKPEPPPEGRLPDATQGSDHLRQVFSTQMGLSDQDIVALSGGHTLGRCHKDRSGFEGAWTSNPLIFDNSYFKELLSGEKEGLLQLPSDKALLSDPSFRPLVDKYAADEDAFFADYAEAHLKLSELGFAEA

SEQ ID NO: 727 - protein, 415 aa, Zea mays
MVSDGARGLLGAYELGRTLGEGNFGKVKQARHRGSGGQFAVKIMERARVLSQRADEQICREIATLKLLAHPNVVRLHEVAASKTKIYMVLELVNGGELLDRIQAASEGKLPEQEARRLFQQLVDGVSYCHEKGVCHRDLKLENVLVDRKGNIKISDFGLSALPQHLGNDGLLHTTCGSPNYIAPEVLQNRGYDGSLSDIWSCGVILYVMLVGHLPFDDRNIVVLYQKIFKGDAQIPEWLSPGARNLLRRILEPYPAERIAMAEIKAHPWFQEHYVPVLPPYDDDDDSVKQIGAGSKTTHHINAFQLIGMASSLDLSGFFEEEDVSQRKIRFTSAQPPEDLFAEIERSATDMGFHVHRGHSKLRLTRNCDRSKNQKNPMSSSSSSFLVCTEVFELSPSLYVVELNKSHGDPALYRQ

SEQ ID NO: 728 - protein, 112 aa, Bartonella sp. Cg1sk
AHGGANEACLKMLQEIGSVKRIPEFIARAKDKNDPFRLMGFGHRVYKNYDPRAKIMQKTCHEVLKELNIQDDPLLDIAIELEKIALNDEYFVEKKLYPNVDFYSGITLKALG

SEQ ID NO: 729 - protein, 132 aa, Glycine max
  misc_feature (18)..(18): Xaa can be any naturally occurring amino acid
EEVFSIVGRDPLIEVAVXALEKVALSDEYFIKRKLYPNVDFYSGLIYRAMGFPPEYFTVLFAIPRMAGYLAHWRESLDDPDTKILRPQQVYVGEWLRHYTQVNVRTTSSDADKLGEVAISNASKRRLAGSGV

SEQ ID NO: 730 - protein, 225 aa, Glycine max
MIISKLLLLLHQTFCKMSIAEEESPSVMPKVITFLCSLLERVAESNDHNQHLQQHQKISVFHGLTRPNISIQCYLERIFKYANCSPSCFVVAYVYLDRFTQRQPSLPINTFNVHRLLITSVMVAAKFMDDMYYNNAYYAKVGGITKVEMNFLELDFLFGLGFHLNVTPGTFQAYCVHLQREMLLIQPLNFSDSTLNLGQSLKAHLCFNEDECSHQKQKQQQQLAV

SEQ ID NO: 731 - protein, 146 aa, Arabidopsis thaliana
MDPMDIVGKSKEDASLPKDVRVARDAQDLLIECCVEFINLVSSESNDVCNKEDKRTIAPEHVLKALQVLGFGEYIEEVYAAYEQHKYETMQDTQRSVKWNPGAQMTEEEAAAEQQRMFAEARARMNGGVSVPQPEHPETDQRSPQS

SEQ ID NO: 732 - protein, 364 aa, Populus balsamifera subsp. trichocarpa x Populus deltoides
MGSTGETQMTPTQVSDEEAHLFAMQLASASVLPMILKTAIELDLLEIMAKAGPGAFLSTSEIASHLPTKNPDAPVMLDRILRLLASYSILICSLKDHPDGKVERLYGLAPVCKFLTKNEDGVSVSPLCLMNQDKVLMESWYYLKDAILDGGIPFNKAYGMTAFEYHGTDPRFNKVFNKGMSDHSTITMKKILETYKGFEGLTSLVDVGGGTGAVVNTIVSKYPSIKGINFDLPHVIEDAPSYPGVEHVGGDMFVSVPKADAVFMKWICHDWSDAHCLKFLKNCYDALPENGKVILVECILPVAPDTSLATKGVVHIDVIMLAHNPGGKERTEKEFEGLAKGAGFQGFEVMCCAFNTHVIELRKN

SEQ ID NO: 733 - protein, 314 aa, Helianthus annuus
MALGFSDRNTEMSPYSQQSNTSAVPMDSSKKRKTRSRKEAPEKVAATLAKWIEYNKANEDGKAKTRKAPAKGSKKGCMKGKGGPENSRTNFRGVRQRTWGKWVAEIREPNRGRRLWLGTFGSAVEAALAYDEAARAMYGTSARLNLPNCRSKNDILPLLVTNPASSCDSTTTCSYSEVDATHDSKPGPAVFPSVKHEESVQVKHEPEIVAKEEHCVDNNDLGFDIGDEMFDLEELLGAVEDSNPEAGSGDGYDGRFVNGADANENMQMYMQPDPCVSGQDYSFDFLQPGRPEDCSFTLEELGLGLDAELDLYSN

SEQ ID NO: 734 - protein, 512 aa, Salmonella enterica subsp. enterica serovar Typhi Ty2
MTNNPPSTRIQPSEYGYPLKLKARYDNFIGGDWVAPADGEYYQNLTPVTGQPLCEVASSGKKDIDLALDAAHKAKDKWAHTSVQDRAAILFKIADRMEQNLELLATAETWDNGKPIRETSAADIPLAIDHFRYFASCIRAQEGGISEVDSETVAYHFHEPLGVVGQIIPWNFPLLMASWKMAPALAAGNCVVLKPARLTPLSVLLLMEVIGDLLPPGVVNVVNGAGGEIGEYLATSKRIAKVAFTGSTEVGQQIMQYATQNIIPVTLELGGKSPNIFFADVMDEEDAFFDKALEGFALFAFNQGEVCTCPSRALVQESIYERFMERAIRRVESIRSGNPLDSGTQMGAQVSHGQLETILNYIDIGKKEGADILTGGRRKELDGELKEGYYLEPTILFGKNNMRVFQEEIFGPVLAVTTFKTMEKALEIANDTQYGLGAGVWSRNGNLAYKMGRGIQAGRVWTNCYHAYPAHAAFGGYKQSGIGRETHKMMLEHYQQTKCLLVSYSDKPLGLF

SEQ ID NO: 735 - protein, 150 aa, Glycine max
  misc_feature (114)..(114): Xaa can be any naturally occurring amino acid
  misc_feature (120)..(120): Xaa can be any naturally occurring amino acid
KSKASFPTRRHNNDIHSIASNVERVQSMQAWPPDGRQKCETLSYLPDIDHAQLATEVEYLFRKGCIPCMEFELEHGFVHREHDRSAGSFDGGSWTTCKMPTFGCTEASQVFKEXLYRVRXACPYGFIRIIGIVNVRRVQGIGFFADKPTG

SEQ ID NO: 736 - protein, 200 aa, Glycine max
  misc_feature (145)..(145): Xaa can be any naturally occurring amino acid
  misc_feature (158)..(158): Xaa can be any naturally occurring amino acid
MSKTTTSSSEQTARNRLATLAAHLLPSDAASATAILRPHRLSAPAGSSPPVNLKGTVTVVDERTGKKYQIEVTPDGTVRASDFKKISTGKNDKGLKLYDPGYLNTAPVISRISYIDGDAGILRYRGYPIEDLAEKSSFMEVSYLXDMIQSMPHDAHPXGMLVNAMSALSVYHPEANPALKGLDIYNSKQVRNKQVARGIG

SEQ ID NO: 737 - protein, 416 aa, Zea mays
  misc_feature (35)..(35): Xaa can be any naturally occurring amino acid
VCLRLKILDRQRILAMKIHERIKREIATQGLGQYXDLALLVQVSASKTKIYMVLEYVNGGELFDKIALKGKLTEKEGRKLFQQLIDAVGYCHEKGVYHRDLKPENVLVDAKGNIKVSDFGLSALPQNQQKDGLLHTTCGSPNYIAPEVLLNKGYDGSISDVWSCGVILYVMLTGNLPFDDQNVVVLYQKILKGNAHIPKWLSQGAQDILRKILDPNPVTRIDVDGIRAHDWFKQGYAPAMPFSDDEEDISMDEDSLNITEHNDIQDKIAINQINAFQLIGMSSCLDLSGFFEKEDVSERKIRFASNYSPAYLFEKIESIVRKMGFQVHKSNGKLKVIQDCKGLANSRGQESLLISAEVFEINESLYVVELKKSSGDCSLYRKLCETLSEDLGTCKSQQFLKQDSIRQDIGRYNSSF

SEQ ID NO: 738 - protein, 461 aa, Mesorhizobium loti MAFF303099
MSKTQTADQITEARRESHLFYLSSLRRPLIDRAEGIYMWTQDGRRFIDGSSGPMVANIGHSNRNVLDAMKRQMDRATFAYRLHFENEPAEELARELAKKLPEGMDRIFFVSGGSEATESCIKLARQWAVATGQASRWKVITRFPSYHGGTLGSLSITGDDALAETFEPMMRVMPTVPAPTAWRDRDNLSMEQRGVRYADMLEEKILAEGPESVVAFIMEPIGGAATAALVAPDSYYARTREICDHYGILLIHDEVMCGAGRTGKFLGGDHWNCKPDIVALSKGLGSGYAPLGALAAPMRLVQPLLASGGFQHGHTYAGNPLACAAGLAVLGEMDRLDLIANAAAMGDVLMDGLKGLAKRFPFIADVRGKGLLTGAEMVADPETLRPIEQGKKATQRLLDLAYERGLIIYGRRVKGGVDGDNFMVAPPMIVTSEQVGEIISIIGDSLEVLASELDLPVEGRG

SEQ ID NO: 739 - protein, 670 aa, Zea mays
MDGRRTILMGRYEIGKQLGQGTFAKVFYARNLTTGLAVAIKMINKDKVMKVGLMEQIKREISIMRLVKHPNILQLYEVMASKSKIYFVLEYAKGGELFNKIAKGGKLSEDAARKYFQQLVSAVDFCHSRGVYHRDLKPENLLLDENENLKVSDFGLSALAESKRQDGLLHTTCGTPAYVAPEVLSRKGYDGAKSDELAKRLKLRVKKKENGTLKLAAPKEGKKGALSPLPLVAGVEAELHPVSVGHKSMDAEMKQPLEGSMSLNIDSEGEPHIGNGSIVVENPASDLVKSESDRIKTFYQTVLSAIMVFVTAALSSYKDMKPLYSTTSHGKAHLSNLLVDEGLFIFMTFLCAMVLMMSEFVVHQHGRRGHVWCWVRTILVAVTGVMLIVADTILLIVTNRSNMLLSVLLVPEVLLFGVAVSVGAWMQESLPSSELGSRYDSAMKGTFDIATVGTIVSFTLQGGIVFGYLKTPDSNQVKHDPPLDLAACYATSTLSLTGMTMCAMPLAYLPNGMLEVLVRVVERLRSAVLAALAMMALVVSVEFLDGFVVVSFFPDAVTIALYYVVKLFSACQPREEISQLDFTFRIVAAAGFTLMTGLYAAFTGTDHYGFNLKTAMFILLLAVVSSLSRLAIPLHMPEAGVGGVIEFGIVSIALSFPLLALLAAIPLVFK

SEQ ID NO: 740 - protein, 347 aa, Staphylococcus aureus subsp. aureus COL
MKALKLYGVEDLRYEDNEKPVIESANDVIIKVRATGICGSDTSRYKKMGPYIKGMPFGHEFSGVVDAIGSDVTHVNVGDKVTGCPAIPCYQCEYCLKGEYARCEKLFVIGSYEPGSFAEYVKLPAQNVLKVPDNVDYIEAAMVEPSAVVAHGFYKSNIQPGMTVAVMGCGSIGLLAIQWARIFGAAHIIAIDIDAHKLDIATSLGAHQTINSKEENLEKFIENHYANQIDLAIESSGAKVTIGQILTLPKKGGEVVLLGIPYDDIEIDRVHFEKILRNELTVCGSWNCLSSNFPGKEWTATLHYMKTKDINVKPIISHFLPLEKGPETFDKLVNKKERFDKVMFTIY

SEQ ID NO: 741 - protein, 355 aa, Arabidopsis lyrata subsp. petraea
ISYLTYDRADMAFAHYGPFWRQMRKVCVMKVFSRKRAESWASVRDEVDKMVRSVSCNVGKPINVGEHIFALTRNITYRAAFGSACEKGQDEFIRILQEFSKLFGAFNVADFIPYFGWIDPQGINKRLVKARNDLDGFIDDIIDEHIKKKENQNAVDDGDVVDTDMVDDLLAFYSEEAKLVSEAADLQNSIKLTRDNIKAIIMDVMFGGTETVASAIEWALTELLRSPDDLKRVQQELAEVVGLDRRVEEADIEKLTYLKCTLKETLRMHPPIPLLLHETAEDTSIDGFFIPKKSRVMINAFAIGRDPTSWADPDTFRPSRFLEPGVPDFKGSNFEFIPFGSGRRSCPGMQLGLYA

SEQ ID NO: 742 - protein, 489 aa, Arabidopsis thaliana
MAEKITRETSLPKERSSPQALILGRYEMGKLLGHGTFAKVYLARNVKTNESVAIKVIDKEKVLKGGLIAHIKREISILRRVRHPNIVQLFEVMATKAKIYFVMEYVRGGELFNKVAKGRLKEEVARKYFQQLISAVTFCHARGVYHRDLKPENLLLDENGNLKVSDFGLSAVSDQIRQDGLFHTFCGTPAYVAPEVLARKGYDAAKVDIWSCGVILFVLMAGYLPFHDRNVMAMYKKIYRGEFRCPRWFSTELTRLLSKLLETNPEKRFTFPEIMENSWFKKGFKHIKFYVEDDKLCNVVDDDELESDSVESDRDSAASESEIEYLEPRRRVGGLPRPASLNAFDIISFSQGFDLSGLFDDDGEGSRFVSGAPVSKIISKLEEIAKVVSFTVRKKDCRVSLEGSRQGVKGPLTIAAEIFELTPSLVVVEVKKKGGDKTEYEDFCNNELKPKLQNLTADDVVAEPVAVSAVDETAIPNSPTISFLPSDTE

SEQ ID NO: 743 - protein, 166 aa, Brassica napus
MDPMDIVGKSKEDASLPKATMTKIIKEMLPADVRVARDAQDLLIECCVEFINLISSESNEVCNKEDKRTIAPEHVLKALQVLGFGEYVEEVYAAYEQHRYETMQDSQRSVKMNSGAEMTEEEAAAEQQRMFAEARARMNGGGGGVSVPQPDPEQQVDTQQQSNLQS

SEQ ID NO: 744 - protein, 355 aa, Arabidopsis lyrata subsp. petraea
ISYLTYDRADMAFAHYGPFWRQMRKVCVMKVFSRKRAESWASVRDEVDKMVRSVSCNIGKPINVGEHIFALTRNITYRAAFGSACEKGQDEFIRILQEFSKLFGAFNVADFIPYFGWIDPQGINKRLVKARNDLDGFIDDIIDEHMKKKENQNAVDDGDVVDTDMVDDLLAFYSEEAKLVSEAADLQNSIKLTRDNIKAIIMDVMFGGTETVASAIEWALTELLRSPEDLKRVQQELAEVVGLDRRVEEADIEKLTYLKCTLKETLRMHPPIPLLLHETAEDTSIDGFFIPKKSRVMINAFAIGRDPTSWADPDTFRPSRFLEPGVPDFKGSNFEFIPFGSGRRSCPGMQLGLYA

SEQ ID NO: 745 - protein, 355 aa, Arabidopsis lyrata subsp. petraea
ISYLTYDRADMAFAHYGPFWRQMRKVCVMKVFSRKRAESWASVRDEVDQMVRSVSCNVGKPINVGEHIFALTRNITYRAAFGSACEKGQDEFIRILQEFSKLFGAFNVADFIPYFGWIDPQGINKRLVKARNDLDGFIDDIIDEHMKKKENQNAVDDGDVVDTDMVDDLLAFYSEEAKLVSEAADLQNSIKLTRDNIKAIIMDVMFGGTETVASAIEWALTELLRSPEDLKRVQQELAEVVGLDRRVEEADIEKLTYLKCTLKETLRMHPPIPLLLHETAEDTSIDGFFIPKKSRVMINAFAIGRDPTSWADPDTFRPSRFLEPGVPDFKGSNFEFIPFGSGRRSCPGMQLGLYA

SEQ ID NO: 746 - protein, 219 aa, Zea mays
GSRVCRWKRDDGGHGDLLQGTTTKCTACDKTVYLVDKLTADNRIYHKACFRCHHCKGTLKLANYNSFEGVLYCRPHFDQLFKRTGSLDKSFEGTPKVVKPERNVGNENATKVSSAFAGTREKCVGCSKTVYPTERVTVNNTMYHKSCFKCCHGGCTISPSNYIAHEGKLYCKHHHGITDHRGSALLQASLRPALQEDRELGQELPRNPKGWQARKKRWE

SEQ ID NO: 747 - protein, 209 aa, Brassica napus
MGDSDRDSGGGQTGNNQNGQSSLSPREQERFLPIANVSRIMKKALPANAKISKDAKETMQECVSEFISFVTGEASDKCQKEKRKTINGDDLLWAMTTLGFEDYVEPLKVYLQRFREIEGERTGLGRPQTGGEAGEHQRDGGVGDGGGGYYGGGMGMQYQQHHQFLHQQNHMYGSTGGWWRRPQWRKELKRFGEVDLLYIEIHIYSSKVF

SEQ ID NO: 748 - protein, 324 aa, Ralstonia eutropha JMP134
MIGVAAHFRTPAKVPMSQSPSHRPPAAPPATGNEQARVAEFSVASGEREISVCVCYPPGYPAPATESGALLPWLVYLHAGGFVDGGLERAKEVVQMLAASVPAVVVTPAYSLAPDHPFPAAPEDAYNTVEWVLRYARRLKVDKARFALVGEEAGGNLAIALSQMLRDRCAPQPSGQWLIRPVTDPCLQHASCTGAGRGAVPLETLQRLACNYRDYLPTPAASVHPYAAPALASRLAGLPPTLVQVAEVDALRAEGEAFAGRLAKAGVPAEAMIMPGACGDGVEDTHDDCQSWVDEGARFLRRCLAGADDTSSRRESRSGMKPAG

SEQ ID NO: 749 - protein, 422 aa, Pseudomonas fluorescens PfO-1
MEFSMGYKKIQVPAVGDKITVNADHSLNVPDNPIIPFIEGDGIGVDVSPVMIKVVDAAVEKAYGGKRKISWMEVYAGEKATQVYDQDTWLPQETLDAVKDYVVSIKGPLTTPVGGGIRSLNVALRQQLDLYVCLRPVVWFEGVPSPVKKPGDVDMVIFRENSEDIYAGIEWKAGSPEATKVIKFLKEEMGVTKIRFDQDCGIGIKPVSKEGTKRLVRKALQYVVDNDRKSLTIVHKGNIMKFTEGAFKDWGYEVAKEEFGAELLDGGPWMKFKNPKTGREVVVKDAIADAMLQQILLRPAEYDVIATLNLNGDYLSDALAAEVGGIGIAPGANLSDTVAMFEATHGTAPKYAGKDQVNPGSVILSAEMMLRHLGWTEAADLIIKGTNGAIKAKTVTYDFERLMEGATLVSSSGFGEALIKHM

SEQ ID NO: 750 - protein, 138 aa, Mycobacterium avium
MVLMRTDPFRDLDRWTQQVLGTRRPAVMPMDAWRDGDQFVVEFDLPGVNADSLDLDVERNVLTVRAERPDLDQNREMVSAERPRGVFSRQLFLGDNLDTDKIEANYHDGVLRLTIPVAEKAKPRRIEINHNHRTAINA

SEQ ID NO: 751 - protein, 57 aa, Glycine max
MAGDGAATCIDILLAIILPPLGVFLKYGCQVEFWICLVLTLFGYIPGIIYAVYSITK

SEQ ID NO: 752 - protein, 499 aa, Nostoc punctiforme PCC 73102
MSETPLLDQIIKNVRVVRPHEDVIELLDLGIKDGKFAQIASNISPDTGKQVFDGKNLLGFPGVVDAHMHVGIYRPLDKDALTESKAAATGGVTTSLNYIRTGQYYLNKGGSYRDFLPEVLALSAGNFFVDYAYHIAPIASQHIDEIPLLFEEHGISSFKIFMFYGGYGLHGLSDQQNLFLMINKEERYDFAHFEFIMRGLTRLMEKHPEARDSISLSLHCEVAEILNAYTKIVENDSSLSGLHAYSAARPPHSEGLAICIASYLANETNCANINLLHLSSRKAMEAALTMQTAFPHINFRREVTVGHLLLDVDTPNGIWAKVNPPIRPRADVEYLWQAVLNNQVDWIVSDHACCSAEQKRSAKDPNNIWLAKSGFGGTEYLLSGVFSEGSKRGMSYNQMAKLLSWNPSRRFGLLKKGDIAIGYDADLVLVDPNETFVVCAAKSESQQGYTPFEGVELSGRVKNTFLRGNLIYNNGQVLGSPIGRYLKRHSSNPHGNLTA

SEQ ID NO: 753 - protein, 118 aa, Sorghum bicolor
MARLAVAIAVVAAVVVVLAATTSEAAISCGQVSSAIALCLSYARGQGFAPSAGCCSGVRSLNSAARTTADRRAACNCLKNAARGISGLNAGNAASIPSKCGVSVPYTISTSTDCSRVS

SEQ ID NO: 754 - protein, 389 aa, Escherichia coli
TLQNGKLNVPENPIIPYIEGDGIGVDVTPAMLKVVDAAVEKAYKGERKISWMEIYTGEKSTQVYGQDVWLPAETLDLIREYRVAIKGPLTTPVGGGIRSLNVALRQELDLYICLRPVRYYQGTPSPVKHPELTDMVIFRENSEDIYAGIEWKADSADAEKVIKFLREEMGVKKIRFPEHCGIGIKPCSEEGTKRLVRAAIEYAIANDRDSVTLVHKGNIMKFTEGAFKDWGYHLAREEFGGELIDGGPWLKVKNPNTGKEIVIKDVIADAFLQQILLRPAEYDVIACMNLNGDYISDALAAQVGGIGIAPGANIGDECALFEATHGTAPKYAGQDKVNPGSIILSAEMMLRHMGWTEAADLIVKGMEGAINAKTVTYDFERLMEGAKLL

SEQ ID NO: 755 - protein, 122 aa, Sorghum bicolor
MARSMKLAVAIAVVAAAAAVVLAATTSEAAVTCGQVSSAIGPCLSYARGQGSGPSAGCCSGVRSLNSAARTTADRRAACNCLKNAARGIRGLNVGKAASIPSKCGVSIPYTISTSTDCSRVS

SEQ ID NO: 756 - protein, 389 aa, Escherichia coli
TLQNGKLNVPENPIIPYIEGDGIGVDVTPAMLKVVDAAVEKAYKGERKISWMEIYTGEKSTQVYGQDVWLPAETLDLIREYRVAIKGPLTTPVGGGIRSLNVALRQELDLYICLRPVRYYQGTPSPVKHPELTDMVIFRENSEDIYAGIEWKADSADAEKVIKFLREEMGVKKIRFPEHCGIGIKPCSEEGTKRLVRAAIEYAIANDRDSVTLVHKGNIMKFTEGAFKDWGYQLAREEFGGELIDGGPWMKVKNPNTGKEIVIKDVIADAFLQQILLRPAEYDVIACMNLNGDYISDALAAQVGGIGIAPGANIGDECALFEATHGTAPKYAGQDKVNPGSIILSAEMMLRHMGWTEAADLIVKGMEGAINAKTVTYDFERLMDGAKLL

SEQ ID NO: 757 - protein, 283 aa, Tropheryma whipplei str. Twist
MVVFVLTYVPSVLLGDGVSIPQFGLGTYELPPNEASSVVQSAIELGYRHIDTASLYANEREVGRAIASSGIKREEFFVTTKLWNSDQPKPREAFERSLDLLSLDYVDLYLIHWPCPPSELYINVWEVLLELKESGRAKSVGVSNFLSEHIDKIKEAGFPLPSVNQIELHPWLQQRELVLSCRNDGIQIESWGPFARFSKDLDAFPELTRPAKQYGKTPAQVILRWHIQKGYVVFPKTVHAERLRQNIDIFDFDLTPDEISGIDSLDAGFRTGPDPSSFRAGLD

SEQ ID NO: 758 - protein, 364 aa, Ustilago maydis 521
MASSNPQTVPCAYKTGRTLGQGTYAVVKEAVHIKTGQYYACKVISKKLMEGREHMVRNEIQALKRVSQGHRSIVTLVDYFETMNNLYLVTDLCVGGELFDRICERGNYYEKDAAHIVRTIVDAVVYLHDQGIVHRDLKPENLLFRDKTEESDLLIADFGLSRVVDDEKITVLSTTCGTPGYMAPEIFKKTGHGKPVDMWAIGVITYFLLCGYTPFDRDTTMEEMQAIINADYRFEPTQYWEDVSEDAKDFINKLLTIDPAKRLSAKEALQHRWLQEAAPTEGGAQPVASAEQKDLLPDIKSAFNAKRTFRKAVNGIRLINRLRTNEQQPNKEEIEKLRQTIREAEDESSNLDQVLLAQETRAAN

SEQ ID NO: 759 - protein, 389 aa, Escherichia coli
TLQNGKLNVPENPIIPYIEGDGIGVDVTPAMLKVVDAAVEKAYKGERKISWMEIYTGEKSTQVYGQDVWLPAETLDLIREYRVAIKGPLTTPVGGGIRSLNVALRQELDLYICLRPVRYYQGTPSPVKHPELTDMVIFRENSEDIYAGIEWKADSADAEKVIKFLREEMGVKKIRFPEHCGIGIKPCSEEGTKRLVRAAIEYAIANDRDSVTLVHKGNIMKFTEGAFKDWGYQLAREEFGGELIDGGPWMKVKNPNTGKEIVIKDVIADAFLQQILLRPAEYDVIACMNLNGDYISDALAAQVGGIGIAPGANIGDECALFEATHGTAPKYAGQDKVNPGSIILSAEMMLRHMGWTEAADLIVKGMEGAINAKTVTYDFERLMEGAKLL

SEQ ID NO: 760 - protein, 437 aa, Oryza sativa (japonica cultivar-group)
MGDHQMMHAAPAAMYNGGGGTTSSHGVWWSNAVGVPAAATCSTTTELAGYTAWSSALAAGYDGMVADNGGKQAKSTTTASSESPGNNSSVTFQEPASIPDPAAVAAVPQPGLAGFTDWTQPFMNNGAGLHEFLQDGHHDMSASSLMNHSSNNLALQQAGHHHELLSSFGSDLLLSPTSPYGGFQSSLLRSLMEPTAKQQQQQPALAGLQQYHQYQQQMGHAPAAAAKFAQAVGARDSLQFTNDAPFWNPSAGFGMPAAVAVAAAAAQDQASVRSAKRSSPAPPRAAATLALKTAMEGVGDSSSVITKKETAFKKPRLETPSPLPTFKVRKEKLGDRITALQQLVSPFGKTDTASVLHETIEYIKFLHDQVGALSAPYLKNGAHQVPHLKNSSPDKSKHGEISLKGRGLCLVPISSTFAVASEVPVELWTPFGANFIR

SEQ ID NO: 761 - protein, 389 aa, Escherichia coli
TLQNGKLNVPENPIIPYFEGDGIGVDVTPAMLKVVDAAVEKAYKGERKISWMEIYTGEKSTQVYGQDVWLPAETLDLIREYRVAIKGPLTTPVGGGIRSLNVALRQELDLYICLRPVRYYQGTPSPVKHPELTDMVIFRENSEDIYAGIEWKADSADAEKVIKFLREEMGVKKIRFPEHCGIGIKPCSEEGTKRLVRAAIEYAIANDRDSVTLVHKGNIMKFTEGAFKDWGYQLAREEFGGELIDGGPWLKVKNPNTGKEIVIKDVIADAFLQQILLRPAEYDVIACMNLNGDYISDALAAQVGGIGIAPGANIGDECALFEATHGTAPKYAGQDKVNPGSIILSAEMMLRHMGWTEAADLIVKGMEGTINAKTVTYDFERLMEGAKVL

SEQ ID NO: 762 - protein, 324 aa, Neurospora crassa
MSNSLEQLKATGTVVVCDSGDFATMAKYKPQDATTNPSLILAASKKPEYGALLDAAIADAKKGPGSPEEKVDAALDYLLVQFGKKILEIVPGKVSTEVDAALSFDTKASVDKALHIIKLYEAEGISKDRILIKIASTWEGIKAAEILQRDHGINCNLTLMFSLTQAIAAAEAGAFLISPFVGRILDWFKAHTGKNYSKEEDPGVASVKTIFNYYKKFGYKTIVMGASFRNIGEITELAGCDYLTISPNLLEELLNSDAPVPQKLNAADAASLSIEKKTYINSEPTFRFDFNEDQMAVEKLREGISKFAADAVTLKEIIKQKLAE

SEQ ID NO: 763 - protein, 105 aa, Oryza sativa (japonica cultivar-group); identical to SEQ ID NO: 364

SEQ ID NO: 764 - protein, 452 aa, Triticum aestivum
  misc_feature (439)..(439): Xaa can be any naturally occurring amino acid
MQLEVMANRGKILMERYELGRLLGKGTFGKVHYARSLESNRSVAIKMLDKEKVLKVGLSEQIRREVTTMRLVAHKNIVQLHEVMATRNKIYFVMEYVKGGELFDMVAKSGKLTEGAAHKYFQQLISAVDYCHSRGVYHRDLKLENLLLDENENLKVSDFGLSALSESKRQDGLLHTTCGSPAYVAPEVISKGGYDGAKSDIWSCGVILFVLVAGYLPFQGQNLIEMYRKIEKGDFKCPGWVSQKLQKLLYKIMDPDPNKRISIQKIKESTWFRKGPGENLTAKERLPSENATTDAVPTLGVRRRKNSHEDGKPLAVTNLNAFEIISFSTGFDLSGLFVEKESKKEARFTSEQPASAIVSKLEAVAKTLNLRVRKKDNGVVKMQVRKEGRNGVLQFDSEIFEISPSYHLIEMKQTSGDSLEYQKLLEESIRPALKDICLXAWHGADGQQEPQG

SEQ ID NO: 765 - protein, 597 aa, Zea mays
  misc_feature (36)..(36): Xaa can be any naturally occurring amino acid
  misc_feature (193)..(193): Xaa can be any naturally occurring amino acid
  misc_feature (199)..(199): Xaa can be any naturally occurring amino acid
  misc_feature (207)..(207): Xaa can be any naturally occurring amino acid
  misc_feature (213)..(213): Xaa can be any naturally occurring amino acid
  misc_feature (233)..(233): Xaa can be any naturally occurring amino acid
  misc_feature (239)..(239): Xaa can be any naturally occurring amino acid
  misc_feature (567)..(567): Xaa can be any naturally occurring amino acid
  misc_feature (582)..(582): Xaa can be any naturally occurring amino acid
MCGILAVLGCSDWSQAKRARILACSRRLKHRGPDWXSGLYQHEGNFLAQQRLAVVSPLSGDQPLFNEDRTVVVVANGEIYNHKNVRKQFTGTHNFSTGSDCEVIIPLYEKYGENFVDMLDGVFAFVLYDTRDRTYVAARDAIGVNPLYIGLGAVDGSVWIASEMKALNEDCVRFEIFPAGATSTPAAGGGFRXRWYTPXWFQEQVPXTPYQAXLVLREAFEKAVIKRLMTDVXPFGVLXLSGGLDSSLVASVTKRHLVETEAAEKFGTELHSFVVGLEGSPDLKAAREVADYLGTIHHEFHFTVQDGIDAIEEVIYHDETYDVTTIRASTPMFLMARKIKSLGVKMVLSGEGSDELLGGYLYFHFAPNKEEFHRETCRKVKALHQYDCLRANKATSAWGLEVRVPFLDKEFINVAMGMDPEWKMYDKNLGRIEKWVMRKAFDDDEHPYLPKHILYRQKEQFSDGVGYNWIDGLKSFTEQQVTDEMMNNAAQMFPYNTPVNKEAYYYRMIFERLFPQDSARADGCRGRPSIACSTPAAIEWVEQWKASNDPSGRFISSHDSAATDHTXRVSRRWPTAAATAPXNGTVNGKDVAVAIAV

SEQ ID NO: 766 - protein, 158 aa, Staphylococcus epidermidis ATCC 12228
MESIYDFVVQKNNGESYKLEQYKGDVMLIVNTASECGFTPQFEGLQKLYDEYKDQRFIILGFPCNQFGGQEPGSGEEAAQNCKINYGVTFPIHEKVDVKGDNQHPLFHFLTNAAKGMINEKIKWNFTKFLIDREGNVIKRFSPQKKPEQIKTEIEKLL

SEQ ID NO: 767 - protein, 373 aa, Bacillus cereus ATCC 14579
MMKAEEKFSPGLDGIVAAETKISFLDTVKGEIVIQGYDLIELSKTKEYLDIVHLLLEEHLPNEDEKVTLEKKLKEEYAVPEGVFNVLKALPKETHPMDGLRTGVSALAGYDNDIENRSLEVNKSRGYKLLSKVPNIVANSYHILNNEEPIEPLKELSYSANFFYMLTGKKPTELEEKIFDRSLVLYSEHEMPNSTFTARVIASTQSDLYGALTGAVASLKGSLHGGANEAVMYMLLEAGNVEKFEELLQKKLYNKEKIMGFGHRVYMKKMDPRALMMKEALKQLCDVKGDYTLYEMCEAGEKIMEKEKGIYPNLDYYAAPVYWMLGIPIQLYTPIFFSSRTVGLCAHVIEQHANNRLFRPRVNYIGERHVLSK

SEQ ID NO: 768 - protein, 452 aa, Staphylococcus aureus subsp. aureus MSSA476
MNYTQQLKQKDSEYVWHPFTQMGVYSKEETIIIEKGKGSYLYDTNGNKYLDGYASLWVNVHGHNNKYLNKVIKKQLNKIAHSTLLGSSNIPSIELAEKLIEITPSNLRKVFYSDTGSASVEIAIKMAYQYWKNIDREKYAKKNKFITLNHGYHGDTIGAVSVGGIKTFHKIFKDLIFENIQVESPSFYRSNYDTENEMMTAILTNIEQILIERNDEIAGFILEPLIQGATGLFVHPKGFLKEVEKLCKKYDVLLICDEVAVGFGRTGKMFACNHEDVQPDIMCLGKAITGGYLPLAATLTSQKIYNAFLSDSHGVNTFFHGHTYTGNQIVCTVALENIRLYEKRKLLSHIETTSSTLEKQLHALKRHRNVGDVRGRGLMFGVELVTDKDSKTPLEIEKVERIVRKCKENGLMIRNLENVITFVPVLSMSNKEVKTMVRIFKKAVHNILDRKC

SEQ ID NO: 769 - protein, 114 aa, Zea mays
  misc_feature (112)..(112): Xaa can be any naturally occurring amino acid
MPALAVDAATPVAHAFASCDAARFPAPPVVGPAAAAEAAPWSADLSAALYNVDGWGAPYFFVNDDGDVAVRPHGAATLPGQEIDLAKVVAKAAGPRAGGGLGLPLPLLVRFXDV

SEQ ID NO: 770 - protein, 355 aa, Arabidopsis lyrata subsp. petraea
ISYLTYDRADMAFAHYGPFWRQMRKVCVMKVFSRKRAESWASVRDEVDKMVRSVSCNVGKPINVGEHIFALTRNITYRAAFGSACEKGQDEFIRILQEFSKLFGAFNVADFIPYFGWIDPQGINKRLVKARNDLDGFIDDIIDEHMKKKENQNAVDDGDVVDTDMVDDLLAFYSEEAKLVSEAADLQNSIKLTRDNIKAIIMDVMFGGTETVASAIEWALTELLRSPEDLKRVQQELAEVVGLDRRVEEADIEKLTYLKCTLKETLRMHPPIPLLLHETAEDTSIDGFFIPKKSRVMINAFAIGRDPTSWADPDTFRPSRFLEPGVPDFKGSNFEFIPFGSGRRSCPGMQLGLYA

SEQ ID NO: 771 - protein, 351 aa, Arabidopsis lyrata subsp. petraea
ISYLTYDRADMAFAHYGPFWRQMRKVCVMKVFSRKRAESWASVRDEVDKMVRSVSCNVGKPINVGEHIFALTRNITYRAAFGSACEKGQDEFIRILQEFSKLFGAFNVADLIPYFGWIDPQGINKRLVKARNDLDGFIDDIIDEHMKKKENQNAVDDGDVVDTDMVDDLLAFYSEEAKLVSEAADLQNSIKLTRDNIKAIIMDVMFGGTETVASAIEWALTELLRSPEDLKRVQQELAEVVGLDRRVEEADIEKLTYLKCTLKETLRMHPPIPLLLHETAEDTSIDGFFIPKKSRVMINAFAIGRDPTSWADPDTFRPSRFLEPGVPDFKGSNFEFIPFGSGRRSCPGMQL

SEQ ID NO: 772 - protein, 351 aa, Arabidopsis lyrata subsp. petraea
ISYLTYDRADMAFAHYGPFWRQMRKVCVMKVFSRKRAESWASVRDEVDKMVRSVSCNVGKPINVGEHIFALTRNITYRAAFGSACEKGQDEFIRILQEFSKLFGAFNVADFIPYFGWIDPQGINKRLVKARNDLDGFIDDIIDEHMKKKENQNAVDDGDVVDTDMVDDLLAFYSEEAKLVSEAADLQNSIKLTRDNIKAIIMDVMFGGTETVASAIEWALTELLRSPEDLKRVQQELAEVVGLDRRVEEADIEKLTYLKCTLKETLRMHPPIPLLLHETAEDTSIDGFFIPKKSRVMINAFAIGRDPTSWADPDTFRPSRFLEPGVPDFKGSNFEFIPFGSGRRSCPGMQL

SEQ ID NO: 773 - protein, 329 aa, Saccharomyces cerevisiae
MRSIKCVIIGDGAVGKTSLLISYTTNSFPTDYVPTVFDNYSTTIAIPNGTASSPLELDNGNDKRGSLSSASSSPSTDRKLYKINLWDTAGQEDYDRLRPLCYPQTDIFLICFSVSEHASFANVTEKWLPELKQTSNIEGTSLYTKLGKYPILLVGTKSDLRDDPATQKKLQEANSDYVSQEEIDELVQRCGFMGYTECSAATQAGVREVFEQAVRYAIYEPESPNQKSANHTLTDELTTATTNTNGDKNIREQKQQPHHNNSTDSTLPKGSLQQEKEALNIKPTKKGQKDKIHEQSKSKGSKIASNNIITTSKLNQRRETTRRKRSQSV

SEQ ID NO: 774 - protein, 142 aa, Brassica napus
RGGPRRPEKEEKLLLVNFFFSSAVVVTARVKATMGVPLTAWKSSFAFPVTRRATTAIPSIVGTGGGVNCLQVWPPIGKKKFGTFFYFPDLTEVEWGKEVDYFFRTRWIPGVEFKLEHGFVARGHGSTPGYYDGRYWPMWKLP

SEQ ID NO: 775 - protein, 275 aa, Agrobacterium tumefaciens str. C58
MYDVSANGANIPALGFGTFRIPEDDVRRILPEALKLGFRHVDTAQIYKNEGAVGEVIAQSGISRHDIFLTTKVWVDRYRHDDFLASVDESLAKLKTDYFDLLLLHWPKSDVPLAERMGALNAVRKAGKARNIGISNFNVALTEEAVKLSDTPLATNQIEYHPYLDQTKVISAARKHGMSVTAYYLMADGKVPNDPVLKDIGAKHGKTAAQVTLRWAVQQPDIVALSKTATESRLKENFDIFDFALSEEEMQAIHALAKPNGRIVSPGHLAPDWDD

SEQ ID NO: 776 - protein, 476 aa, Comamonas testosteroni
MSTVLYRCPELLIGGEWRPGRHEQRLVVRNPATGEPLDELRLASADDLQLALQTTQQAFEHWRQVPAHERCARLERGVARLRENTERIAHLLTLEQGKTLAEARMECAMAADLIKWYAEEARRVYGRVIPARLPNSRMEVFKFPVGPVAAFSPWNFPLVLSARKLGGAIAAGCSIVLKAAEETPASVAAMVDCLNQELPPGVVQLLYGVPAEVSQALIASPVVRKVTFTGSVPVGRHLAELSARHLKRITLELGGHAPVIVCGDADIARTVNLMVQHKFRNAGQACLAPTRFFVDRRIYGDFVDAFGATQALRVGAGMAAETQMGPVASARRQAAVQDLIARSVAAGARPVASAVPEAGYFVAPTLLADVPLDAPVMSEEPFGPVACAVPFDSLDQAIAQANHNPYGLAGYLFTDSAKAILAVSERLEVGSLAVNGMGVSVPEAPFGGVKDSGYGSESGTEGMEAFLDTKFMHYVA

SEQ ID NO: 777 - protein, 192 aa, Rubrobacter xylanophilus DSM 9941
MRFNQRERGFTLWFTGLSGAGKTTIAEIVEKELRERGRRVEVLDGDIVRTNLSKGLGFSREDRITNVLRIGFVANLLTRNGVAVIVSAISPYKEARDQVRRRIIDFIEVYVDAPLEVCAERDVKGLYKKAFEGEIQNFTGVSDPYEPPVAPELHIRTDQETPQESARRVIERLEYLGYLWDPEEAEDYHWSR

SEQ ID NO: 778 - protein, 392 aa, Pseudomonas fluorescens PfO-1
MGAEKLWNLVTQGAKPSFRPEKDFVNCMGALTGGQAVQQVKAGIQAIYLSGWQVAADNNSAESMYPDQSLYPVDSVPTVVKRINNSFRRADQIQWKAGKNPGDEGYIDYFAPIVADAEAGFGGVLNAYELMKSMIEAGAAGVHFEDQLASVKKCGHMGGKVLVPTQEAVQKLTAARLAADVAGVPTIILARTDANAADLLTSDCDPYDQPFVTGTRTQEGFYKVRAGLDQAIARGLAYAPYADLIWCETAKPDLDEARRFAEAIKKEYPDQILSYNCSPSFNWKKNLDDATIAKFQRELSAMGYKHQFITLAGIHNMWHSMFNLAHDYARNDMTAYVKLQEQEFADAAKGYTFVAHQQEVGTGYFDDMTTVIQGGTSSVTALTGSTEEEQFH

SEQ ID NO: 779 - protein, 351 aa, Arabidopsis lyrata subsp. petraea
ISYLTYDRADMAFAHYGPFWRQMRKVCVMKVFSRKRAESWASVRDEVDKMVRSVSCNVGKPINVGEHIFALTRNITYRAAFGSACEKGQDEFIRILQEFSKLFGAFNVADFIPYFGWIDPQGINKRLVKARNDLDGFIDDIIDEHMKKKENQNAVDDGDVVDTDMVDDLLAFYSEEAKLVSEAADLQNSIKLTRDNIKAIIMDVMFGGTETVASAIEWALTELLRSPDDLKRVQQELAEVVGLDRRVEEADIEKLTYLKCTLKETLRMHPPIPLLLHETAEDTSIDGFFIPKKSRVMINAFAIGRDPTSWADPDTFRPSRFLEPGVPDFKGSNFEFIPFGSGRRSCPGMQL

SEQ ID NO: 780 - protein, 455 aa, Zea mays
  misc_feature (88)..(88): Xaa can be any naturally occurring amino acid
  misc_feature (110)..(110): Xaa can be any naturally occurring amino acid
MTVEAPHSLSLIHIHPRVLAHSNSGGEMRRQIPPVSCLVPIAVAFALLAAASAASPAPVNVTGVLSAFPDLNDFTRLLASSPVLAELXAGRSSLTLLAVPNGNLPQSPSXAFAAASGADLADVLRYHVLLEYLSHADLRRLPASGKLVTTLFQTTGRATADLGAVNVTTAGASRLTVIRSPAPFPGSNATVLGAITAVPYNLSVLAVSGLIAPSGFDLAASESQPPAAVNITRVLADARAFNVAASMLEASGVAAEFEDDERGAGITVFAPTDDAFAGLPAGDRLQSLPADRKAVVLRFHVLHSYYPLGSLESIVNPVQPTLATEFSNAGRFTLNITRANGSVAIDTGVVQATITRTVFDQNPVAVFAVSKVLLPKEMFTRTAAASIVATTASASSPPPAATAPEASESARTPPTKLSSPPALRGGGQDYATAPAPARGIEWWCIALVYLLPHLV

SEQ ID NO: 781 - protein, 496 aa, Nicotiana tabacum
MVLSKTASESDVSVHSTFASRYVRTSLPRFKMPENSIPKEAAYQIINDELMLDGNPRLNLASFVTTWMEPECNTLMMDSINKNYVDMDEYPVTTELQNRCVNMIAHLFNAPLGDGETAVGVGTVGSSEAIMLAGLAFKRKWQNKMKAQGKPFDKPNIVTGANVQVCWEKFARYFEVELKEVKLSDGYYVMDPEKAVEMVDENTICVAAILGSTLNGEFEDVKRLNDLLIEKNKETGWDTPIHVDAASGGFIAPFLYPELEWDFRLPLEKSINVSGHKYGLVYAGIGWAIWRNKEDLPDELIFHINYLGADQPTFTLNFSKGSSQVIAQYYQLIRLGFEGYKNVMENCQENARVLREGIEKSGRFNIISKEIGVPLVAFSLKDNSQHNEFEISETLRRFGWIVLAYTMPPNAQHVTVLRVVIREDFSRTLAERLVIDIEKVFHGVDTLPARVNAKLAVAEANGSGVHKKTDREVQLEITTAWLKFVADKKKKTNGVC

SEQ ID NO: 782 - protein, 496 aa, Nicotiana tabacum
MVLSKTASESDVSIHSTFASRYVRTSLPRFKMPENSIPKEAAYQIINDELMLDGNPRLNLASFVTTWMEPECNKLMMDSINKNYVDMDEYPVTTELQNRCVNMIAHLFNAPLGDGETAVGVGTVGSSEAIMLAGLAFKRKWQNKMKAQGKPCDKPNIVTGANVQVCWEKFARYFEVELKEVKLSDGYYVMDPEKAVEMVDENTICVAAILGSTLNGEFEDVKRLNDLLIEKNKETGWDTPIHVDAASGGFIAPFLYPELEWDFRLPLVKSINVSGHKYGLVYAGIGWAIWRNKEDLPDELIFHINYLGADQPTFTLNFSKGSSQVIAQYYQLIRLGFEGYKNVMENCQENARVLREGLEKSGRFNIISKEIGVPLVAFSLKDNSQHNEFEISETLRRFGWIIPAYTMPPNAQHVTVLRVVIREDFSRTLAERLVIDIEKVLHELDTLPARVNAKLAVAEANGSGVHKKTDREVQLEITTAWKKFVADKKKKTNGVC

SEQ ID NO: 783 - protein, 247 aa, Zea mays
  misc_feature (77)..(77): Xaa can be any naturally occurring amino acid
MPPRPVPLFSRLRFRLPSCAAVSISTPPSSAAPLHYGHRTPLASPFPLSPPCPRILRAAVAVSSLDLRPITGGFAAXSAWLLASSATSVHDFTVKDASGKDVDLSTYKGKVLLIVNVASQCGLTNSNYTELSQLYEKYKDQGFEILAFPCNQFGGQEPGTNEEIVQFACTRFKAEYPIFDKVDVNGDNTAPIYKFLKSSKGSLFGDNIKWNFSKFLVDKEGHVVERYAPTTSPLSIEKDIKKLLGSS

SEQ ID NO: 784 - protein, 481 aa, Haloarcula marismortui ATCC 43049
MTQTYENYIDGEWTGSGETQEVTNPADETDVVSTVPVASAADADEAVAAAAAATDEWGEMPGPERGAILRETGEILKSRKDELAETLTREEGKPLGEAEGEVQRAIDIFYYYAEKARDFGGTVKQPSGGRAGLQTKKEPMGVAALITPWNYPIAIPAWKIAPALAVGNTVVIKPAMQAPTVGAMIVEALDEAGIPDGAINLVCGPGSEVGEQLTTHDDVDVVSFTGSASVGEHVYEQATSNGKRAQAEMGGKNPTVVMPSADVDKAADIVGAGAFGGTGQACTATSRAIVHEDVYDEFLDAIVDYAESLEIGDGLDRAGMGPHVSEDELAGSLEYIDVAQSEGATLETGGEELTSGEYDGGNFISPAVFSDVEPDMRIAQEEVFGPVLAVMSVSDFDEGVEVANDIDYGLSASIVTDRIKEENEFIERSESGVVKVNEKTTGLELHVPFGGLKRSSTNTYREQGDAGLEFFSYIKTVYRNS

SEQ ID NO: 785 - protein, 470 aa, Streptomyces avermitilis MA-4680
MPLHKGPVKSDERPMSFNPFFGEANPVSGMTEAPPKHRLADGPLPPSTAYQLVHDELMLDGNARLNLATFVTTWMEPQAGVLMAECQDKNMIDKDEYPRTAELEKRCVAMLADLWNAPDAGAAVGCSTTGSSEACMLAGLALKRRWARRNADRYPARDVRPNLVMGINVQVCWEKFCNFWEVEMRQVPLEGERYHLDPGAAAELCDENTIGVVGILGSTFDGSYEPIAELCAALDALQERTGLDIPVHVDGASGAMIAPFLDEDLVWDFRLPRVASINTSGHKYGLVSPGVGWALWRDSEALPEELVFRVNYLGGNMPTFALNFSRPGAQVVAQYYTFLRLGREGFRAVQQTTRNVARSLAERVAALGDFHLLTRGDELPVFAFTTAPEVASYDVFDVSRRMREHGWLVPAYTFPPNREDLSVLRVVCRNGFSTDLAELFVEDLSRLLPDLRRQARPQTHDKDAATGFHH

SEQ ID NO: 786 - protein, 389 aa, Escherichia coli
  misc_feature (193)..(195): Xaa can be any naturally occurring amino acid
TLQNGKLNVPENPIIPYIEGDGIGVDVTPAMLKVVDAAVEKAYKGERKISWMEIYTGEKSTQVYGQDVWLPAETLDLIREYRVAIKGPLTTPVGGGIRSLNVALRQELDLYICLRPVRYYQGAPSPVKHPELTDMVIFRENSEDIYAGIEWKADSADAEKVIKFLREEMGVKKIRFQEHCGIGIKPCSEEGTXXXVREAIEYAIATDGDSVTLVPKGNIMKFTEGAFKDWGYQLAREEFGGELIDGGPWLKVKNPNTGKEIVIKDVIADAFLQQILLRPAEYDVIACMNLNGDYISDALAAQVGGIGIAPGANIGDECALFEATHGTAPKYAGQDKVNPGSIILSAEMMLRHMGWTESADLIVKGMEGAINAKTVTYDFERLMEGAKLL

SEQ ID NO: 787 - protein, 91 aa, Brassica napus
  misc_feature (74)..(74): Xaa can be any naturally occurring amino acid
MSAGEEAIVASGNDNEGDQTNGNHTGKTDEYDPSTGSALSNFLWHGGSVWDAWFSCASNQVAQVLLTLPYSFSXLGMLSGIILQIFYGLLG

SEQ ID NO: 788 - protein, 286 aa, Oryza sativa (japonica cultivar-group)
MSVIDILTRVDAICQKYGRYDAEKLHGSGVAGEDPFARLYASVDADLNECLEKAEAAKQEKNRATVVALNAEIRGTKAKLLEEDLPKLQRLALKKVIDASLVLSPLLLCIASRYVDMQGGWCEELVPACTVLQRYLEWKLIYVGSAEDENYDQLLESVLVGPVNVGTYRFVLQADPPDPSKIRKEDIIGVIVLLLTCSYMGQEFIRVGYYVNNDNDDEQLREEPPAKLLIDRVQRNILADKPSVTKFPINFHPETSAGAGQEQQQQQQSGSPENHPNQGSKPNPDQ

SEQ ID NO: 789 - protein, 478 aa, Pyrobaculum aerophilum str. IM2
MIIVKNYINGEFIEVEERRPKHSPIDGSVIAETPVSKREDAKAAIDAAYDALKAWSQLPAIKRAEYLYKLYEIIKSREEELINILMVEGGGIYKKAWGEVVFTERLVRNAAELARHYGGKTLQSDAEGVVSMVFKRPKGVVGVITPWNYPLSISMKKIAHALATGNTIVYKPASETPVTGFKIAEMIHQAGFPKGVFNLVVGPGSTVGDEIVVNKKVSHVTFTGESATGREIASKAGGALKTVTLELGGSDPLIILDDADLNLAVRIAVFGAFFHQGQICTSSKRIIVHERVYDVFVKKFVERVSQLKVGDPRDRTVEQGPLISPRQADEMERFYQDAVSRGGRALTGGKRAGAYFWPTVFVDVDRNFRIMREEVFGPIRPVVPVKNDDEAVEVANDTEYGLSAAVVTTNINRAFKIAEAIESGMVHINDVTMLEESHVPFGGIKASGFGREGGEWSFHETTYDRWLTITLRERKYPI

SEQ ID NO: 790 - protein, 287 aa, Pediococcus pentosaceus ATCC 25745
MAIIQWYPGHMAKAIRQVEEKLKLVDIVFELVDARIPVSSRNPMIEDVIKSKPHLLILTKADLADPKETKKWLDYYKSRNEYAIALNSKEPSTENIILKKTQEILADKLANKADRGIKNAEIRSMCIGIPNVGKSTLLNHLVNKKVAITGDRPGVTKKQQWLRSRRGLYLLDTPGILWPKFEDQNVGNKLAFTGAIKDNLFANDDVVIYGLNIFINHYREGLMGRYHLTEDDLEMELPELLLLITQKLGMRDDYDRASQRILLDARKGKLGRFTLDFVEEFEDLGDD

SEQ ID NO: 791 - protein, 174 aa, Ammopiptanthus mongolicus
MISSPAVTTVKASMGAPFTGLKSMASFPVPRKVNSDITTIANNGGRVQCMLVWPPLGRKKFETLSYLPPLSIESLTKEVEYLLRKGWVPCLEFELEHGFVYRENNRSPGYYDGRYWTMWKLPMFGCSDASQVMKELEECKKEYPTAFVRIIGFDNKRQVQCISFIAYKPPGFEN

SEQ ID NO: 792 - protein, 389 aa, Escherichia coli
  misc_feature (191)..(196): Xaa can be any naturally occurring amino acid
TLQNGKLNVPENPIIPYIEGDGIGVDVTPAMLKVVDAAVEKAYKGERKISWMEIYTGEKSTQVYGQDVWLPAETLDLIREYRVAIKGPLTTPVGGGIRSLNVALRQELDLYICLRPVRYYQGTPSPVKHPELTDMVIFRENSEDIYAGIEWKADSADAEKVIKFLREEMGVKKIRFPEHAGFGIKPCSEKXXXXXXRAAIEYAIATDRDSVTLVHKGNIMKFTEGAFKDWGYQLAREEFGGELIDGGPWLKVKNPNTGKEIVIKDVIADAFLQQILLRPAEYDVIACMNLNGDYISDALAAQVGGIGIAPGANIGDECALFEATHGTAPKYAGQDKVNPGSIILSAEMMLRHMGWTEAADLIVKGMEGAINAKTVTYDFERLMEGAKLL

SEQ ID NO: 793 - protein, 389 aa, Escherichia coli
  misc_feature (180)..(180): Xaa can be any naturally occurring amino acid
  misc_feature (193)..(195): Xaa can be any naturally occurring amino acid
TLQNGKLNVPENPIIPYIEGDGIGVDVTPAMLKVVDAAVEKAYKGERKISWMEIYTGEKSTQVYGQDVWLPAETLDLIREYRVAIKGPLTTPVGGGIRSLNVALRQELDLYICLRPVRYYQGTPSPVKHPELTDMVIFRENSEDIYAGIEWKADSADAEKVIKFLREEMGVKKIRFPEHXGIGIKPCSEKGTXXXVRAAIEYAIATDRDSVTLVHKGNIMKFTEGAFKDWGYQLAREEFGGELIDGGPWLKVKNPNTGKEIVIKDVIADAFLQQILLRPAEYDVIACMNLNGDYISDALAAQVGGIGIAPGANIGDECALFEATHGTAPKYAGQDKVNPGSIILSAEMMLRHMGWTEAADLIVKGMEGAINAKTVTYDFERLMEGAKLL

SEQ ID NO: 794 - protein, 1329 aa, Escherichia coli K12
MSQEYIEDKEVTLTKLSSGRRLLEALLILIVLFAVWLMAALLSFNPSDPSWSQTAWHEPIHNLGGMPGAWLADTLFFIFGVMAYTIPVIIVGGCWFAWRHQSSDEYIDYFAVSLRIIGVLALILTSCGLAAINADDIWYFASGGVIGSLLSTTLQPLLHSSGGTIALLCVWAAGLTLFTGWSWVTIAEKLGGWILNILTFASNRTRRDDTWVDEDEYEDDEEYEDENHGKQHESRRARILRGALARRKRLAEKFINPMGRQTDAALFSGKRMDDDEEITYTARGVAADPDDVLFSGNRATQPEYDEYDPLLNGAPITEPVAVAAAATTATQSWAAPVEPVTQTPPVASVDVPPAQPTVAWQPVPGPQTGEPVIAPAPEGYPQQSQYAQPAVQYNEPLQQPVQPQQPYYAPAAEQPAQQPYYAPAPEQPVAGNAWQAEEQQSTFAPQSTYQTEQTYQQPAAQEPLYQQPQPVEQQPVVEPEPVVEETKPARPPLYYFEEVEEKRAREREQLAAWYQPIPEPVKEPEPIKSSLKAPSVAAVPPVEAAAAVSPLASGVKKATLATGAAATVAAPVFSLANSGGPRPQVKEGIGPQLPRPKRIRVPTRRELASYGIKLPSQRAAEEKAREAQRNQYDSGDQYNDDEIDAMQQDELARQFAQTQQQRYGEQYQHDVPVNAEDADAAAEAELARQFAQTQQQRYSGEQPAGANPFSLDDFEFSPMKALLDDGPHEPLFTPIVEPVQQPQQPVAPQQQYQQPQQPVPPQPQYQQPQQPVAPQPQYQQPQQPVAPQQQYQQPQQPVAPQQQYQQPQQPVAPQPQDTLLHPLLMRNGDSRPLHKPTTPLPSLDLLTPPPSEVEPVDTFALEQMARLVEARLADFRIKADVVNYSPGPVITRFELNLAPGVKAARISNLSRDLARSLSTVAVRVVEVIPGKPYVGLELPNKKRQTVYLREVLDNAKFRDNPSPLTVVLGKDIAGEPVVADLAKMPHLLVAGTTGSGKSVGVNAMILSMLYKAQPEDVRFIMIDPKMLELSVYEGIPHLLTEVVTDMKDAANALRWCVNEMERRYKLMSALGVRNLAGYNEKIAEADRMMRPIPDPYWKPGDSMDAQHPVLKKEPYIVVLVDEFADLMMTVGKKVEELIARLAQKARAAGIHLVLATQRPSVDVITGLIKANIPTRIAFTVSSKIDSRTILDQAGAESLLGMGDMLYSGPNSTLPVRVHGAFVRDQEVHAVVQDWKARGRPQYVDGITSDSESEGGAGGFDGAEELDPLFDQAVQFVTEKRKASISGVQRQFRIGYNRAARIIEQMEAQGIVSEQGHNGNREVLAPPPFD

SEQ ID NO: 795 - protein, 134 aa, Euphorbia lagascae
MKLKTHIHQSHITRNIIYNMAGIKVAVLVVALMVVASGMYANAITCGQVSSSLAPCVNFLKSGGAPSPQCCNGLGGMVNQAKSTADKQAACNCLKTAAKNMPGLNPANAESLPSKCKVNIPYKISFSTNCNSIK

SEQ ID NO: 796 - protein, 515 aa, Glycine max
  misc_feature (40)..(40): Xaa can be any naturally occurring amino acid
  misc_feature (78)..(78): Xaa can be any naturally occurring amino acid
  misc_feature (159)..(159): Xaa can be any naturally occurring amino acid
  misc_feature (170)..(170): Xaa can be any naturally occurring amino acid
  misc_feature (177)..(177): Xaa can be any naturally occurring amino acid
  misc_feature (192)..(192): Xaa can be any naturally occurring amino acid
  misc_feature (202)..(202): Xaa can be any naturally occurring amino acid
  misc_feature (231)..(231): Xaa can be any naturally occurring amino acid
  misc_feature (238)..(238): Xaa can be any naturally occurring amino acid
  misc_feature (332)..(332): Xaa can be any naturally occurring amino acid
  misc_feature (377)..(377): Xaa can be any naturally occurring amino acid
  misc_feature (446)..(446): Xaa can be any naturally occurring amino acid
RQDVHPNSPSCLLFIDGDWKVPVLKNRIPIINPSTQHIIXGDIPAATKEDVDLAVAAAKAALSRNKGADWASASGSVXRARYLRAIAAKITEKKPELAKLEAIDCGKPLDEAAWDIDDVAGCFEFYADLAEKLDAQQKAHVSLPMDTFKSYVLKEPIGXVVALITPWNYXLLMATWXKVAPALAAGCACNIXKPSELASVTXLELAEICKEVGLPPGVLNILTGLGPEAGXAPLAAHXNVDKISFTGSSATGSRIMTAAAQLTKPVSLELGGKSPIIVFEDVDLDKTAEWTIFGCFFTNGQICSATSRLIVHESIATEFVNRLVQWAKNIKXISDPFEEGCRLGPIVSEGQYKKVLNCISTAKSEGATILIGGSRPXEHLKKGYFVEPTIITDVTTSMQIWREEVFGPVLCVKTFSTEEEAIELANDTHYGLGSAVMSKDLERCEXRISKAIQAGIVWINCAQPSFIQAPWGGVKRSGFGRELGEWGLENYLSVKQVTKYISDEPWGWYQSPSKL

SEQ ID NO: 797 - protein, 490 aa, Escherichia coli
MDIQKRVSDMEPKTKKQRSLYIPYAGPVLLEFPLLNKGSAFSMEERRNFNLLGLLPEVVETIEEQAERAWIQYQGFKTEIDKHIYLRNIQDTNETLFYRLVNNHLDEMMPVIYTPTVGAACERFSEIYRRSRGVFISYQNRHNMDDILQNVPNHNIKVIVVTDGERILGLGDQGIGGMGIPIGKLSLYTACGGISPAYTLPVVLDVGTNNQQLLNDPLYMGWRNPRITDDEYYEFVDEFIQAVKQRWPDVLLQFEDFAQKNAMPLLNRYRNEICSFNDDIQGTAAVTVGTLIAASRAAGGQLSEKKIVFLGAGSAGCGIAEMIISQTQREGLSEEAARQKVFMVDRFGLLTDKMPNLLPFQTKLVQKRENLSDWDTDSDVLSLLDVVRNVKPDILIGVSGQTGLFTEEIIREMHKHCPRPIVMPLSNPTSRVEATPQDIIAENKPPFSVFRDKFITMPGGLDYSRAIVVASVKEAPIGIEVIPAHVTEYL

SEQ ID NO: 798 - protein, 645 aa, Zea mays
  misc_feature (217)..(217): Xaa can be any naturally occurring amino acid
  misc_feature (251)..(251): Xaa can be any naturally occurring amino acid
MLNFPPYIIGNSAGLRHRSSAMNAVEPSAAAIAEDPITPAASAAPYPGRLREALTALSEACESGNFNASETASFTISDILDTAAGVSGELDDGSDDSQDASRSGASEVLLREVLEFLSRPSSISNQMALDALSLVLPKPVAKLGARMGRCRDVAAAILKFFVTNCNPRDMLSILCEALDAPMELPNGLSSFVLLLDALAKVFTLIQRRHIEQVKVAXPVVLKVMHATVSECVEEHGSAAVDLFNAAHGVGXAIQEMCISMFNKNKDLCAILGLYSLQNIALVSRSRQQDILSACGSVVFQSFRFLKTSGFTYRGLLTGSDVTAATVELSKEEDADFMEHFSFAMDGAALSVVWTLMHDDKDMSKYAGEELELAVKEVQGNHMEKWEAINMLKYVLSSIHYPWIIKSHSLNLMLILSGEDHVEEINNHVDFTCFAHRIFETLKAIESVMIAAPMALVRKKAFAALKKVISMVPSSQRFDILHGLVNNSTSPALTAILLDLVRQEVSRESRQADNDCIEDEGFRGNGLPRWASHALELVELILRPPEGGPPCLPDHSEQVISALNLLRFILIIDSRGQRSAKLFRKETLHKVHSEWLTPLRPIAEQIQLENEKDADEITKQIVCMLNLVQLVLYRCIELVEEKMKGC

SEQ ID NO: 799 - protein, 494 aa, Mycobacterium tuberculosis H37Rv
MLEACQAIGVTAALGEPGEHSLPASTPITGDVLFSIAPTTPEQADHAIAAAAATFTAWRSTPAPVRGALVARLGELLTAHQQDLATLVTVEVGKITAEARGEVQEMIDVCQFSVGLSRQLYGRTIASERAGHRLLETWHPLGVVGVITAFNFPVAVWAWNTAVALVCGDTVVWKPSELTPLTALACQALLSRAAADVGAPAAVGGLLLGGAERGAQLVDDPRVALLSATGSVRMGQQVGPRVARRFGRVLLELGGNNAAIVAPSADLELAVRGIVFAAAGTAGQRCTSLRRLIVHRSVADDVVARVVGAYRQLAIGDPSAPDTLVGPLIHEAAYRDMVAALERARTDGGEVIGGDRREVGSPGAYYVAPAVVRMPSQTAIVATETFAPILYVLTYDDLDEAIALNNAVPQGLSSSIFTTDLREAEHFLDQSDCGIANVNIGTSGAEIGGAFGGEKQTGGGRESGSDAWKAYMRRATNTVNYSSELPLAQGVKFG

SEQ ID NO: 800 - protein, 504 aa, Arabidopsis thaliana
MVVINSLRRLARTTQVHLHSKYATCMSGNSTSRRIFTTEAAPEKKNTVGSKGHDMLAPFTAGWQSADLDPLVIAKSEGSYVYDDTGKKYLDSLAGLWCTALGGNEPRLVSAAVEQLNTLPFYHSFWNRTTKPSLDLAKVLLEMFTANKMAKAFFTSGGSDANDTQVKLVWYYNNALGRPEKKKFIARKKSYHGSTLISASLSGLPPLHQNFDLPAPFVLHTDCPHYWRFHLPGETEEEFSTRLAKNLEDLIIKEGPETIGAFIAEPVMGAGGVIPPPATYFEKVQAVVKKYDILFIADEVICAFGRLGTMFGCDKYNIKPDLVTLAKALSSAYMPIGAILMSQEVADVINSHSSKLGVFSHGFTYSGHPVSCAVAIEALKIYKERNIPEYVAKVAPRFQDGVKAFASGSPIIGETRGTGLILGTEFVDNKSPNEPFPPEWGVGAFFGAECQKHGMLVRVAGDGILMSPPLIISPEEIDELISIYGKALKATEEKVKELKAQHKK

SEQ ID NO: 801 - protein, 508 aa, Zea mays
  misc_feature (180)..(180): Xaa can be any naturally occurring amino acid
  misc_feature (286)..(286): Xaa can be any naturally occurring amino acid
MKTSVVVAALAAVLFAAQSYASLAGASGPRVIIVGAGMSGISAGKTLWEAGVRDLLILEATGRVGGRMHKHNFGGINVEIGANWVEGLGGDQLNPIWPLVNSTLKLRNFYSDFDSVVGNVYKENGGGLYDEEYVQKRMDRAYEVEELGANLTKKMHPSGRDDISVLAMQRLFNHQPNGPXTTPVDMALDYFIYDYEFAEPPRVTSLQNTQATPTNADFGEDNYFVADQRGYESIIHSIGSSYLSTDGNGKLKDRRILLNKVVRQITYNKQGVVVKTEDGSSYRADXYVVVSTSLGVLQTDLIQFKPQLPFWKIAAIYSFDMGVYTKIFLKFPERFWPVGEGKQFFMYASSRRGYYALWQSFEREYPGANVLLATVTDDESRRIERQSDDQTKAEVAEVLRDMFPAADVPGPDQIDVYVPRWWSDRFFKGSYSNWPVGVSRYEYDQLRAPVGRVYFTGEHTSERYNGYVHGAYLAGIDSANILINYIFKNEEYKVRGKYDVDDLIAQAR

SEQ ID NO: 802 - protein, 209 aa, Oceanobacillus iheyensis HTE831
MNKQEIIQRILIVFTTTLAVACIGIYMGQYIPKQWMLPLMIIEIIMLIAAALLRRRSRVGYIFLFSFVVISGITMFPAIYFYVSEIGAVVVLFVFLLTLMIFTILGMVGWVLQKDLSFMGSTLFIILIVLIAFSIFTWFIPQSDTVLVIVACVSAGLFSVYIVYDFNQIKHRALTAKDVPSAVLSLYLDVVNLFLHLLRIISYVFKNRG

SEQ ID NO: 803 - protein, 189 aa, Rubrobacter xylanophilus DSM 9941
MTDSRYGRGFTLWFTGLSGAGKTTIAEIVEKELRERRGAVEVLDGDIVRTNLSKGLGFSREDRDTNVLRIGFVANLLTRNGVAVIVSAISPYREARDKVRQMIGEDFIEVYVDAPLEVCAERDVKGLYKKALAGEIPQFTGVSDPYEPPVAPELHIRTNEERPHQSARRVIEKLEELGYLQPVREYNRA

SEQ ID NO: 804 - protein, 175 aa, Sinorhizobium meliloti 1021
MAEPATKLPIKSEEKGVERRAESWLPFESLRSEIDRLFDDFAPSLWHRPLASALMRRVPRLSELDVAPAVDLAETEKTYEITCELPGMEEKDIEVAISNGTLTIRGEKQEEKKENKKEYVLSERRYGSFQRTFRMPDGVDTEKIAAKFSKSVLSITLPKTPEAQQNERKIQIKVT

SEQ ID NO: 805 - protein, 476 aa, Zea mays
  misc_feature (318)..(318): Xaa can be any naturally occurring amino acid
MAAAAVTSNGGAVAANGPAPGRLASVYSEVQTSRLLHTLPLPSVLRSNFSVVDGPASSAAGNPDEIAKLFPNLFGQPSASLVPSAEPAATRPLKVGVVLSGGQAPGGHNVICGIFDYLQERAKGSTLLGFKGGPAGIMKCKYVELTSDFVYPYRNQGGFDMICSGRDKIETPEQFKQAEDTANKLDLDGLVVIGGDDSNTNACLLGEYFRSRNLKTRVIGCPKTIDGDLKCKEVPTSFGFDTACKIYSEMIGNVMTDARSTGKYYHFVRLMGRAASHITLECALQTHPNAALIGEEVAAKKETLKNVTNYITDIICKXADLGYNYGVILIPEGLIDFIPEVQKLIAELNEILAHDVVDEAGAWKSKLQAESRELFEFLPKTIQEQLMLERDPHGNVQVAKIETEKMLISMVETELEKRKAEGRYSAHFRGQAHFFGYEGRCGLPTNFDSNYCYALGYGAGALLQSWEDRRRFQRGL

SEQ ID NO: 806 - protein, 326 aa, Pirellula sp. 1
MSIQWFPGHMHKARLEIQAALPKVDVVMEIIDARIPYSSENPMLADIRGDKACLKVLTKSDLADPHRTEEWLDALNSSSSTRARSVTTDDVPTIRRLKSALIGMCPHRKGRSINAMVMGIPNVGKSTIINFLAGRKVAKTGNTPAVTQHQQRVDIGDGVILWDTPGMLWPKVHNVSSGYRLALIGSIKDTAMDYTDVGFFAARYFMEQYPDRLASRFDLESVADTEMAVIEDIGRRRGCLGRNNRVDLERASRILIQEYRTGGLGRLTLETPATMQRERILTQKAMVEAEEAARLKDEKRKKRFKNKQKAQRKSREMDASRRDRRQ

SEQ ID NO: 807 - protein, 389 aa, Escherichia coli
  misc_feature (180)..(180): Xaa can be any naturally occurring amino acid
  misc_feature (192)..(195): Xaa can be any naturally occurring amino acid
TLQNGKLNVPENPIIPYIEGDGIGVDVTPAMLKVVDAAVEKAYKGERKISWMEIYTGEKSTQVYGQDVWLPAETLDLIREYRVAIKGPLTTPVGGGIRSLNVALRQELDLYICLRPVRYYQGTPSPVKHPELTDMVIFRENSEDIYAGIEWKADSADAEKVIKFLREEMGVKKIRFPEHXGIGIKPCSEEGXXXXVRAAIEYAIANDRDSVTLVHKGNIMKFTEGAFKDWGYQLAREEFGGELIDGGPWLKVKNPNTGKEIVIKDVIADAFLQQILLRPAEYDVIACMNLNGDYISDALAAQVGGIGIAPGANIGDECALFEATHGTAPKYAGQDKVNPGSIILSAEMMLRHMGWTEAADLIVKGMEGAINAKTVTYDFERLMEGAKLL

SEQ ID NO: 808 - protein, 389 aa, Escherichia coli
  misc_feature (192)..(196): Xaa can be any naturally occurring amino acid
TLQNGKLNVPENPIIPYIEGDGIGVDVTPAMLKVVDAAVEKAYKGERKISWMEIYTGEKSTQVYGQDVWLPAETLDLIREYRVAIKGPLTTPVGGGIRSLNVALRQELDLYICLRPVRYYQGTPSPVKHPELTDMVIFRENSEDIYAGIEWKADSADAEKVIKFLREEMGVKKIRFPEHCGIGIKPCSEEGXXXXXRQAIEYAIANDRDSVTLVHKGNIMKFTEGAFKDWGYELARKEFGGELIDGGPWLKVKNPNTGKEIVIKDVIADAFLQQILLRPAEYDVIACMNLNGDYISDALAAQVGGIGIAPGANIGDECALFEATHGTAPKYAGQDKVNPGSIILSAEMMLRHMGWTEAADLIVKGMEGAINAKTVTYDFERLMEGAKLL

SEQ ID NO: 809 - protein, 497 aa, Erwinia carotovora subsp. atroseptica SCRI1043
MTTHVVTHHAVTHVVWLRNDLRITDNLALYAACQDPSATVLAVFIATPAQWEKHDMAPRQAAFLLENLTLVQHVLAEKGIPLHYHECADFAASVDWLMQFCAEQQATDLFYNHQYEINERLRDKQVKDRLADSVVCHGYHDSLLLPPGSVLTGNGEMYKVFTPFRQAFIKRLLEADTTCVPAPDARGEPINNTAELVPFSYPQCEVDSEDFPCGERAALQQLRRFCREQVQDYDQQRDFPALPGTSKLSPYLALGIVSPRQCFNRLRAECPDMLERREGGAFTWFNELVWREFYRHLIVSWPQLCKHRPFTAWTQWVKWRESPEDLTAWQQGKTGYPIVDAAMHQLNETGWMHNRLRMICASFLVKDLLIDWREGERYFMSQLLDGDLAANNGGWQWAASTGTDAAPYFRIFNPTTQGERFDPDGRFIRHWLPELAAVPDKDIHQPHRWADKQHVKLNYPLPIVDHKTARLDTLAAFEAAKNIGMANNDREEKSKYA

SEQ ID NO: 810 - protein, 188 aa, Triticum aestivum
MSGCLSPFAESVGREQGEMAAFLRSKCSSVGRAMMGSLGNNLYGGATSSIETVARPSRSDAVCQQIRTFIQMRTNLKVVDNSGAKRVMCIQSLRGKKGARLGDMIIGSVKEAQPRGKVKKGDVVYGVVVRAAMKKGRSDGSEVQFDDNAIVIVNNKGELIGTRVFGPVPHELRKKKHLKILALAEHIV

SEQ ID NO: 811 - protein, 157 aa, Azoarcus sp. EbN1
MSLTLSSTAFAHGGAVPATYTCDGRDVSPPLGWSGIPENTRSLALIVDDPDAPDPAAPQRTWVHWVLYNIPPTTAALPEAVAMADLPLGTREGTNDWKRTGYGGPCPPIGRHRYFHKLYALDVVLAPLGAPTKAELEHAMQGHILAEAELVGTYQRP

SEQ ID NO: 812 - protein, 389 aa, Escherichia coli
  misc_feature (180)..(180): Xaa can be any naturally occurring amino acid
  misc_feature (185)..(195): Xaa can be any naturally occurring amino acid
TLQNGKLNVPENPIIPYIEGDGIGVDVTPAMLKVVDAAVEKAYKGERKISWMEIYTGEKSTQVYGQDVWLPAETLDLIREYRVAIKGPLTTPVGGGIRSLNVALRQELDLYICLRPVRYYQGTPSPVKHPELTDMVIFRENSEDIYAGIEWKADSADAEKVIKFLREEMGVKKIRFPEHXGIGIXXXXXXXXXXXVRAAIEYAIATDRDSVTLVHKGNIMKFTEGAFKDWGYQLAREEFGGELIDGGPWLKVKNPNTGKEIVIKDVIADAFLQQILLRPAEYDVIACMNLNGDYISDALAAQVGGIGIAPGANIGDECALFEATHGTAPKYAGQDKVNPGSIILSAEMMLRHMGWTEAADLIVKGMEGAINAKTVTYDFERLMEGAKLL

SEQ ID NO: 813 - protein, 426 aa, Glycine max
MSEKEKGNNSEGQSTLLHGKYELGRVLGHGTFAKVYHARNLNTGQHVAMKVVGKEKVIKVGMMEQVKREISVMKMVKHQNIVELHEVMASKSKIYIAMELVRGGELFNKVSKGRLKEDVARLYFQQLISAVDFCHSRGVYHRDLKPENLLLDEHGNLKVSDFGLTAFSDHLKEDGLLHTTCGTPAYVSPEVIAKKGYDGAKADIWSCGVILYVLLAGFLPFQDDNLVAMYKKIHRGDFKCPPWFSLDARKLVTKLLDPNPNTRISISKVMESSWFKKQVPRKVEEVVEKVDLEEKIENQETMNAFHIISFGSRFNLSPLFEEKRKEEMRFATAGTPSSVISRLEEVAKAGKFDVKSSETKVRLQGQERGRKGKLAIAADIYAVTPSFMVVEVKKDNGDTLEYNQFCSKQLRPALKDIFWNSAPASA

SEQ ID NO: 814 - protein, 109 aa, Synechocystis sp. PCC 9413
MADLLEDSGIPNKTLTIEEAIADLKGEDKGSRYYAAWWLGRFRVREPEAISALMTALADESDRTPDGGYPLRRNAARALGKLGDLQAVPKLIECLQCDDFYVRETAAEA

SEQ ID NO: 815 - protein, 389 aa, Escherichia coli
  misc_feature (192)..(199): Xaa can be any naturally occurring amino acid
  misc_feature (215)..(215): Xaa can be any naturally occurring amino acid
TLQNGKLNVPENPIIPYIEGDGIGVDVTPAMLKVVDAAVEKAYKGERKISWMEIYTGEKSTQVYGQDVWLPAETLDLIREYRVAIKGPLTTPVGGGIRSLNVALRQELDLYICLRPVRYYQGTPSPVKHPELTDMVIFRENSEDIYAGIEWKADSADAEKVIKFLREEMGVKKIRFPEHCGIGIKPCSEEAXXXXXXXXIEYAIANDRDSVTLVXKGNIMKFTEGAFKDWGYQLAREEFGGELIDGGPWLKVKNPNTGKEIVIKDVIADAFLQQILLRPAEYDVIACMNLNGDYISDALAAQVGGIGIAPGANIGDECALFEATHGTAPKYAGQDKVNPGSIILSAEMMLRHMGWTEAADLIVKGMEGAINAKTVTYDFERLMEGAKLL

SEQ ID NO: 816 - protein, 81 aa, Triticum aestivum
  misc_feature (45)..(45): Xaa can be any naturally occurring amino acid
MSDGTATCIDIILAIILPPLGVFFKFGCGVEFWICLILTFFGYLXPGIIYAVWAITKVAGRCVSMQCARKVISWRGTRVCP

SEQ ID NO: 817 - protein, 386 aa, Escherichia coli
  misc_feature (192)..(198): Xaa can be any naturally occurring amino acid
  misc_feature (371)..(371): Xaa can be any naturally occurring amino acid
TLHNGKLNVPENPIIPYIEGDGIGVDVTPAMLKVVDAAVEKAYKGERKISWMEIYTGEKSTQVYGQDVWLPAETLDLMREYRVAIKGPLTTPVGGGIRSLNVALRQELDLYICLRPVRYYQGTPSPVKHPELTDMVIFRENSEDIYAGIEWKADSADAEKVIKFLREEMGVKKIRFPEHCGIGIKPCSEEAXXXXXXXAIEYAIANARDSVTLVHKGNIIKFPEGAFKDWGYQLAREEFGGELIDGGPWLKVKNPNTGKEIVIKDVIADAFLQQILLRPAEYDVIACMNLNGDYISDALAAQVGGIGIAPGANIGDECALFEATHGTAPKYAGQDKVNPGSIILSAEMMLRHMGWTEAADLIVKGMEGAIXAKTVTYNFERLIKGD

SEQ ID NO: 818 - protein, 422 aa, Bacillus halodurans C-125
MANGEKIKVSAGVLEVPNNPIIPFIEGDGTGPDIWAAAHRVIDAAVEKAYNGEKKIVWKEILAGEKAFNQTGQWLPDETLETIREYTIAIKGPLTTPVGGGIRSLNVALRQELDLYVCLRPVRYFNGVPSPVKRPEDTNMVIFRENSEDIYAGIEYQAGTDEVKKVINFLREEMGVKKIRFPETSGIGIKPVSQEGTDRLVRAAIQYAITEGRKSVTLVHKGNIMKFTEGAFKNWGYEVAEREFGDKVFTWAQYDKIVEEQGKEAADKAQAEAEAAGKIIVKDSIADIFLQQILTRPKEFDVVATMNLNGDYISDALAAQVGGIGIAPGANINYDTGHAIFEATHGTAPKYAGLDKVNPSSVLLSGELMLRHLGWNEAADLIMASMDKTIESKVVTYDFARLMDGATEVKCSEFANELIKNL

SEQ ID NO: 819 - protein, 372 aa, Bacillus halodurans C-125
MSVTRGLEGVVATTSSVSSIIESVLTYQGYDIDELAEHASFEEVIYLLWNGKLPNKVELKELADELANNAEIPQEVIEQMKAYPLDRVHPMGALRTAISSLGLYDEEADLMDEAANKRKALKLQAQVSTVVTAFSRIREGKEPVAPRTDLSFAANFLYMLTGEEPDEIAVDAFNKALVLHADHELNASTFTARVCVATLSDVYSGITAAIGALKGPLHGGANEQVMAMLTEIGDVENVEPYIRKALDNKQKIMGFGHRVYKNGDPRAKHLREMSKKLTSITGESKWYEMSVKIEEIVTNEKGLLPNVDFYSASVYHSLGIKHDLFTPIFAVSRMSGWLAHILEQYSNNRLIRPRAEYVGPNKRQYVRLEERN

SEQ ID NO: 820 - protein, 132 aa, Pyrobaculum aerophilum str. IM2
MSTKYVEAGELKEGSYVVIDGEPCRVVEIEKSKTGKHGSAKARIVAVGVFDGGKRTLSLPVDAQVEVPIIEKFTAQILSVSGDVIQLMDMRDYKTIEVPMKYVEEEAKGRLAPGAEVEVWQILDRYKIIRVK

SEQ ID NO: 821 - protein, 505 aa, Oryza sativa
MVLSHASSGRDDAVRCTFATRYACETLPRFRMPEQSIPREAAYQIINDELMLDGNPRLNLASFVTTWMEPECDKLIMDSVNKNYVDMDEYPVTTELQNRCVNMIAHLFNAPIKEDETAIGVGTVGSSEAIMLAGLAFKRKWQNKRKEQGKPCDKPNIVTGANVQVCWEKFARYFEVELKEVKLSEGYYVMDPVKAVEMVDENTICVAAILGSTLTGEFEDVKLLNNLLTEKNKETGWDVPIHVDAASGGFIAPFLYPELEWDFRLPLVKSINVSGHKYGLVYPGVGWVIWRSKEDLPEELIFHINYLGTDQPTFTLNFSKGIQEHHAELHGEHSNTKGRHRGDWSIRNPLQGGRCALGGVLAQGQRQVHRVRHLRAPEEVRLDRAGVHHAGQRRARRRPPRRHQGGLQPEPRRAARLGHRQDPARAGRPFGPGAEDLQRHREAAIGRRWRGHQEERPGDREGDLRVLEGPGEEEADRNLLVWLCEKCLNNVACSICAWDGRIGWD

SEQ ID NO: 822 - protein, 436 aa, Zea mays
MHPKLFPENHVSRPDGNGSASFHPLPLPPASVSPKQTNASHQLVPKAEMPSVAGQWQKGKLLGSGTFGCVYEATNRHTGALCAMKEVNIIPDDAKSVESLKQLEQEIKFLSQFKHENIVQYYGSETIEDRFYIYLEYVHPGSIHKYVHQHCGSLTEAVIRNFTRHILKGLAFLHSQKIMHRDIKGANLLVDINGVVKLADFGMAKHLSTAAPNLSLKGTPYWMAPEVVRATLDKSAGYDLAVDIWSLGCTIIEMFTGKPPWSGLEGPAAMFKVLRTDPPIPDNLSPEGKDFLRCCFKRNPTERPTANKLLEHPFIQTLNHYSPHSVVHSFSGIKSPDTVHSSARDKVPWKSDSYMRGKHANGETSSARSSESLAYRLMTPLPNLGTNSLSPPPLSSASSSGSAAHTPNSMHFSVPYHQPSPLPKPNGKEAINLVSH

SEQ ID NO: 823 - protein, 364 aa, Neurospora crassa
MASLLNQLRGLTTVDCDTLDAHGEQHNTAISAENKAIVLAEITKLDANGKLIYQTLIDEIIPIAHWMFGNQTDATVEELASELLAVGLALRFIPHLNGFIHIQTNPKWCYSTEKTVKNAERIVAHLKHLAPDFDTSRICIKIPATWEGLQACRELERRHSIATLATIVFSMEQVALAVDAGCRYVAPYVNELRVHFDATYTDANKDRAALFCGAAQRYCDEVASSASAAEAAHGSLNLQMQTQVMAASLTSVEEVMRLAGAVKHITVSPPLLMELEATPAAGWPGASTVGAAAAITGSRVNGDAVRLRELVRDQSQWRLAFTRAEAGESERKLGQAIGIFCDMQDQLERLVRRWDLTGKKYARG

SEQ ID NO: 824 - protein, 214 aa, Geobacter sulfurreducens PCA
MKFFIDTADVKEIRQAHDLGLVDGVTTNPSLIAKSGRKFEDVIKEITEIVDGPISAEVVSLEAAGMIREAGELAKIHKNIVIKLPMTPEGLKACAALTREGIKTNVTLIFTPMQALLAAKAGATYVSPFVGRLDDISQDGMGIIDDIKTIFDNYGYQSEIIVASVRNPVHVLNAALIGADIATIPYSVMLQLAKHPLTDSGIERFLKDWESVPK

SEQ ID NO: 825 - protein, 496 aa, Neurospora crassa
MSTSVNINGVEFQPRLLINGEFVEASDKGTFNVVNPATGEMSCKVPEATEDDTNRAVAAAKAAQPGWAALDPAKRGAYLKKLAALIREHKSTLHHLEAISMGVPVNHFFHADFGADELDYFAEAWPHIQGQSSVNTPGYVTMTFRQPFGVAACIIPWNAPLYFFATKAAAALITGNTVVLKSSEKAPLAVAYAAELVAKAGFPPGVFNILSGHGLPSGRCLARHMDVRAISFTGSSRTGKLIQEEAAKTNLKSVTLELGGKSPAIIFDDANIEQALTDTMSSIVLNAGQVCIANSRVYVQKSVAPKFIEAFTKRMATIRGGNPLDPQTQMGPQADEIQYKNILSYIEEGKKSGKLAVGGKGQLDERKGYFVEPTVFLDTPEDAKIMKEEIFGPVLNINTFETEEEVVAKANDTEYGLWAAVFTNDLSRAMRMAKALESGYVSINCSSPSIGRDLPFGGYKGSGQGREGRLHSMNHFLEIKSVIIKLDEKASLQWNM

SEQ ID NO: 826 - protein, 152 aa, Magnaporthe grisea 70-15
MSQSGATVSQECVTTYNELKLGKNIKYIIFKLSDNNKEIVVEEASGDSDWENFRNKLVNATVKSPSGAVGKAPRYAVYDFQYTLASGEGERNKITFIAWSPDDAGVKPKMIYAASKDALKRALNGIAHELQANDADDIEYDSVLKTVSKGLA

SEQ ID NO: 827 - protein, 161 aa, Triticum aestivum
  misc_feature (43)..(43): Xaa can be any naturally occurring amino acid
MSDSEEHHFESKADAGASKTYPQQAGTVRKNGFLVIKGRPCKXVVEVSTSKTGKHGHAKCHFVAIDIFNGKKLEDIVPSSHNCDIPHVNRTEYQLIDISEDGFVSLLTSDGNTKDDLRLPTDETLVAQIKEGFESGKDLVVTVQSAMGEEQICALKDIGPK

SEQ ID NO: 828 - protein, 319 aa, Bacillus halodurans C-125
MKRIGVLTSGGDSPGMNAAIRAVVRKAIYHGVEVYGIYQGYAGLISGDIRKMELGSVGDIIHRGGTILYTARCEEFKTLEGQKKGIEQLKKFGIEGLVVIGGDGSFAGAQKLTEHGFPTVGVPGTIDNDIPGTDFTIGFDTALNTVIDAIDKIRDTATSHDRTYVIEVMGRNAGDLALWSGLADGAETIVIPEADHDIDQIISRLQRGQERGKKHSIIVVAEGVGSGMDFGREISERTGAETRVTVLGHIQRGGSPTGFDRVLASRLGAKAVDLLLEGQAGVTVGIENNKLVHHDITEVLQRKHSIDLDMYRLSQELSI

SEQ ID NO: 829 - protein, 148 aa, Glycine max
  misc_feature (62)..(62): Xaa can be any naturally occurring amino acid
  misc_feature (76)..(76): Xaa can be any naturally occurring amino acid
MACSMISYAAVTTVNRACAGMVAPFTGLKTMAGWLPRMRAFDITSIASNGGRAQCVQVWPPXWIKKFETLIYLPDXLEDAQLRKEVEYLLRKGWMPSLQFELDHGFVYREHNRSPGYYNGRYWTMVKLPMFGCTEATQVVNELQEAKT

SEQ ID NO: 830 - protein, 496 aa, Staphylococcus aureus subsp. aureus MRSA252
MELLKHLSQRQYIDGEWVESANKNTRDIINPYNQEVIFTVSEGTKEDAERAILAARRAFESGEWSQETAETRGKKVRAIADKIKEHREALARLETLDTGKTLEESYADMDDIHNVFMYFAGLADKDGGEMIDSPIPDTESKIVKEPVGVVTQITPWNYPLLQASWKIAPALATGCSLVMKPSEITPLTTIRVFELMEEVGFPKGTINLILGAGSEVGDVMSGHKEIDLVSFTGGIETGKHIMKNAANNVTNIALELGGKNPNIIFDDADFELAVDQALNGGYFHAGQVCSAGSRILVQNSIKDKFEQALIDRVKKIKLGNGFDADTEMGPVISTEHRNKIESYMDVAKAEGATIAVGGKRPDRDDLKDGLFFEPTVITNCDTSMRIVQEEVFGPVVTVEGFETEQEAIQLANDSIYGLAGAVFSKDIGKAQRVANKLKLGTVWINDFHPYFAQAPWGGYKQSGIGRELGKEGLEEYLVSKHILTNTNPQLVNWFSK

SEQ ID NO: 831 - protein, 357 aa, Phanerochaete chrysosporium
AVCPDGTRVSHAACCAFIPLAQDLQETIFQNECGEDAHEVIRLTFHDAIAISRSQGPKAGGGADGSMLLFPTVEPNFSANNGIDDSVNNLIPFMQKHNTISAADLVQFAGAVALSNCPGAPRLEFLAGRPNKTIAAVDGLIPEPQDSVTKILQRFEDAGGFTPFEVVSLLASHSVARANKVDQTIDAAPFDSTPFTFDTQVFLEVLLKGVGFPGSANNTGEVASPLPLGSGSDTGEMRLQSDFALAHDPRTACIWQGFVNEQAFMAASFRAAMSKLAVLGHNRNSLIDCSDVVPVPKPATGQPAMFPASTGPQDLELSCPSERFPTLTTQPGASQSLIAHCPDGSMSCPGVQFNGPA

SEQ ID NO: 832 - protein, 434 aa, Rickettsia rickettsii
MTNENNNDSEFAELKIRGKIFKLPILKASIGEDVIDISRVSAEADCFTYDPGFMSTASCQSTITYIDGDKGILRHRGYDIKDLAEKSDFLEVAYLLIYGELPSGEQYNNFTKQVAHHSLVNERLHYLFQTFCSSSHPMAIMLAAVGSLAAFYPDLLNFKEADYELTAIRMIAKIPTIAAMSYKYSIGQPFIYPDNSLDFTENFLHMMFATPCTKYTVNPIIKNALNKIFILHADHEQNASTSTVRIAGSSGANPFACISTGIASLWGPAHGGANEAVINMLKEIGSSEYIPKYIAKAKDKNDPFRLMGFGHRVYKNYDPRAVVLKETCKEVLKELGQLDNNLLQIAIELEAIALKDEYFIERKLYPNVDFYSGIIYKAMGIPSQMFTVLFAIARTVGWMAQWKEMHEDPEQKISRPRQLYTGYVHREYKGIRER

SEQ ID NO: 833 - protein, 160 aa, Gloeobacter violaceus PCC 7421
MATVSDITVQTVDGQARSLGRYKGQVLLIVNVASYCGYTPQYAGLEKLYRRYKDAGLRVLAFPCNDFGGQEPGSNAEIAEFCSRYDVSFELFDKVGARGYYKHPLYVRLSEAAEPAGEVSWNFEKFLIAKSGEIVGRYRSGIGPEDPQLVADIERELAKS

SEQ ID NO: 834 - protein, 483 aa, Thermobifida fusca
MSLTERPQLFIGGRWVDSKGGRKVDVHNPATGAYVGSTVLASTADIDAAVASARASFNSGVWANTPPEERAAVLHRAADLLEERAPELAKLITSELGCPIWFSERAHVPNPIRHLRYYGTLAKDFAYDERRSDGTNTSLVTQVPVGVVAAITPWNGPLSTPSLKVAPALAAGCSVILKPPPETPLTAYNLADALSQAGLPDGVLNIVPADREEGAYLVSHPDVDKVAFTGSSAAGKKIMAACAERIARVTLELGGKSAAIILDDADVDTVVPALLPMAFMVNGQACIAQTRLLVPRSRKDEFIDAFAQAVAAQRVGDPIDPATQIGPMVSRRQQERVEGYIATGRQEGARVVVGGERPSLPSELAGGWFVAPTLLAEVHNSMRVAQEEIFGPVLAVIEYDGDDEAVAIANDSVYGLSGSVWSSDEERALAIARRMRTGMVSINGRPQAANSPFGGFKQSGIGREMGPEGFHAYLETMSIAVGS

SEQ ID NO: 835 - protein, 357 aa, Phanerochaete chrysosporium
AVCPDGTRVSHAACCAFIPLAQDLQETIFQNECGQDAHEVIRLTFHDAIAISRSQGPKAGGGADGSMLLFPTVEPNFSANNGIDDSVNNLIPFMQKHNTISAADLVQFAGAVALSNCPGAPRLEFLAGRPNKTIAAVDGLIPEPQDSVTKILQRFEDAGGFTPFEVVSLLASHSVARANKVDQTIDAAPFDSTPFTFDTQVFLEVLLKGVGFPGSANNTGEVASPLPLGSGSDTGEMRLQSDFALAHDPRTACIWQGFVNEQAFMAASFRAAMSKLAVLGHNRNSLIDCSDVVPVPKPATGQPAMFPASTGPQDLELSCPSERFPTLTTQPGASQSLIAHCPDGSMSCPGVQFNGPA

SEQ ID NO: 836 - protein, 115 aa, Malus x domestica
MACSAVIKLALVVALCMAVSVAHAITCGQVTSSLAPCIGYVRSGGAVPPACCNGIRTINGLARTTADRQTACNCLKNLAGSISGVNPNNAAGLPGKCGVNVPYKISTSTNCATVK

SEQ ID NO: 837 - protein, 199 aa, Fusobacterium nucleatum subsp. nucleatum ATCC 25586
MGNLKNHLMKYERRPIMKIYDFKVKNRKGEDISLENYKGKVLLIVNTATRCGFTPQYDELEALYSKYNKDGFEVLDFPCNQFGNQAPESNEEIHTFCQLNYKVKFDQFAKVEVNGENAIPLFKYLKEEKGFAGFDSKHKLTSVLTEMLSKNDPDFAKKSDIKWNFTKFLVDKSGNVVARFEPTTSAEVIEQEIKKLLEV

SEQ ID NO: 838 - protein, 649 aa, Glycine max
  misc_feature (213)..(213): Xaa can be any naturally occurring amino acid
  misc_feature (404)..(404): Xaa can be any naturally occurring amino acid
MSSAEKPSSKGQAWFCTTGLPSDIVVEVDDMTFHLHKFPLMSKSRKLHLLITQQEAASNSTVPQQQQQQQETEDEDEIVEEQCHVTFTGFPGGSEAFEMAAKFCYGVKIDLTPSNVAALRCAGEFLEMTEDYSEDNLVSKTEGFLSQHVLKNLKDSVKTLKSCDSLMPMAENLGAAQRCVDSVVSRASSADPALFGWPVSDATSVSKQVLWGXSTATADPALAPGPVSLGFEDLALLRLPLFKRLILAMRSAGLSPEIIETCLMYYAKKYIPGVSRSNRKPLPSSSSSSSSVATEAEQKELLETLVSNLPLEKTSKAATATRFLFGLLRTTNILNASEACRDALEKKIGLQLEEATLDDLLVPSYSYLNETLYDVDCVERILSHFLEGFEARNVAQSTADVLRXSPALMLVGKLIDGYLSEIASDANLKPEKFYNFAISLPDEARLFDDGLYRAVDVYLKAHPWVLEEEREKICGLLDCQKLTLEACTHAAQNERLPLRAVVQVLFFEQLQLRQAIAGTLMAAEAAAEPGRQSAALEREAEDGRGEGLGLEHVQERNGTWRVAVRENQVLRLDMDSMRTRVHQLERECSSMKRVISKFDKFAASGGGWRASLGRKFGCKFKTQVCDSHESTAVDTRKGRHHQQHHPHHD

SEQ ID NO: 839 - protein, 423 aa, Azotobacter vinelandii
MRTRILGARLIDPTSGLDRVADLYLADGRIAAVDQAPAAFEADETLDARGLIAAPGLVDLSAALREPGYGRKGSIASETRAAAAGGVTSLCCPPLTRPVLDTPAVAELILDRAREAGHAKVFPIGALTRELAGEQLAELVALRDTGCVAFGNGLASFASNRHLRRALEYAATFDLTVVFHSQDAALAEDGLAHEGPMAGFLGLAGIPETAETVALARDLLLVEQTGVRAHFSQLSSARGARMIAEAQARGLPVSADVALYQLILTDEALADFSSLYHVQPPLRSRADRDGLRDAVRQGTIQAIASHHQPHEADAKLAPFGATEPGISSVELLLPLALSLVQENVLDLPTLLARLTSGPARALRLPVGRLAAGAPADLVLFDPEAATLAGERWLSKGRNCPFIGHVLPGAVRYTLLDGRISYQA

SEQ ID NO: 840 - protein, 509 aa, Zea mays
MIANGLRKSSAASSQVSKLVKYIASAGSLQGGHSLSEPSARHYSSEPSLQATEENGFKGHSMLAPFTAGWQSTDVHPLVIERSEGSYVYDSNGKKYIDALAGLWCTALGGNEPRLVKAATEQLNKLPFYHSFWNRTTKPSLDLANDILSMFTAREMGKVFFTNSGSEANDSQVKLVWYYNNALGRPDKKKFIARSKSYHGSTLIAASLSGLPALHQKFDLPAPFVLHTDCPHYWRFRLPDETEEEFSTRLANNLENLVLKEGPETIAAFIAEPVMGAGGVILPPKTYFEKIQAVLKKYDILLIADEVITAFGRLGTMFGCDMYNIKPDLVSIAKALSSAYMPIGAILVSPEITDVIYSQSNKLGSFAHGFTYSGHPVSCAVAVETLKIYKERNIVEHVNKIAPRFQEGIKAFSGSPIVGEIRGLGLILGTEFVDNKSPNDPFPAEWGVGSIFGAECEKRGMLIRVAGDSIMLSPPLIMTPNEVEEIISKFGDALKATEERIGELKSRKN

SEQ ID NO: 841 - protein, 189 aa, Glycine max
  misc_feature (129)..(129): Xaa can be any naturally occurring amino acid
  misc_feature (133)..(133): Xaa can be any naturally occurring amino acid
  misc_feature (139)..(139): Xaa can be any naturally occurring amino acid
  misc_feature (145)..(145): Xaa can be any naturally occurring amino acid
  misc_feature (151)..(153): Xaa can be any naturally occurring amino acid
  misc_feature (155)..(155): Xaa can be any naturally occurring amino acid
MDIRLMDLDSPLFNTLHRIMDLTEDAEKNLNAPTRTYVRDAKAMAATPADVKEYPNYYVFVIDMPGLKSGDIKVQVEDDNVLLISGERKREEDKEKEGAKYLRMERRVGKFMRKFTLPENANTDAISAXCQDXVLTCTXNKLPPXSPKAQXXXVXSINFFLPVSFFPFGGQGFFRFLGIFLKKKKPGPF

SEQ ID NO: 842 - protein, 110 aa, Glycine max
  misc_feature (50)..(50): Xaa can be any naturally occurring amino acid
MSGVWVFKNGVVRLVENPGGEAVEGSRGGRRKVLVHRASNEVITSYAGLXVFKNGVVRLVENHGSEPKVLVHTARTEIIIPYARDFNKFKPMHMYDIVVKNKNAFEVRDM

SEQ ID NO: 843 - protein, 428 aa, Erwinia carotovora subsp. atroseptica SCRI1043
MADKKATLTLEGKDPIELNVLSGTLGYDEIDIRPLGSKGYFTFDPGFTSTASCESKITYIDGDEGILLHRGFPIAQLAEKSNYLEVCYILLFGEPPTAEQYETFKTTVTRHTMIHEQITRLFHGFRRDSHPMAVLCGVTGALAAFYHDSLDISIERHREIAAYRLLSKMPTVAAMCYKYSLGQPFVYPKNNLSYAGNFLHMMFSTPCEEYVVNPVLERAMDRILILHADHEQNASTSTVRTAGSSGANPFACIAAGIASLWGPAHGGANEACLRMLEEISSVEHIPAFIERAKDKNDSFRLMGFGHRVYKNHDPRATVMRETCHEVLKELGRKDDLLEVAMELEHIALNDPYFIEKKLYPNVDFYSGIILKAMGIPSSMFTVIFAMARTVGWIAHWSEMHADGIKIARPRQLYTGYDKRDFASNLKHD

SEQ ID NO: 844 - protein, 299 aa, Neurospora crassa
MAPLSKTHKLNTGDEIPAVGLGTWQSKPGQVEKAVEAALRAGYTHIDTAYAYGNEKEVGQGIKASGVPREKIWLTTKLDNDWHKHVAEAIDTSLKNLDTPYVDLYLMHWPASLVKGNTKEVYNDWDFVDTWREMQKLVDTGKVKNIGVSNFGVKNLEKLLSAESTKIVPAVNQIELHPGNPSPHLVEYLRSKGIHASAYSPLGSSDSPLYKLNSLTKLAESKGKTVQQVLLRWGVQKGWSVLPKSVTEERIKANIDLEGWSLTDEEIAQIDEVHKENSFKVCGDDWLPVKIFFGAGDSD

SEQ ID NO: 845 - protein, 389 aa, Escherichia coli
  misc_feature (192)..(195): Xaa can be any naturally occurring amino acid
TLQNGKLNVPENPIIPYIEGDGIGVDVTPAMLKVVDAAVEKAYKGERKISWMEIYTGEKSTQVYGQDVWLPAETLDLIREYRVAIKGPLTTPVGGGIRSLNVALRQELDLYICLRPVRYYQGTPSPVKHPELTDMVIFRENSEDIYAGIEWKADSADAEKVIKFLREEMGVKKIRFPEHCGIGIKPCSEKGXXXXVGAAIEYAIANDRDSVTLVHKGNIMKFTEGAFKDWGYQLAREEFGGELIDGGPWLKVKNPNTGKEIVIKDVIADAFLQQILLRPAEYDVIACMNLNGDYISDALAAQVGGIGIAPGANIGDECALFEATHGTAPKYAGQDKVNPGSIILSAEMMLRHMGWTEAADLIVKGMEGAINAKTVTYDFERLMEGDKLL

SEQ ID NO: 846 - protein, 490 aa, Yersinia pestis biovar Medievalis str. 91001
MSRYGLQKLYINGAYTDSTSGDTFDAVNPANGECIAQLQAANAQDVDKAVAAAKQGQPVWAAMTAMERSRILRRAVDILRDRNDELAAIETADTGKPLSETRSVDIVTGADVLEYYAGLIPALEGQQIPLRGSAFVYTRREPLGVVAGIGAWNYPLQIALWKSAPALAAGNAMIFKPSEVTSLTALKLAGIYTEAGLPAGVFNVLTGSGDQVGQMLTEHPGIAKVSFTGGIASGKKVMANAAGSTLKDVTMELGGKSPLIIFADADLDKAADIAMMANFYSSGQVCTNGTRVFVPQALQAAFEQKIVERVKRIHIGDPSDERTNFGPLVSFQHRDSVMRYIDSGKREGATLLIGGYSLTEGALAHGAYVAPTVFTHCRDDMQIVREEIFGPVMSILSYQSEEEVIRRANDTEYGLAAGVVTQDLNRAHRVIHQLQAGICWINTWGESAPEMPVGGYKHSGVGRENGISTLEHYTQIKSIQVELGSFNSVF

SEQ ID NO: 847 - protein, 499 aa, Aspergillus nidulans FGSC A4
MAQQYKLPFELDNPDLLHFDSYVGNAWVTAKSGARFEVVDPGTDLPWASCPTNSAEDVDSAVQIAHDAFEKFKKVNPRQRAQWLLKWDSLIREARSDLAKILTHETGKPIAESYGEIDYATGFTWWFAGEAERIQGSIAVPAAPNRRVFTVKQPIGVAAALVPWNFPIAMVLRKAGAALAAGCTMIVKPSPETPLTALVLAHLAEKAGFPAGVFNVLTTDLENTPPLSEALCKHPLVKKVTFTGSTRVGKLIASHCAHGLKKVTLELGGNCPFLVFDDADLDQALDQLMALKWRHAGQACITANRIYVQAGIYDKFAQLLKERTAKLVIGHGAKEGTTLGPLTTPRSIDKAISQVEDARRLGADVILGGSRVQGTQGYFFEPTILKNMTKDMLVSREESFAPIAALYRFETEEEAVKLANDTSMGLASYAFSKNIDRMWRLLENLEAGMIGMNTGNSSAAESPFGGIKESGYGKESGKEVAVNEYLITKTGTLTIDGQY

SEQ ID NO: 848 - protein, 389 aa, Escherichia coli
  misc_feature (192)..(196): Xaa can be any naturally occurring amino acid
TLQNGKLNVPENPIIPYIEGDGIGVDVTPAMLKVVDAAVEKAYKGERKISWMEIYTGEKSTQVYGQDVWLPAETLDLIREYRVAIKGPLTTPVGGGIRSLNVALRQELDLYICLRPVRYYQGTPSPVKHPELTDMVIFRENSEDIYAGIEWKADSADAEKVIKFLREEMGVKKIRFPEHCGIGIKPCSEKAXXXXXRAAIEYAIANDRDSVTLVHKGNIMKFTEGAFKDWGYQLAREEFGGELIDGGPWLKVKNPNTGKEIVIKDVIADAFLQQILLRPAEYDVIACMNLNGDYISDALAAQVGGIGIAPGANIGDECALFEATHGTAPKYAGQDKVNPGSIILSAEMMLRHMGWTEAADLIVKGMEGAINAKTVTYDFERLMEGAKLL

SEQ ID NO: 849 - protein, 389 aa, Escherichia coli
  misc_feature (185)..(195): Xaa can be any naturally occurring amino acid
  misc_feature (213)..(213): Xaa can be any naturally occurring amino acid
TLQNGKLNVPENPIIPYIEGDGIGVDVTPAMLKVVDAAVEKAYKGERKISWMEIYTGEKSTQVYGQDVWLPAETLDLIREYRVAIKGPLTTPVGGGIRSLNVALRQELDLYICLRPVRYYQGTPSPVKHPELTDMVIFRENSEDIYAGIEWKADSADAEKVIKFLREEMGVKKIRFPEHCGIGIXXXXXXXXXXXVRAAIEYAFANDRDSVIXVHKGNIMKFTEGAFKDWGYQLAREEFGGELIDGGPWLKVKNPNTGKEIVIKDVIADAFLQQILLRPAEYDVIACMNLNGDYISDALAAQVGGIGIAPGANIGDECALFEATHGTAPKYAGQDKVNPGSIILSAEMMLRHMGWTEAADLIVKGMEGAINAKTVTYDFERLMEGAKLL

SEQ ID NO: 850 - protein, 389 aa, Escherichia coli
  misc_feature (180)..(180): Xaa can be any naturally occurring amino acid
  misc_feature (185)..(198): Xaa can be any naturally occurring amino acid
TLQNGKLNVPENPIIPYIEGDGIGVDVTPAMLKVVDAAVEKAYKGERKISWMEIYTGEKSTQVYGQDVWLPAETLDLIREYRVAIKGPLTTPVGGGIRSLNVALRQELDLYICLRPVRYYQGTPSPVKHPELTDMVIFRENSEDIYAGIEWKADSADAEKVIKFLREEMGVKKIRFPEHXGIGIXXXXXXXXXXXXXXAIEYAIANDRDSVTLVHKGNIMKFTEGAFKDWGYQLAREEFGGELIDGGPWLKVKNPNTGKEIVIKDVIADAFLQQILLRPAEYDVIACMNLNGDYISDALAAQVGGIGIAPGANIGDECALFEATHGTAPKYAGQDKVNPGSIILSAEMMLRHMGWTEAADLIVKGMEGAINAKTVTYDFERLMEGAKLL

SEQ ID NO: 851 - protein, 429 aa, Sinorhizobium fredii
MSGTNATISIDGKTADLPVRSGSIGPDVVDIWSLYKQTKMFTYDPGFTSTASCESKITYIDGDEGVLLHRGYPIEQLADHGDFLEVCYLLLYGELPTKAQKDDFDYRVTHHTMIHEQMSRFFTGFRRDAHPMAVMCGCVGALSAFYHDSTDITDPHQRMVASLRMIAKMPTIAAMAYKYHIGQPFIYPKNDLDYASNFLRMCFAVPCEDYVVNPVLSRAMDRIFILHADHEQNASTSTVRLAGSSGANPFACIAAGIACLWGPAHGGANEAALNMLAEIGSVDRIPEFITRAKDKNDPFRLMGFGHRVYKNYDPRAKIMQKTTHEVLAELGHKDDPLLEVAMELERIALTDEYFIEKKLYPNIDFYSGITLKALGFPTTMFTVLFALARTVGWIAQWNEMIEDPEQRIGRPRQLYVGAPLRDYVPLSKR

SEQ ID NO: 852 - protein, 410 aa, Bacillus halodurans C-125
MATTREEALHIHRENQGKLESKSKVPVRNARDLSLAYSPGVAEPCKEIFEDVETVYEYTMKGNMVAVVSNGTAVLGLGNIGPEASLPVMEGKAVLFKSFAGVDAFPICLRTTDVDQIVETVKLLEPTFGGVNLEDIAAPSCFEIEERLKKETNIPVFHDDQHGTAIVTLAGLINALKLTGKRMSEIKVVANGAGAAGIAIIKLMQRMGVRDIIMCDSKGAIYDGRPYGMNDMKAEVAKWTNRDKIDGGLGDVLKGADVFIGVSVAGALTKEMIENMNDDPIIFAMANPVPEIMPEEAKAAGAKVIGTGRSDFPNQVNNVLAFPGIFRGALDARATHINEEMKVAAVHAIADLVAEEDLDPDYVIPAPFDPRVAPAVAAAVAKTAMETGVARRKVDPAEVEAKTKKLAIIE

SEQ ID NO: 853 - protein, 389 aa, Escherichia coli
  misc_feature (185)..(195): Xaa can be any naturally occurring amino acid
TLQNGKLNVPENPIIPYIEGDGIGVDVTPAMLKVVDAAVEKAYKGERKISWMEIYTGEKSTQVYGQDVWLPAETLDLIREYRVAIKGPLTTPVGGGIRSLNVALRQELDLYICLRPVRYYQGTPSPVKHPELTDMVIFRENSEDIYAGIEWKADSADAEKVIKFLREEMGVKKIRFPEHCGIGIXXXXXXXXXXXVRAAIEYAIANDRDSVTLVHKGNIMKFTEGAFKDWGYQLAREEFGGELIDGGPWLKVKNPNTGKEIVIKDVIADAFLQQILLRPAEYDVIACMNLNGDYISDALAAQVGGIGIAPGANIGDECALFEATHGTAPKYAGQDKVNPGSIILSAEMMLRHMGWTEAADLIVKGMEGAINAKTVTYDFERLMEGAKLL

SEQ ID NO: 854 - protein, 387 aa, Ceriporiopsis subvermispora
MAFTSLLALVALAAITRAAPTTICPDGTRVSNHVCCDFIPLAQALQSTLYMGDCGEDAHETIRLTFHDAIAISQSQGPSAGGGADGSMFIFPTVEPFFHANAGIDDSVNNLIPFLSKFPTITAGDLIQFAGTVALSNCPGAPQLEFLAGRPNATAPAVDGLIPEPQDNVTHILERFADAGGFTPFEVVSLLASHTVARADKVDLTIDAAPFDSTPFTFDTQIFLEVLLKGVGFPGTDNNTGEVESPLPLGNNKQGGNDTGEMRLQSDFALARDDRTACFWQGFVNEQEYMMSSFKAAMSKLAILGHNRNDLIDCSEVVPTPKPPVGKPATFPATTGPQDLQLTCKSERFPSLTIDHGARETLIPHCSNGGQDCPTVQFTGPAGEDDS

SEQ ID NO: 855 - protein, 319 aa, Mesorhizobium loti MAFF303099
MTADRHHGKYETRLDPALWAYIDRVDAWYPPEVIGLPIDKQRAVYDRMCRAFHQGRPPGVKASDGLVAAPGHGIPIRHYRPAGKAARAMVLYFHGGGFILGNLDSHDDICAEICAGTGFDVLSVDYRLAPEHVHPAAFDDAMAAFAWAAETSRLPLVLCGESAGGNLAAAVAQATRKHARTAVGQVLIYPGLGGDEGAGSYVEHAEAPLLSVGDIAFYRDVRSAKRQSPDDPTFSPLRDRHFSGLPPTVIITAECDPLSSDGETYRDRIAAAGGKAWWHEEKRLVHSFLRARTTVPAAAEAFSRIIAAIAALGRGEWPY

SEQ ID NO: 856 - protein, 155 aa, Archaeoglobus fulgidus DSM 4304
MSFVIWITGPSGAGKTTLANALYKKLESMGYRVELLDGDGVRRKLYPNLGFSEEERWMHNRVVVEMARRLSRNGIITIVSVVSPYRAWREYARKEIEKFVEVYPRCPLEVRMKRDPKGLYSKALRGEIKGLTGLDGEYEEPENPEVVVDTDKNDR

SEQ ID NO: 857 - protein, 165 aa, Staphylococcus aureus subsp. aureus MRSA252
MNNRNVYDIEVSDYKGLTYKLEAFRGKVILVVNTATECIYSEQLKKLETLFQKYKDRGFVVLSFPNNNFDNRQPGSNEEILKISREKFGVTFPVLAKISVNGNDEHPLFTHLKNEQPGIFGSPIKWNFTKFIIDRQGNVVNRFLPMEDPLDISANIEILLQESSS

SEQ ID NO: 858 - protein, 282 aa, Glycine max
  misc_feature (198)..(198): Xaa can be any naturally occurring amino acid
MGRGKIVIRRIDNSTSRQVTFSKRRNGLLKKAKELAILCDAEVGVMIFSSTGKLYDFASSSMKSVMDRYSKSKEEPCQLGSSASEIKFWQREAAMLRQQLHNLQESHRRKMMGEELSGLTVKELQNLENQLEISLHGVRMKKDQLLMGEIQELNRKGNLIHQENVELYKKVYGTQDDNETNRDSVLTNGLGIGEDLQXACESPAKPATATTLQGTFRNYKIGIAIALIHLQDVCFTIAIKKNGLRFKPQCLRINVAYRPQTNWLKDFNLKLLEKVKATLACM

SEQ ID NO: 859 - protein, 166 aa, Chloroflexus aurantiacus
MTIYQFSAQRIDGSTQSLADFRGQVLLIVNVASMCGLAPQYAGLEQLYRRYRDQGFTVLGFPSNQFMQEPRNNEAIAEFCERTYQVTFPLFAKIDVNGPNEHPLFTYLKTQLPGLFGSTAIKWNFTKFLVDRNGKPYRRYAPTDLPSQIEDDIVLLLRQQPKSLSA

SEQ ID NO: 860 - protein, 127 aa, Triticum aestivum
MGERVKGTVKWFNVTKGFGFISPEDGSEDLFVHQSAIKSDGYRSLNENDTVEFEVITGDDGRTKASDVTAPGGGALSGGSRPGDGGGDRGGRGGYGGGGYGGGGGGGGCFSCGESGHFSRECPNKAH

SEQ ID NO: 861 - protein, 483 aa, Burkholderia sp. RP007
MDTQLIIDNADVPATAAATFERRSPTTGELVTRAAAASVADAIAAADSAAAAYRSWSTTGPTERRRILLKAADLLEARTPEFSRVMALEVGASDLWAGVNVMLAANLFREAAALTTQIQGETIPTDKAGVLSMTVRQPVGVILSIAPWNGPVVLAARAIAYPLVCGNTVVFRASELSPKTHMLIVDVLRDAGLPPGVLNAVTNAPQDAPEVVDALIAHPAVRRINFTGSTRVGRVIAEKAARHLKRCLLELGGKAPLVVLDDADIDEAVKAAVFGAFLYQGQICMSTERIVVDEKIADTFVARFAARARELPVGDPATCGGCVVGPMIVRESGDRINAMINDAVNQGANVVAGGFADGAVMPATIVDRVTPAMRIYDEETFGPITTVVRAKDADDAVRIANDTAYGLSSAVFGRDVTRALSVAMRIEAGSCHINGSTVQNEAQAPYGGTKASGYGRFDGRAVIDEFTELKWITIEPTPQSYPF

SEQ ID NO: 862 - protein, 249 aa, Zea mays
MAAAARQRGTVKWFNDTKGFGFISPEDGSEDLFVHQSSIKSEGFRSLAEGEEVEFSVSEGDDGRTKAVDVTGPDGSFVRGGGGGGGGGGGYGSRGGGGSGGGGRSYGGSWGGGRRSGGGGGPGACYKCGEPGHMARDCPSADGGGGYGGGGYGGGGYGGGGGGGGCFKCGEPGHMARDCSSGGGGYGGGGGGGGGGGGCYNCGQAGHMARDCPSGGGGGGGRFGGGGGGGDRSCYNCGEAGHIARDCPT

SEQ ID NO: 863 - protein, 501 aa, Candida albicans
MDQQEAPIYYGRSVNKVYNQEFIIDSRFKIVKELGHGAYGIVCSAKYDNGSKKVPDSNNGNASSSANASFVAIKKITNIFSKNILCKRALRELKLLQFFRGHKNITCLYDLDIIPNPMTGEFNEIYLYEELMECDMHQIIRSGQPLSDQHYQSFIYQVLCGLNFIHSADVLHRDLKPGNLLVNADCELKICDFGLARGFSENPDENAGFMTEYVATRWYRAPEIMLSFTNYTKAIDIWSVGCILAELLGGKPLFRGKDYVDQLNQILMILGTPPESTLQRIGSHRAQNYVRSLPITRKASYEELFPDANPLALDLLERMLTLDPRERITVRDALNHKYLELWHDPKEEIECQVKFDFKSFETVDGLDEMKQLIMDEVQKFREFVRKPIEEQQRIQMQLHMQKREEQRQEEEEKELLEQQRQFPAQESMDISQTPYNNLETNIGTPQVEDDYPRPQELDEFTFSNLESSSSMNLFQDMAKPSGEEYIKLEEELGFGLDWCYV

SEQ ID NO: 864 - protein, 359 aa, Magnetococcus sp. MC-1
MAKKVLVLPGDGIGQEITAEAVKVLNWAIQNGADITLEEGLIGGTAYDATGTPLPAETITQAKAAQAVLLGAVGGTKWEPLDISVRPEKGLLGIRKALDLYCNLRPAAVYPQLADASTLKKEVVAGIDIMVVRELSSGIYFGQPRGVEDLGDGRKKGFNTLVYTTDEIERIARKAFEAARKRSNRVCSVDKANVLESTELWREVVSDLHKREYADVELSHMYVDNAAMQLIRNPRQFDVIVTTNMFGDILSDAASMLTGSIGMLPSASLGDQFALYEPIHGSAPDIAGKGIANPLATILSVAMMLRYSLELPQLADGVEAAVVTVLDQGLRTADIMQPGMTQVGTAQMGDAVLAALNNA

SEQ ID NO: 865 - protein, 193 aa, Methanococcus maripaludis S2
MAMNAKFRVPFRRRREGKTDFRQRLGLLLSGKPRLVARKSLNNVTAQLMAYDEKGDVVLVSAHSKELVKMGYKGHCGNLPAAYLTGLLLGAKAVKEDVKEAVLDKGLHRATKGAAIFAVLKGALDAGMDIPHGDKIIADEERLNGTHVKNYAESLKEDADAYKKQFSKYLEKGLNPEDLPEHVEELKEKILNL

SEQ ID NO: 866 - protein, 75 aa, Zea mays
FKLFLQNLVCRKNLVIDKSIHTAYVRAIRSAQHFIYIENQYFLGSSYAWPSYVNSGADNLIPIELALKIASEFLY

SEQ ID NO: 867 - protein, 357 aa, Sinorhizobium meliloti 1021
MPKMKAAIFVAPGRIVLDEKQIPDVGPLDALMRITTTTICGTDVHILRGEYPVARGLTIGHEPVGVIEKLGSAVRGYSEGQRVIAGAICTSGHSNAALCGCHAQDGPGTKHGWKGMGGWKFGNTIDGSQAEYVLVPDAMANLAPVPDGLADEQVLMCPDIMSTGFSGAESGAVRVGDAVAVFAQGPIGLCATAGARLIGATTIIAVESVPARMEMARRMGADDVVDFTVSDPTAEIMRLTDGRGVDVAIEALGRQETFEGALRVLRPGGTLSSLGVYSGDLRIPLDGFLAGLGDHTIRTTLCPGGKERMRRLMEVIASGRVDTRPLVTHRFKLDQIEEAYDLFANQRDGVLKVAINP

SEQ ID NO: 868 - protein, 115 aa, Zea mays
MAMAYKMATEGMDVKEECQRWFMEMKWKKVHRFVVYRIDDCRYAVFDFDFVSVDNCQKSKIFFIAWSPAASRIRAKILYATSKQGLRRLLDGVHYEVQATDPSEMGFDVIRGRAQ

SEQ ID NO: 869 - protein, 237 aa, Triticum aestivum
MKGGGDIEAGTAAPKGTTESPELRWALIRKIYVVLCLQLLLTAAVAVVFVKVSSIPRFFVSSYAGLGLYVFILVFPFVVLCPLHIYRQKHPINLLLLGVFTVAISFSVGLTCAFTSGKVILQAGILTIVVVLSLTAYTFWAARRGKDFSFLGPFLFASLMILLVFAFIQIFFPLGKLSHMIYGTLAALIFSGYIVYDTGSIIKRYKYDEYVWAAVTLYLDIINLFLGLLTLFRACDN

SEQ ID NO: 870 - protein, 461 aa, Treponema pallidum subsp. pallidum str. Nichols
MAHLPKEYDFSIESLGESKIPSPIYLSHTLGDFIPNYVSDNEYISHELSARLGETVGPFTHKNLMERAGPRQKIFFNPHHVHAGIVTCGGLCPGLNDVIRAIVRCLWGRYGVKRISGIRFGYKGLLPDYNFDILPLTPEVIDNCHKTGGSLLGTSRGGGNRVVDIVDGIERLNLHILFIIGGDGSQKGAKEIADEIKHRNLKISIIGIPKTVDNDISFVQKSFGFDTAIVKATEAVAAAHMEARSQINGIGLVKLMGRESGFIATYTAIASHETNFVLIPEVSFDLDGPNGLLAHLEKRIALRKHAVLVVAEGAGQDLMVNADGVPSGDSQGGSLRVSSGTDASGNKRLADIGLFLKEKIGVYFKEKRIHINLKYIDPSYLIRSAVAAPIDSIYCERLGNNAVHAAMCGKTKMIIGLVHNKFVHLPIDVVVCQRKHVNPEGSLWRDALDATGQPIVMKNII

SEQ ID NO: 871 - protein, 317 aa, Pasteurella multocida subsp. multocida str. Pm70
MTTQLDSLRNMTVVVADTGDIEAIKKYQPEDATTNPSLILSASALPQYASLIDEAIAYAKSKSNCSKQQLIDAEDKLAVNIGLEILKIVPGRISTEVDARLSYDTQATIEKAKKLIALYNEAGISNDRILIKIASTWQGIRAAEELEKQGINCNLTLLFSEAQARACAEAGVYLISPFVGRILDWYKANSDKKDYAPAEDPGVISVTKIYNYYKQHGYNTIVMGASFRNVGEITELAGCDRLTIAPALLKELQENNAPLERKLSYTGEVKAKPQPLTEAEFYWQHNSDAMAVEKLADGIRKFAADQEKLEAMLLTKF

SEQ ID NO: 872 - protein, 407 aa, Pseudomonas aeruginosa UCBPP-PA14
MIGFEIFLAIGMFTAIVLGLVAIILVARAKLVSSGDVTIQINGEHSLTVPAGGKLLQTLATNNVFLSSACGGGGTCAQCKCVVVEGGGEMLPTEESHFTRRQAKEGWRLSCQTPVKQDMQIRVPEEVFGVKKWECTVESNPNVATFIKELTLRLPDGESVDFRAGGYVQLECPPHVVEYKDFDIQPEYRGDWDKFNMWRYVSKVDETVIRAYSMANYPEEQGVVKFNIRIASPPPGSDLPPGQMSSWVFNLKPGDKVTVYGPFGEFFAKDTEAEMVFIGGGAGMAPMRSHIFDQLRRLKSNRKISFWYGARSLREAFYTEEYDQLQAENPNFQWHLALSDPQPEDNWTGLTGFIHNVLFENYLKDHPAPEDCEFYMCGPPMMNAAVIKMLTDLGVERENILLDDFGG

SEQ ID NO: 873 - protein, 162 aa, Azoarcus sp. EbN1
MSVPANVFDFETRRLNGAPMPLAEFRGKVLLLVNTASECGFTPQYEALQELHDRFAPRGFSVIGFPCNQFGGQEPGGAEEIAAFCAKNYGVSFPLSEKIDVNGDNAHPLYRHLTSVAPGILGTEAIKWNFTKFLVDRDGQVVARFAPATKPESIARDIEALL

SEQ ID NO: 874 - protein, 333 aa, Kineococcus radiotolerans SRS30216
MTWIDAPAHRPRTPAPVPRHLAGISVARARARALVERPGPFDDDAVLVRDTTVRGAAGPLPARTYRPRAGGRGVVLFLHGGGWALGDLDTDDAVCRRIAADAGTAVLGLGYRLAPEHPHPAALEDASAVLRALADRGAGGVGGPGEPLAVAGAEAGAQLAAVLALRSRAGSVPPLAHQVLLCPVLDSDLTRPSHREHGHGPELTVEDLAWFWRMHVPDRAARRRPDVSPLRVPDPTGLAPATLVVAGADPLRDEGLAHAGRLTAAGVDAHRVLAGDARHGFATRPGSPDADAALRAVTDRLRPALAPAARTAAGARVIDLRAPVRVAGARSAP

SEQ ID NO: 875 - protein, 192 aa, Triticum aestivum
MSLSSIARRLCCSRQSSTSRLSVVLARLHSTEAAKDTGAKRYKYPEVYDPYGPMPPASEKVVGLADRIAALPPEEIKQIAPALLLRLNQPAPQAISGQGFSMGSQGGAGAGAAKSEEKKAEKLVFDVKLEKFEAAAKIKIIKEIRTFTDLGLKDAKELVEKAPVILKQSLTKEEAEAIIAKIKAAGGVAVME

SEQ ID NO: 876 - protein, 344 aa, Ralstonia solanacearum
MRTWFNGYSDDSQIRTIVQLRPMPSLDPHVAQLLDLVARAKRPPLHHLAPADAKIAYEKSSPIVDIPPIPLDHVHDLTVPARDGYAIPVRTYAAREASWADPLPLLVYFHGGGFTVGSIRTHDALCRSLAAKSGAMVLSVDYRLGPDWKFPTAADDAFDVLQWVFDEAATIGADPARIAFGGDSAGGTLAAITAIEARNRGLAPVLQLLIYPGTTARETTPSHHAFAEGYLLTQAMIAWFFAQYLRSDADRDDWRFAPLDGGGQGADVRGVCPAWISVAGFDPIRDAGIGYADKLRAAGVPVTLKMYEGMIHDFFKLGRFVPAVEDAHYEAADALRRAFGTQAG

SEQ ID NO: 877 - protein, 181 aa, Triticum aestivum
  misc_feature (90)..(90): Xaa can be any naturally occurring amino acid
LDGVFAFVLYDTRDRTYVAARDAIGVNPLYIGWGSDGSVWMSSEMKALNEDCVRFEIFPPGHLYSSAAGGFRRWYTPHWVPRSRCPGTPXYQAAPSLREASEKAGYQRGHDRLPFRGLLSRRLDPPFVASVNKAPLRPRPTPPESGQTPSFVVRSRGPLTEGRTRVPDTRDTTRFLTKTDH

SEQ ID NO: 878 - protein, 347 aa, Haemophilus somnus 2336
MKAIVLESNRNMAICDIPKPLVEDPDDVLVKVHYSGLCGSDIPRIFHHGTHFYPIVLGHEFSATVEEVGSDVTELDKGDLVSCAPLQPCFKCDECNRGFYSLCKNYNFIGSRRFGANSEYLCVKKSNLVKLPQGSDTLQASFIEPITVGLHAIHLAGGCKGKNVVIVGAGTIGLLAAQSTKALGANSVSVIDINQEKLVLAKTLGADYVFNSMDLKADEILACLDGNRFDQLILETAGVPKTVELSIQIAGPRAQVVLVGTLHHDLNLDQKEFGLILRKELIIFGSWMNYSKPWPGVEWREAVNLIAENKICFEPLISSINTIEDYVEEVKSLDGKPMNGKLVLKFD

SEQ ID NO: 879 - protein, 177 aa, Glycine max
MASSMISSPAVTTVNRAGAGMVAPFTGLKSMAGFPTRKTNNDITSIASNGGRVQCMQVWPPVGKKKFETLSYLPDLDDAQLAKEVEYLLRKGWIPCLEFELEHGFVYREHNRSPGYYDGRYWTMWKLPMFGCTDASQVLKELQEAKTAYPNGFIRIIGFDNVRQVQCISFIAYKPPG

SEQ ID NO: 880 - protein, 474 aa, Glycine max
  misc_feature (95)..(95): Xaa can be any naturally occurring amino acid
WSPGWSNADKALTAFVNGALIEYWKNRRKADGGTTSFLSPHLHFGEVSVKKVFHLVRIKQVFWANEGNKAGEESVNLFLKSIGLREYSIDTSSPXDHEKPLLGHLTLYPWVENEGDFNAWRHGRTGYLLVDAGMRELWATGWLHDRIRVVVSSFFVKVLQLPWRWGMKYFWDTLLDADLESDALGWQYISGSLPDGREIDRIDNPQFEGYKFDPNGEYVRRWLPELSRLPTEWIHHPWNAPESVLQAAGIELGSNYPLPIVGIDAAKNRLLEALSKMWQQEAASRAAMENGTEEGLGDSSESVPAAFPQDTRMEETHEPVRNNPLPIARRYQDQMVPSITSSLLRVEEEETSSDLRNSAEESSRAEVPVTANAQQNAGVALNERMLQTTNRNTQTQYNTTMDLRNVADDSAVESSSGTRRERDGGLVPVWSPPASSYSEQFVGDENGITSSSSYLQRHPQSHQMLNWKQLPQTG

SEQ ID NO: 881 - protein, 111 aa, Glycine max
  misc_feature (33)..(33): Xaa can be any naturally occurring amino acid
MASSMISSPTVTTANRPGAGLVVQLIGLNSLVXFPTLKTHHDITFIASNGGRVQCMPVWPPVGKKKFETLSYLPDLDDAQLAKEVEYLLMKGWIPCLEFELEHSFLYREHN

SEQ ID NO: 882 - protein, 131 aa, Arabidopsis thaliana
MAYEERRSSILDSFSLSPLPYPVLLILAVASVFLLSSWYFSLEEAAESAEEQINFALLLIPLFLIVLVRWLSSMENPDALLGMFSSSRRTTYVSPGAGGDGGSSPWGVAALIVLLLVLLQYQSSFLEMWSG

SEQ ID NO: 883 - protein, 347 aa, Vibrio vulnificus CMCP6
MFFEWQGNEPATLQCVDKFFETDDTVSIRLADLTESLLFQFKPGQFVNLGVEIDGKMEFRAYSISSLAGEEYLQFTIKRVEGGKVSNFIIDSLLIGDTVQALAPAGEFNCVDHPPRELDGQGKALLISAGCGVTPVFAMAKHWLNNEMNVDIEFLHIARSAQETIYFDHLSTCQSAYAHFHLKLLLKDAQGTTHPQGRFNAQWLQDLVPDFATRTIYLCGPNQFMQDTQDYLQALGFDMNHFYHESFTPEKVEAMEASDEEVCISVPDFAQTINAKKGQLLADVLENAGLPLIVACRSGICGSCKCKVANGQVRSISQETLTTEEIAQGYVLACSSHIESDLEVCLH

SEQ ID NO: 884 - protein, 506 aa, Aspergillus nidulans FGSC A4
MNGEIPSIAVFTSSRAVIGGRLTSATIVVSRTTGKVTAVFDSVIPASDFPDGTPYTDFSPYVLLPGLVDAHVHLNEPGRTEWEGFYTGTQAAAFGGVTTVIDMPLNAIPPTTTVENFKLKLKAAEGKCWVDVGFYGGIIPGNAGELKALVREGVRGFKGFLIDSGVDEFPAVSSEDVRKAMAELADEPTTLMFHAEMVPPKTPSELPEVMPEGAPEAYSTFLASRPSEYELCAVEEILSLSHLAPKLPLHIVHLSAMEAIPLLRKARAEGVPITAETCYHYLSLAAEEIRDGDTRHKCCPPIRSKSNQDALWAELDRHAEDGVIKTIVSDHSPCTPDLKLLPSHIPGNCSHGSSKHANTTPVVNEGSFLSAWGGISSVGLGLPILWTELSRRKGLTSSPDDTTTKQALQDIVHLCCANTAAQVGLHKSKGDLVPGYDADFCVFDDTAEWEVEPSTMLFRNKCSPYQGRTMRGMVRETWLRGEKIFNRDDGFTVKAPSGSLLLEKRV

SEQ ID NO: 885 - protein, 127 aa, Oryza sativa (japonica cultivar-group)
MRGVILLRYEEDAMAGHRSTAAATGGRLYGQVGVKRRVVEETAAAVEVGGGGGGYLGVEAAVLLGVVTATLLVLPLLLPPLPPPPPMLLLVPVAIFAVLLLLVLLPSDAKSIAAAGRPSSSSSSSYL

SEQ ID NO: 886 - protein, 297 aa, Bacillus anthracis str. A2012
MVESCSNKVVAYKKCNDERETTVHIPTTTLHNGVKMPMIGLGVYKAKEGDEVKQAVKTALEVGYRSIDTATVYENESGVGEAVRESGIPREDIFITTKVWNDDQGYEETLEAFEKSLKKLQMDYVDLYLIHWPIRGKYVDTYRALEKLYEEGKVRAIGVSNFHKHHLELLLPNCKIKPMVNQVELHPMLTQFELRNFCQGEQIQMEAWSPLMRGGEVFQHPIIQAIATKYEKTPAQVILRWDIQSGIVTIPKSVTPSRIQENFSIFDFSLTEEEMTEINTLNRNLHVGTNPDKYDTL

SEQ ID NO: 887 - protein, 305 aa, Thermobifida fusca
MTTPVDPAIAAVAAAAAAAPPLTSLTPEQARARVAAGNSSCANGPDLRSVRDIRLPVADGQIGARVYTPHAAPRATFVYLHGGGWVTGDLDYSDELCRFLADRLAWTVVSVDYRLAPEHPFPTPVNDAYAAVQHVAATIAANGPLGVGGDSAGGNLAAACTLRARDEHGPRLDFQVLLYPVTDHDFTRASYQTHATAFPIGVAEMRWFWDHYLPDPERRDLPLASPLRAELAGLPPAHIVVAGHDPLRDEGVAYAERLRAAGVKASLAEYPSLTHGFFRLTGVVPAARAAVDDLIDALQLLTEDH

SEQ ID NO: 888 - protein, 181 aa, Mesorhizobium loti MAFF303099
MKRDEGGDAADLTEIAGAIKWFDVAKGYGFILPDDGVSGDILLHVTCLRRDGFQTALEGARVVCLVKQGDRGLQAFRVLSMDVTTAVHPAEMQEQRTHVAVTPESGLERALVKWFNRTKGFGFLTRGEGTEDIFVHMETLRRYGITELRPGQVVLVRFGRGDKGLMAAEIHPDMGTLPVSH

SEQ ID NO: 889 - protein, 181 aa, Glycine max
MATVGRNVAAPLLFLNLIMYFIVLGFASWCLNRFINGQTYHPSFGGNGATMFFLTFSILAAVLGIVSKLLGGNHMRTWRSDSLASAGATSMVAWAVTALAFGLACKQIHLGGHRGWRLRVVEAFIIILTFTQLLYLILIHAGLYSSRYGPGYHDTDYGHGHGVGGTTGDPMHKPATAGTRV

SEQ ID NO: 890 - protein, 442 aa, Rhodobacter sphaeroides 2.4.1
MPGHIFGRSTRGSLPVAAEGEGCYILDTEGRRYLDGSGGAAVSCLGHSNAAVRAALHDQLDRLAFAHTGFFTSEPAERLADRLAAAAPEGIERVYLVSGGSEAVEAALKLARQYFMEVGQPGRHRVIARRQSYHGNTLGALAAGGNEWRRAQFAPLLVETSHVSPCYEYRGRAEDESLEAYGLRVADELEAEIQRLGPETVMAFVAEPVVGATAGAVPAVPGYLKRVREICDRHGVLLILDEVMCGMGRTGHLFACAEDGVAPDMITIAKGLGAGYQPIGALLVQGRIYDAIAAGSGFFQHGHTYMGHAMAAAAANAVLDEIEGRDLLQAVRRQGARLEALLQERLGQHPHVGDIRGRGLFRGIELVADRETKEPFDPARKLHARIKAEAFAGGLICYPMGGTLDGVRGDHILLAPPFIISDAELDELVDKLSGALDRALAA

SEQ ID NO: 891 - protein, 283 aa, Clostridium perfringens
MELWYTEEHTDKVRFSIKVDEQLYSGKSDFQRIDVFKSQEFGTFFTLDGLMMVTEKDEFIYHDMIVHVPMATNPNIKNVLVIGAGDGGTVRELTRYETIEKIDMVEIDKLVVDVCREYLPQTANKLDDPRVSLFFEDGLKFVRSVENKYDLIIVDSTDPFGPGEGLFTREFYGNCFKALKEDGILVNQHESPYYEEYARGMKRAHKRIKECFPVCRVYQAHIPTYPSGHWLFGFASKKYDPLNADIEKWNDLGLKTKYYNTDLHKGCFALPNYVKEMLENVDE

SEQ ID NO: 892 - protein, 78 aa, Triticum aestivum
  misc_feature (27)..(27): Xaa can be any naturally occurring amino acid
MGLWSFLEGVLLIANALAILNEDRFLXPRGWSFADARGVQGANTFKGQMIGLIYAAQYMRFPLILLNGITILVKFVSF

SEQ ID NO: 893 - protein, 292 aa, Leuconostoc mesenteroides subsp. mesenteroides ATCC 8293
MEYKTLASDIKMPVLGFGVFQVQEKGAAKQAVIDAIKTGYRLIDTAASYGNEREVGEGIAEAIETGLVTREELFVTSKMWVQDVSADKAAAAIQASLDRLKLDYLDLYLLHQPYNDVFGAWRAMEAAYKAGQLKAIGVSNFDIAQLTNLAEFSEIKPMLNQIEANPFQQNKKDAAYFAEYGVQVEAWAPFAEGKNGLFSNELLQGIADKYNKSIAQVVLRWLTQRDIIVVAKSVKPERMAQNLDVLDFKLTDEEMQEIATLDTNISQFFDHADPDMIKWMAGREISYDVTAD

SEQ ID NO: 894 - protein, 367 aa, Liquidambar styraciflua
MGSTSETKMSPSEAAAAEEEAFVFAMQLTSASVLPMVLKSAIELDVLEIMAKAGPGAHISTSDIASKLPTKNPDAAVMLDRMLRLLASYSVLTCSLRTLPDGKIERLYGLAPVCKFLTRNDDGVSIAALSLMNQDKVLMESWYHLTEAVLEGGIPFNKAYGMTAFEYHGTDPRFNTVFNNGMSNHSTITMKKILETYKGFEGLGSVVDVGGGTGAHLNMIIAKYPMIKGINFDLPHVIEEAPSYPGVEHVGGDMFVSVPKGDAIFMKWICHDWSDEHCLKFLKKCYEALPTNGKVILAECILPVAPDASLPTKAVVHIDVIMLAHNPGGKERTEKEFEALAKGAGFEGFRVALCAYNTWIIEFLKKI

SEQ ID NO: 895 - protein, 288 aa, Leuconostoc mesenteroides subsp. mesenteroides ATCC 8293
MNFKTLNNGAQMPQLGFGVFQIPAEETKQAVVDAINAGYRSIDTARVYGNEAETGQGVNEAIANAVVAREELFLTTKLWLSEFSYEAAKGAIDDSLKKLGTDYADLILLHQPYGDVYGAYKALAEAQADGKVKSIGISNFYPAKFVEFIKVIKTMNLPVPQIDQIEFHPYYQEKVARQLHDKYGVQIEAWGPLGRTANKYDTFHQPELVEIAAKHDKSVGQVVLRWIMQSNIITVAKSVNPSRMAENIDIFNFELDDDDMKKIETLDKNEPIFNHLDISTVERMYGWV

SEQ ID NO: 896 - protein, 275 aa, Fremyella diplosiphon
MENAANIQDDNQLTVEQAIANLQGEDLGLRVYAAWWLGRFRVDAPEANDLLIQALEDEDDRTIVGGYPLRRNAARALGKLGEKRAVPALIKALECSDFYVREAAAQSLEMLGDSSSIPRLIELLNDQVPGTLPAPEPPQLTQPFDAIIEALGTLGASDAIPIIQEFLEHTVPRIQYAAARAMYQLTQNHCRLQSVWRSLVQALAQDDLQLRRAVLSDLGAIGYLPAAEAIADTLAENSLKLISLKGLLEKQFQPTKPEDLSPGAIKVMQLMDALL

SEQ ID NO: 897 - protein, 568 aa, Glycine max
MAPSFAINGGFPGARVTPPSVTGRFAAVYSEVQNSRIDHELPLPSVLKNPFIIVDGPQSSAAGNPEEIAKLFPKLFGQPSAALVPSDSHAPHANRKLKIGVVLSGGQAPGGHNVISGIFDYLQDLAEGSTLYGFRGGPAGIMKCKYVELTSDYIYPYRNQGGFDMIRSGRDKIETPEQFKQAEETVQKLNLDGLVVIGGDDSNTNACLLAEHFRSKNMKTRVIGCPKTIDGDLKCKEVPTSFGFDTACKIYAEMIGNVMIDARSTGKYYHFVRLMGRAASHITLECALQTHPNITIIGEEVAAKKMTLKDVTDYIVNIISKRAEDNYNYGVILIPEGLIDFIPEVQHLIAELNEILANDAVDEGGLWKKKLTDQSLKLFEFLPKAIQEQLMLERDPHGNVQVAKIETEKMLIQMVETELEKRKQQGTYKGGFRGQSHFFGYEGRCGLPTNFDSTYCYALGYGAAALLQSGKTGLISSVGNLCAPVEEWTVGGTALTSLMDVERRHGKFKPVIKKAMVELEGAPFKKFASLRDEWALKNCYISPGPIQFTGPGSDAINHTLLLELGAQA

SEQ ID NO: 898 - protein, 488 aa, Geobacillus stearothermophilus
MKVQTEIKTYFNYINGNWVSSVSNNVEPSINPANRHDIVGYVQRSTLEDVNEAVTAANEAQTSWWKRSGVERGEYLYKAAHILEQCLQDIAETMTREMGKTLAEAKAETMRGVHILRYYAGEGARKIGDVIPSSDSEGLLFTTRVPLGVVGVISPWNFPVAIPIWKMAPALVYGNTVVLKPASETAVTAAKVIECFHEAGFPKGVVNMVCGSGSVVGQGIANHPDIDGVTFTGSNTVGKQVGRAAFERGAKYQLEMGGKNPVIVAKDADLDLAVEGTISGGLRSTGQKCTATSRVFIEREVYEPFKAKLLERVKQLKIGNGLDAETWMGPCASESQFHTVLSYIEKGKSEGAKLIYGGNRCLEGELANGFFVEPTIFEDVDLQMTIAREEIFGPVLALIQVDSIEEAIKLANDTEYGLSASIYTKNIGNALEFIKDIEAGLIKVNAETAGVEFQAPFGGMKQSSSHSREQGQAAIEFFTSIKTVFVKA

SEQ ID NO: 899 - protein, 287 aa, Listeria monocytogenes EGD-e
MTIQWFPGHMAKARREVTEKLKLVDVIFELVDARIPLSSSNPMLEEIIHQKRRVIILNKADTADEKTTKEWIDYFAEKGLPAVAVNAQEGKGLFKIEQAAEKLMAEKFDRLRSKGMKPRAIRAMILGIPNVGKSTLINRLAKKNIARTGNKPGVTKAQQWIKVGKTLELLDTPGILWPKFEDQEIGYKLALTGAIKDDLLQMEEIAGYGLRFLENHYPDRLQTWLKVETVSEDPIETLAFIAEKRGLLDRYNDPDYSRAAETVVREIRQQKLGRMSFDFPNWEDEVE

SEQ ID NO: 900 - protein, 72 aa, Glycine max
  misc_feature (8)..(8): Xaa can be any naturally occurring amino acid
  misc_feature (10)..(14): Xaa can be any naturally occurring amino acid
  misc_feature (17)..(17): Xaa can be any naturally occurring amino acid
  misc_feature (24)..(25): Xaa can be any naturally occurring amino acid
  misc_feature (45)..(45): Xaa can be any naturally occurring amino acid
PWYETTVXGXXXXXPFXGLKSMAXXPTRKTNNDITSIASNGGKSXNAWQVWPPVGQEEIEILSYLPDLMMHG

SEQ ID NO: 901 - protein, 101 aa, Rickettsia slovaca
GSSEYIPKYIAKAKDKNDPFRLMGFGHRVYKNYDPRAAVLKETCKEVLKELGQLDNNPLLQIAIELEAIALKDEYFIERKLYPNVDFYSGIIYKAMGIPSQ

SEQ ID NO: 902 - protein, 156 aa, Triticum aestivum
  misc_feature (75)..(75): Xaa can be any naturally occurring amino acid
  misc_feature (137)..(137): Xaa can be any naturally occurring amino acid
MKTLLILTIIAVALTTTTANIQVDPSGQVQWPQQQQPFPQPQQPFSQQPQQIFPQPQQTFPHQPQQAFPQPQQTXFPHQPQQQFPQPQQPQQPFPQQPQQQFPQPQQPQQPCAQQPQQQFPQPQQPQQHVPRPQQPXLPFAKHQHHHFPQPQHPKH

SEQ ID NO: 903 - protein, 355 aa, Glomerella cingulata
MSRANPPNASGSRKISFNVSEQYDIQDVVGEGAYGVVCSAIHKPSGQKVAIKKITPFDHSMFCLRTLREMKLLRYFNHENIISILDIQKPRSYETFNEVYLIQELMETDMHRVIRTQDLSDDHCQYFIYQTLRALKAMHSANVLHRDLKPSNLLLNANCDLKVCDFGLARSAASQEDNSGFMTEYVATRWYRAPEIMLTFKEYTKAIDVWSVGCILAEMLSGKPLFPGKDYHHQLTLILDVLGTPTMEDYYGIKSRRAREYIRSLPFKKKVPFRTLFPKTSDLALDLLEKLLAFNPVKRITVEDALKHPYLEPYHDPDDEPTAPPIPEEFFDFDKHKDNLSKEQLKQLIYQEIMR

SEQ ID NO: 904 - protein, 507 aa, Petunia x hybrida
MDAKIGSIDTCKPTTNNVATLPTNNTVTISTHTPSTTIIPCNSTTDSTLGRHLARRLVQVGITDVFGVPGDFNLTLLDHLISEPNLEFIGCCNELNAGYAADGYARPRGVGACVVTFTVGGLSVLNAIAGAYSENLPLICIVGGPNSNDYGTSGVLHHTIGLPDFSQELRCFQTVTCYQAVVNNLEDAHEMIDTAISTALKESKPVYISISCNLPAIPHPTFSREPVPFSLSPRLSNQMGLEAAVEAAAEFLNKAVKPVVVGGPKLRVAKASDAFVELMDASGYAVAVMPSAKGMVPEHHPHFIGTYWGAVSTAFCAEIVESADAYLFAGPIFNDYSSVGYSLLLKKDKAIIVQPDRVTIGNGPAFGCVLMKDFLAALAKRLKHNPTAHENYRRIYVPEGHPLKCEPNEALRVNVLFEHIQRMVSADTAVIAETGDSWFNCQKLKLPEGCGYEFQMQYGSIGWSVGATLGYAQAARDKRVLAFIGDGSFQVTAQDISTMLRCGQRTI

SEQ ID NO: 905 - protein, 115 aa, Oryza sativa (indica cultivar-group)
MARAQLLLVALVAALLLAAQAMAAISCGQVNSAVSPCLSYARGGSGPSAACCSGVRNLNSAATTTADRRTACNCLKNVAGSISGLNAGNAASIPSKCGVSIPYTISPSVYCSSVN

SEQ ID NO: 906 - protein, 143 aa, Triticum aestivum
LDVPDGESGGAGATGGEKQGPTRAYVRDARAMAATPADVKELPGAYAFVVDVPGLGSGDIKVQVEDERVLVISGERRREEKEDARYLRMERRMGKLMRKFVLPENADTEKISAVCRDGVLTVSVQKLPPPEPKKPKTIQVQVA

SEQ ID NO: 907 - protein, 118 aa, Oryza sativa (indica cultivar-group)
MARAQLVLVALVAAALLLAGPHTTMAAISCGQVNSAVSPCLSYPRGGSGPSAACCSGVRNLNSAASTTADRRTACNCLKNVAGSISGLNAGNAASIPSKCGVSIPYTISPSIDCSSVN

SEQ ID NO: 908 - protein, 148 aa, Oryza sativa (japonica cultivar-group)
MEQGSERQDERPPLPCANGCGFFGSADTRGLCSKCYRQTVMSQASAPSAAAQSAEHDQVVLPAPEGVPVDEGAMPPPPPRHGAKTKSRCAACGRSVGLMGFECRCGAVFCGAHRYSDRHDCGYDYRGAGRDAIARANPVVRPDKVEKL

SEQ ID NO: 909 - protein, 348 aa, Listeria monocytogenes str. 1/2a F6854
MKALKLYGKRDLRYEEADMPTIEEPDDVILKVKTVGICGSDISRYSKLGPYVPGMVWGHEFSGEVIEVGSEVTDIEIGDRAAGCPALYCGECEYCKKGEFARCRKLTVIGARHPGAYAEYIKLPAENVVKIPDELDYEAAALVEPSAVVVHGFYHTKLQAGDDVVVVGSGNIGLLAIQWAKVFGARRVIAIDVDDKKLALAKEVGADVVINSLKEDPLEVVAAHTDGLNADLVVEAAGSPITSAQVFAYAKKGGGVVFLGIPYADVTIERFYFEKIVRSELTVWGSWNAISAPFPGKEWQTTIHFLANKQINIEPMITHRLSLAEGPEVFERIYERNEFFGKVLFFPE

SEQ ID NO: 910 - protein, 159 aa, Streptococcus mutans
YNETGNWLPNETLEIIKTHLLAIKGPLETPVGGGIRSLNVALRQELDLFACVRPVRYFKGVPSPLKHPEKTAITIFRENTEDIYAGIEWNAGTAEVQKVINFLQDDMQVKKIRFPKSSSIGIKPISIEGSQRLIRAAIEYALANNLTKVTLVHKGNIQK

SEQ ID NO: 911 - protein, 347 aa, Salmonella enterica subsp. enterica serovar Typhi Ty2
MKSVVIHAEGDVRVEERPLPQLQAEDDVLVKVVSSGLCGSDIPRIFAQGAHYYPITLGHEFSGYVESYGTGVTDMQPGDAVACVPLLPCFHCPQCERGYFSLCKQYQFVGSRSEGGNAEYVVVKRANLFRLPSDMPIEDGAFIEPITVGLHAFHLAQGCEGKNVIIVGAGTIGLLALQCARELGARSVTAIDINPQKLELAKALGATHTCNSREMTADDIQTALSDIQFDQLVLETAGTPQTVSLAIDITGPRAQLALVGTLHHDLTLTTRTFGLILRKELTLLGSWMNYSAPWPGEEWETAARLLAEKRLQLTPLIAHRGDAESFAEAVKALNGAPMQGKILLQLS

SEQ ID NO: 912 - protein, 116 aa, Oryza sativa (indica cultivar-group)
MARAQLVLVAVVAALLLAAPHAAVAITCGQVNSAVGPCLTYARGGAGPSAACCSGVRSLKAAASNTADRRTACNCLKNAARGIKGLNAGNAASIPSKCGVSVPYTISASIHCSRVS

SEQ ID NO: 913 - protein, 407 aa, Glycine max
MALNYPFLTYFILLLVTITRLIFTVGKTEQWKAPILPELDIDNISHKLHDDPETIQMASRDYGHLTHEFPLAVFRPSSIDDIVTLIKSSYNSFAPFDIAARGQGHSTHGQAMARDGIVVDMASLRKQRNGVAISVSKDPLMGHYADVGGEQLWIDVLHATLEYGLAPVSWTDYLYLTVGGTLSNAGISGQSFRYGPQISNVHEMDVITGKGEFVTCSSQKNLELFHAVLGGLGQFGVIARARIALEPAPKRVKWVRLLYSDFSAFTKDQERLISINGRKQKNALDFLEGMLLMNQGPINNWRSSFFPLSDHPRIASLITEHSILYCLEVAKYYDEQTELNVDKEIQVLLQGLAYIPGFYYEKNVSYVEFLNRVRSGELKLQSQGLWDVPHPWLNLFIPKSQILDFNS

SEQ ID NO: 914 - protein, 386 aa, Synechococcus elongatus PCC 7942
MTAVSEFRPGLEGVPATLSSISFVDGQRGVLEYRGISIEQLAQQSSFLETAYLLIWGHLPTQQELTEFEHEIRYHRRIKFRIRDMMKCFPDSGHPMDALQASAAALGLFYSRRALDDPEYIRAAVVRLLAKIPTMVAAFQLIRKGNDPIQPRDELDYAANFLYMLTEREPDPVAARIFDICLTLHAEHTINASTFSAMVTASTLTDPYAVVASAVGTLAGPLHGGANEEVLDMLEAIGSVENVEPYLDHCIATKTRIMGFGHRVYKVKDPRAVILQNLAEQLFDIFGHDPYYEIAVAVEKAAAERLSHKGIYPNVDFYSGLVYRKLGIPSDLFTPVFAIARVAGWLAHWKEQLNENRIFRPTQIYTGSHNLDYTPIADRDLAIESD

SEQ ID NO: 915 - protein, 364 aa, Lycopersicon esculentum
MAIENNDQSFFLDVLYCEEEEEKWGDLLEDEEGVIINPLLLSSEGTTKTNSLLLLPLLLLEQDLFWEDEELLSLFVKEKETRCCFESFGSDPFLCSARVDVVEWILKVNAHYDFSALTAILAINYLDRFLSSLQFQKDKPWMTQLAAVTCLSLAAKVEETQVPLLLDFQVEDAKYVFEAKTIQRMELLVLSSLKWRMNPVTPLSFLDHIIRRLGLKNNVHWEFLRRCESLLLSVMIDCRFVRYMPSVLATAIMLHVIHQIEPCNAIDYQNQLLGVLKISKENVNNCYELISEVSSKPITSHKRKYDENPSSPSGVIDPIYTSESSNDSWDLDLPSFKKSKVQEQQMKMSSSLSRVFVEAVGSPH

SEQ ID NO: 916 - protein, 201 aa, Arabidopsis thaliana
MSGGGDVNMSGGDRRKGTVKWFDTQKGFGFITPSDGGDDLFVHQSSIRSEGFRSLAAEESVEFDVEVDNSGRPKAIEVSGPDGAPVQGNSGGGGSSGGRGGFGGGGGRGGGRGGGSYGGGYGGRGSGGRGGGGGDNSCFKCGEPGHMARECSQGGGGYSGGGGGGRYGSGGGGGGGGGGLSCYSCGESGHFARDCTSGGAR

SEQ ID NO: 917 - protein, 249 aa, Triticum aestivum
GHYRKSFNKKTLVPVRNSREIFDPTFRVWGQTGLKGLETPRNLQGSASSPPKLPTTRSAPEFRARSISADAAPSTRTGNLAMAAASSATSVHDFTVKDASGKDVDLSVYKGKVLLIVNVASQCGLTNSNYTELSQLYPKYKDQGFEILAFPCNQFGGQEPGTNDEIVQFACTRFKAEYPIFDKVDVNGNNVSPLYKFLKSSKGGLFGDSIKWNFSKFLVDKEGRVVDRYAPTTSPLSIEKDIKKLLGSS

SEQ ID NO: 918 - protein, 327 aa, Gibberella zeae PH-1
MAQFIPRQAFALPNSIPKTYYLGHHATAQSDMIKRLNTIHLILECRDLRLPLTTNNPILEHSLAGRERIVVFTKCDLTINKPEYVNALRKLYGDRFVLWNKESPDTTKALLRKVKEVARAIDPIAGMRAMIVGMPNVGKSSLLNTLRRSGLPQKLAKAAKTGGQPGITRKIGTSVRILETEGKDSRRGVGEGVFVLDTPGVFVPYVDNAETMIKIALVQGIKIGLVPAEVLVDYLLYRLNKLNPAFYKQYSKPTNSVEELLTSVAVKTAASVFLKDWRTGKLGKFMLEDLTDEAIEEHQQRMLNPPLSMNQAKKQQKEARAQERAGA

SEQ ID NO: 919 - protein, 228 aa, Nanoarchaeum equitans Kin4-M
MFDDCDIILEVMDARIPFPNKKIEKLNKIIIKVLNKADLVEAEELLSLYGDVYVSSRTRKGLRVLRNKIKEVAKNINKDKIIVCVAGFPNTGKSSLINALRGRHVAGTAPIPGKTKGIQLIKLSNKIYLKDTPGIFTLKDKELLTLIGSYSPEKLDNPIRVALKLIKLIFEDLQERFNIEAKDENEFLEKLSKKWRMPLRDTAVRLLSLWVNGKIKVKYPISITSSHH

SEQ ID NO: 920 - protein, 289 aa, Escherichia coli O157:H7
MEFSVLSNNLKMPMMGFGVFQVTDKNVCKQSVLNAIRTGYRLIDTAAVYGNEDAVGEAVREAISEGLCTREELFITSKLWVQDMLNQDTAAAGIEASLKKSGLEYFDLYLLHQAMRDYFSAWRALEDAYEEGKLKAIGVSNFYPHVLANFCETVRVKPMVNQVELHPYFAQPEALATMKYYNVQPEAWAPLGGGRHKPFENNLLQSIADAHQKSISQVILRWNIQRGVVVIPKSTHQQRIEENFAIWDFSLTEKEMAQISSLDLGYVGESVKHFNPEFVRGCLAVKIHD

SEQ ID NO: 921 - protein, 249 aa, Zea mays
RTPADPVGSPLSDNESGAAAAGGGGGCGSSVGYCGGGGGESPAKEQDRFLPIANVSRIMKRSLPANAKISKEAKETVQECVSEFISFVTGEASDKCQREKRKTINGDDLLWAMTTLGFEAYVAPLKSYLNRYREAEGEKAAVLGGGARHGEGGGAADDAGPLAAGGGAGDGVDRAGHDDDAHVGLMMGASSVGFGSGGGAAPSYYAAASRKAYGAGEGSKVMEFEGEEENVCVQSGRGSASLLHGAVQW

SEQ ID NO: 922 - protein, 426 aa, Nostoc sp. PCC 7120
MQHREFTGCIHTSCRLPISFIFMFNLNRRQFLLRSTLAIAATVSYDHVQAQKPKSPGTLPKGLPRRKVIVVGAGISGLVAAYELTAVGHDVTLLEASKRIGGRVLTLRGAFQGEDLLELGAARIPSNHHLTFGYIKHFGLKLSQFAPADGKYLTIKDGKRLLIPAKVLFQNQPQIRPQEIQKLTDGFDLLPKAFAQALTKEIKLDEPVARIVQTSNGVEVSCLSGQRYLGDYVLCTVPLTVLNQITFSPELSEEKKQAAAGGYNYRAATRGFVKFPNRFWERENLNGWGFFDDEELWHTTWDRPEKTGILHAYLKGEKGLEIDGFEGKTQQQKLLQHWEKILPGVSNYSVRSYFHSWTKDIWSKGGWAYPTDEQEKKLFPELGKSEGKIYFAGEHTSKTRGWLQGALESGLKAAQEIHFAGSTAPR

SEQ ID NO: 923 - protein, 331 aa, Methanosarcina acetivorans C2A
MKLAVIEGDGIGREVIPAAVEVLDAFGLELEKVSLELGYARWERTGSAISEEDIATIKGCDAVLFGAVTTVPDPSYKSVLLTIRKELDLYANVRPVKPLPGITGVTGRNDFDFIIVRENTEGLYSGIEEIGPDLSWTKRVVTRKGSERVAEYACKLAKQRKNKLTIVHKSNVLKSDKLFLDVCRQVASSHGVEYGDMLVDSMAYSLMMRPDKYDVVVTTNIFGDILSDMCAALVGSLGLVPSANIGEKYAFFEPVHGSAPDIAGKGIANPLAAILCVKMLLEWSGRGKEAALIDRAISYILEKKLITPDLGGVSTTAEVGQTVAKYVMQNL

SEQ ID NO: 924 - protein, 508 aa, Triticum aestivum
  misc_feature (129)..(129): Xaa can be any naturally occurring amino acid
  misc_feature (184)..(184): Xaa can be any naturally occurring amino acid
  misc_feature (195)..(195): Xaa can be any naturally occurring amino acid
  misc_feature (209)..(209): Xaa can be any naturally occurring amino acid
  misc_feature (229)..(229): Xaa can be any naturally occurring amino acid
  misc_feature (242)..(242): Xaa can be any naturally occurring amino acid
  misc_feature (253)..(253): Xaa can be any naturally occurring amino acid
  misc_feature (264)..(264): Xaa can be any naturally occurring amino acid
MQSEIWLLWATLAAALLFYLTSAARRGGTGARQPRGPTPLPVLGNVLDLGGNLHHTLARLARVHGPVMKLKLGLVTIVVVSSRDAAREAYTRYDRHLAARAVPDAANAVGNSGRSMIWLPSSDPLWKTXLRGIVASHIFSPRGLAAARGVRERKVRDMVGYFRCHAGEELDVGQAVYGGVLNLXVSSAFFSVDVXVDVGSESASGLREXVEDIIAALTNPTLRIFPFLXRPLDLQGWRRWAXARYQKVFGIFXGIVDRRLANPXTSKGEHAHGDFLDSLLELVSAGKIGRDKVTVILFDVFAAGTDTMAITVEWAMAELLRHPHAMAKVRAEMADILGGKGTDTLEEPDAANLPYLQAVVKEVMRLHPVAPLMLPHQAAEDGVEIGGYAVPRGATVIFNVWAIMRDPAAWERPDEFVPERFLLDKAVDRAVEFRGKDYEFIPFGSGRRLCPGLPMAERVVPFVLASLLHAFEWRLPDGVSADEMDVTEKFTTVNTLAVPIRAVPVVVT

SEQ ID NO: 925 - protein, 513 aa, Zea mays
  misc_feature (404)..(404): Xaa can be any naturally occurring amino acid
  misc_feature (422)..(422): Xaa can be any naturally occurring amino acid
MATCATDLAPLLGPAAANATGYLCSQFADTASAVDATYLLFSAYLVFAMQLGFAMLCAGSVRAKNTMNIMLTNVLDAAAGALFYYLFGFAFAFGTPSNGFIGRHFFGLQRLPRTGFDYDFFLYQWAFAIAAAGITSGSIAERTQFVAYLIYSAFLTGFVYPVVSHWFWSADGWAGASRTSGPLLFGSGVIDFAGSGVVHMVGGIAGFWGALVEGPRIGRFDHAGRSVALRGHSASLVVLGTFLLWFGWYGFNPGSFTTILKSYGPAGTVHGQWSAVGRTAVTTTLAGSVAALTTLFGKRLQAGHWNVVDVCNGLLGGFAAITAGCSVVEPWAAVVCGFVSAWVLIGANALAARLRFDDPLEAAQLHGGCGAWGVLFTGLFARQEYVEEIYGAGRPYGLLMGGGXGKLLAAQIVQIVVIAGWXVSCTMGPLFYALKRLDLLRISADDEMSGMDLTRHGGFAYEDPGDNAGVGEFTLKSAQNRVEPPAEQQPGVKFRNEFKNRDEVTCLPKKKKK

SEQ ID NO: 926 - protein, 120 aa, Lactobacillus johnsonii NCC 533
MALDTEKIIEDLKGASILELNDLVKAIEDEFGVSAAAPVAAAGAAGAGAEKTEFDVELTDVGQEKVKVIKVVRDITGLGLKDSKDLVDGAPKNVKEGVSEDEANDIKAKLEEVGATVTVK

SEQ ID NO: 927 - protein, 417 aa, Candida albicans
MMNIDQHHQLQQQHQQQMLQQQAQAQAQAQAQAQQQQQAAAAAAAANAAATTSSSSPRQVSFNVSDHYQILEIVGEGAYGIVCSAIHKPSQQKVAIKKIEPFERSMLCLRTLRELKLLKHFNHENIISILAIQRPINYESFNEIYLIQELMETDLHRVIRTQNLSDDHIQYFIYQTLRALKAMHSANVLHRDLKPSNLLLNSNCDLKICDFGLARSIASQEDNYGFMTEYVATRWYRAPEIMLTFQEYTTAIDVWSVGCILAEMLSGRPLFPGRDYHNQLWLIMEVLGTPNMEDYYNIKSKRAREYIRSLPFCKKIPFSELFANTNNNTSTSNTGGRTNINPLALDLLEKLLIFNPAKRITVEDALKHPYLQLYHDPNDEPISDKIPEDFFDFDKMKDQLTIEDLKKLLYEEIMKPL

SEQ ID NO: 928 - protein, 429 aa, Vibrio vulnificus YJ016
MDFIMDLAFDRQHIWHPYTSTLTPLTCYPVNSASGVYIKLEDGTTLIDGMSSWWSTIHGYNHPHLNQAAHRQIDQVSHVMFGGITHQPAINLCKKLLSLAPNNLEHVFLADSGSVAVEVSLKMALQYWHAKGDRRPKFLTLQHGYHGDTFAAMSVTDPDNSMHSLYKGFLPEHIFAKSPTGGFWDEWKPEDLTDFAQKIEQHHQELAAVILEPIVQGAGGMRIYHPEFLKGVRALCDQYGLLLIADEIATGFGRTGKLFACEHANIQPDILCVGKALTGGYMTLSATLTSKHVADTVCGGEAGCFMHGPTFMGNPLACAVATASLELIEQGQWQQQTKQIESLFSELLPKLDKYDLVKNTRWLGAIGVVETHRPVNMETIQALFVEQGVWIRPFGKLIYMMPPFIGEPAHIEQLVNAIETALQRAECFV

SEQ ID NO: 929 - protein, 482 aa, Pseudomonas fluorescens PfO-1
MNFPTTLDGLYINGQWSAGREHLRVINPATEALLTTVNGGDESAVHQAVTAATEAFKAWSKTTGAERASILRNIANGVRNGREHLMNLQSSNNGKPQFEAGIDVDDVIATFEYYAELAEGLDAKLDSNVPLPSDDFSARLRREPCGVVGLIVPWNFPMVTTAWKLAPALAAGCCVVLKPSEVTPLPELELATIIAESGLPKGVFNLVCGTGLAVGAPLSADPRIAKVSFTGSNAVGVQVMQRAAETVKGVSLELGGKSSLLILEDADLDLAVELACGGGFFNAGQMCSATSRVLVADELADEFLIRLKAHAEKIRVADPFDPEVEMGALVNQAQYQRVLGHIDRGLSAGAKLICGGNRPADLPRGYFLQPTIFTEVPLDSALWCEEIFGPVICVRSFATEAEAIALANDSQFGLVASVVTRNAETADRVANALQAGLVWLNAPQVIFPQTAWGGYKQSSIGRELGPWGLAAFQEIKHVIRAL

SEQ ID NO: 930 - protein, 454 aa, Oryza sativa (japonica cultivar-group)
MGNCFGSDDGEVEAVKVMARHALPQAAMARPVMVAIAQPNARVAMSPGRPPTGKLPSQATATSTGGGRSVAGGGGRTNAGGDASAEGRILEAPNLRIFTFAELRAATRNFKADTVLGEGGFGRVHKGWVDERTMSPARSGSGMAVAVKKLDPESLQGVQEWQSEVNFLGRLSHPNLVRLLGYCWEDKELLLVYEYMAQGSLENHLFRKGGSASPQQPLSWSLRLRIAIGAARGLAFLHSSEKHVIYRDFKASNILLDTQFHAKLSDFGLAKDGPAGGSSHVTTRVMGTYGYAAPEYVATGHLYVKSDVYGFGVVLLELLTGLRALDAGRPSGQHHLVDWAKPFLSDRRKLARLMDPRLEGQYSSRGAQRAAQLTLRCLAADHKNRPSMREVVAVLEEIESMSRGGSGGGAPGSASPRPAARGGGGGGAHGYGQSPRPGSDWAGPAAGHPSPRVR

SEQ ID NO: 931 - protein, 175 aa, Oryza sativa (indica cultivar-group)
MGPTVMASSATSVAPFQGLKSTAGLPVSRRSTNSGFGNVSNGGRIKCMQVWPIEGIKKFETLSYLPPLTVEDLLKQIEYLLRSKWVPCLEFSKVGFVYRENHRSPGYYDGRYWTMWKLPMFGCTDATQVLKELEDAKKAYPDAFVRIIGFDNVRQVQLISLIANKPPGRAEFGGN

SEQ ID NO: 932 - protein, 322 aa, Mycoplasma penetrans HF-2
MKKIAILTSGGDASTMNKCLSTFITYASKYNCEVVFVKNGYKGIYDNEFVKPDYTETKSWWSLPGTKIYSSRFPEILDEQVRKQMVDNLHKNSIDTLVVIGGDGSYKGARLLSKSGIKVIGLPGTIDNDIASTSYSIGFDTSLNAIVNSIKEIKSCMDSHANVAMIEIMGRHCIDLTVFAGIATEADIIITPESFYTPQQLLAKINEKRKTNSRGIIILYVELLLGTENIPTVEEYIKYIQANSKESVKKNILGYLQRGGNPTAMDMIRASLMTEHALKMISENQYNKIIGVDEFKVVSYDLETAINMKNPSRKDLIDKFFN

SEQ ID NO: 933 - protein, 122 aa, Triticum aestivum
HVDYACTPEEVQQHFNSCGTVNRVTILTDKFGQPKGFAYVEFVEAEAIQEAVKLSESELHGRQIKVAPKRTNVPGLKQPRGGRGFNPYGGHPYMRPYPPPFYNPYGGYGRAPRFRRPRRPFY

SEQ ID NO: 934 - protein, 334 aa, Bordetella pertussis Tohama I
MTTAALPYPLDPQIQRFVERMQADSAAHPRRDLVPVEQAHAISEAVRRPWAEGGPQMARTREIHVPTPHGPVRLRVYTPRAARPGPALLYVHGGGWVLFSLDTHDRLMREYAERAGLTVIGVDYTRAPEARYPRAIEEIVGVIDWLDAHGAELEVDRARLCIGGDSAGANLSVAACLTLRERGAAPLAGMVLNYGVYDANLFRDSTVKYGGGEYLLSTQQMVWFYWNYLRAGDDPRDPRISPVHADLRGLPPAFMAITELDLLHDTNQDMAARLREAGVDVQAKVYPGTVHSFLEAVSLAQVSVAAFDDTAAWLRAVLRPDAAAAAIHTGEHQP

SEQ ID NO: 935 - protein, 168 aa, Triticum aestivum
  misc_feature (113)..(113): Xaa can be any naturally occurring amino acid
  misc_feature (118)..(118): Xaa can be any naturally occurring amino acid
  misc_feature (151)..(151): Xaa can be any naturally occurring amino acid
DATAPVAGAEAVVAGAGEQAGISAVIPGWFSEISPMWPGEAHSLKVEKVLFQGKSDYQNVMVFQSSTYGKVLVLRRIIQVTERDDCAYQEMITTCPFAPSKDPKEVWLLGGGXGVLLXVQRHTPWDQIDICEMINGGNSQTIFPQPTVGLXPRVSLHIGDGFLKNLRR

SEQ ID NO: 936 - protein, 386 aa, Acidithiobacillus ferrooxidans
MAEPNFAPGLEGVAATQSSISNIDGAAGLLSYRGFAIADLAAHSSFEEVALLLLDGVLPGAADLERFDHGLRAHRQVKYNVREIMKFMPVTGHPMDMLHCAVASLGMFYPQQELSDAERGNTLHLDAMAMRIIARMPTIVAMWEQMRFGNDPISPRPDLSHAANFLYMLSGREPDPAHTKILDSCLILHAEHTINASTFSVLVTGSTLTNPYHVIGGAIGTLAGPLHGGANQKVVEMLEEISSVQQVGAYLDRKMANKEKIWGFGHRIYKTRDPRAVILKGMMEDMASHGNLRHSSLFEIAIEVERQATERLGAQGIHANVDFYSGVLYHEMGIKADLFTPIFAMARSAGWLAHWREQLADNRIFRPTQVYTGEQDRRYVPVAQRT

SEQ ID NO: 937 - protein, 288 aa, Gibberella zeae PH-1
MASQPSLLAATAKLNNGLIIPRIQLGLYMMSTREATDSVRQGLLTGYRAFDCAQMYHNERQAGKAINDFLAGSENTSGLKREDIWYTSKLASCDTSYDIVRRSVKKSVEASGLGYIDLFLLHSPYGGKEARLTSWKALEDAVDAGEIRAAGVSNYGSAHIEELMASNPRIAPVINQIEVHPFNTQEDIRATCAKHNIAIEAYAPLARAERMDHPAILDMAKKYSVTPAQIFVKWGLQHDFITLPKSTKQKRMIENASVDGFEISESDMKTLDGLDEHLVTDWDPTDAP

SEQ ID NO: 938 - protein, 291 aa, Triticum aestivum
  misc_feature (199)..(199): Xaa can be any naturally occurring amino acid
MGGLSMEHPWAFAFGLLGNVISFSSLLAPIPTFYRIFKSKSTEGFQSVPYVVALFSAMLWIFYALVKTGEGLLISINAAGCVIETVYIVMYLVYADRKAKIFTAKIVVLLNIAGFGLIFLLTLFAFHGETRVVSLGWICVGFSVCVFVAPLSIIGRVIKTKSVEYMPFTLSLTLTLSAIVWFLYGLLIKDKYVALPNIXGFTFGVIQMVLYVFYMNKTPVASQVKEGKEAWKAPAEDHVVRDQRPARPTRARAPEVRPVTEMAAAVDVPRRCAAEAAATPGVDFARSVDVV

SEQ ID NO: 939 - protein, 125 aa, Methylococcus capsulatus str. Bath
MAVSKEDILETISNMTVMEIVDLISAMEEKFGVSAAAAVAVAPVAAGAAAPAVEEKTEFDVVMTSFGANKVNVIKAIREITGLGLKEAKDLVEGVPSTVKEGISKAEADDIKKKLEEAGAAVDVK

SEQ ID NO: 940 - protein, 162 aa, Triticum aestivum
  misc_feature (53)..(53): Xaa can be any naturally occurring amino acid
  misc_feature (100)..(100): Xaa can be any naturally occurring amino acid
  misc_feature (128)..(128): Xaa can be any naturally occurring amino acid
MSDSEEHHFESKADAGASKTYPQQAGTVRKNGFIVIKNRPCKVVEVSTSKTGXKHGHAKCHFVAIDIFNGKKLEDIVPSSHNCDIPHVNRTEYQLIDISXEDGFVSLLTSDGNTKDDLRLPTDETLWXQIKEGFESGKDLVVTVQSAMGEEQICALKDVGPK

SEQ ID NO: 941 - protein, 422 aa, Xenorhabdus nematophila
MRPSDIEFDLRHIWHPYTSMIRPFPAYPVVSATGVELVLSDGRKLIDGMSSWWAAIHGYNHPVLNEAAKSQIDKMSHVMFGGITHPPAVELCKQLVALTPDSLECVFLADSGSVAVEVALKMALQYWQARGEKRQRFLTLRHGYHGDTFGAMSVCDPDNSMHSLYNGYLPNHLFADAPTCQFDDEWQPEDIDSFKRLLRQYHAEITAVVLEPIVQGAGGMRIYHPEYLRQVRQLCDEHQILLIADEIATGFGRTGKLFACEHAQIEPDILCLGKALTGGYMTLSATLTTRHVAEIISQGEAGCFMHGPTFMGNPLACAVASASLKLLSESSWQQHIQSIETQLKTELLPLKIHHSVKDVRVLGAIGVVEMKQPVDVASLQRHFVQQGVWIRPFGRLIYLMPPYIIQSEQLSQLTTAIVDAIN

SEQ ID NO: 942 - protein, 215 aa, Desulfovibrio vulgaris subsp. vulgaris str. Hildenborough
MQFFIDTANLDEIREAARLGLVDGVTTNPTLMSREGHDWRDVAAAICREVDGPVSLEAVGNTADELVAMGLELVRFGPNVVVKVPMTTEGLKAVRILSGQGVDCNVTLVFSPMQALLAAKAGAAFVSPFVGRLDALSEDGMQLVAETLTIFRNYAMPTRVIVASIRHPMHVSRAALLGAHIATIPFGVLGQLAAHPLTDAGLAAFDRDWARLNGK

SEQ ID NO: 943 - protein, 437 aa, Thermosynechococcus elongatus BP-1
MAIAIQNAVICTPEGELRQQQVRLEGDRIAEVAETVTVNPSDTVIDATGLTLLPGVIDPQVHFREPGLEHKEDLFTASCACAKGGVTSFLEMPNTRPLTIDQASLENKLARAAAKCVVNYGFFIGATKDNLAVLNTVHPVCGIKIFMGSMHGPLLVDEEPILDRIFSEGKRLIAVHAEDQGRIRARREQFAGITDVAIHSQIQDEIAALNATQLAVTLSRKYERRLHILHLSTGIEVDFLREHKRPWITVEVTPQHLLLTTEAYAKIGSLAQMNPPLRTAVDNKKLWQGLLDGVIDFIATDHAPHTLEEKAQPYPQSPSGMPGVETSLPLMLTQAMAGRCTVPQVVRWMSTAVAAAYEIPNKGKIAPGYDADLVLVDLHTYRPVRREELLTKCGWSPFEGWSLTGWPVYTFVNGEVVFSQGRVNTSVRGRALKFGLG

SEQ ID NO: 944 - protein, 248 aa, Zea mays
  misc_feature (92)..(92): Xaa can be any naturally occurring amino acid
  misc_feature (109)..(109): Xaa can be any naturally occurring amino acid
  misc_feature (147)..(147): Xaa can be any naturally occurring amino acid
  misc_feature (168)..(168): Xaa can be any naturally occurring amino acid
  misc_feature (191)..(191): Xaa can be any naturally occurring amino acid
  misc_feature (216)..(216): Xaa can be any naturally occurring amino acid
  misc_feature (237)..(237): Xaa can be any naturally occurring amino acid
MARSRREGDAGGEERKLVLGKYELGRLLGQGTFAKVYYARDLSAAAGTGSTSVAIKVIDKARLRRMEGMMEQLRREISIMRMVRHPNVVGIXEVLASRSRVFVVMEYAXGGELFAKVARGRLTEDHARRYFQQLVAAVGFCHRRGVXAHRDLKPENLLLDEDGRLKVXDFGLAALPEQLRHDGLLHTQCGXPPAYVAPEVLRKRGYDGARADLWSXAAVVLYVLLCGFLPFQHDNCXKMYPEIFKAEY

SEQ ID NO: 945 - protein, 364 aa, Candidatus Blochmannia floridanus
MNNNTYHIAILPGDGIGPEIMQQAYKILNTVKNKFKINIITTEYKVGGNALDLEGSPLPKDTIKNCEKSNAILFGAVGGPKWNNINETSRPEFGALLTLRKHFNLFINLRPIYLPIELINLSPLKPEIISQGLDMICIRELIGGIYFGKPQGKSGIRSQEHAFDTAIYHRFEIERIAHFAFKLAQKRRKHVTSIDKANVLHTSMLWRKVVSEVASNYPNVHLQHLYVDNASMQLIRNPSAFDVILCPNLFGDILSDECAEINGSIGILPSASLNEHNFGLYEPAGGSAPDIAGKNIANPIAQILSTALLFRYSLKLNHVAITIEKAVYKALTLGYRTQDIAYNKQKSVNTDDMGDIIASLIYKL

SEQ ID NO: 946 - protein, 402 aa, Pseudomonas aeruginosa UCBPP-PA14
MDNLNSAVQVLIHGSNTLFILLGAVMVLAMHAGFAFLEVGTVRLKNQVNALSKILSDFAISALAYFFVGYWIAYGVTFFHPAAALTVDSGYALVKFFFLLTFAAAIPAIISGGIAERARFGPQLCATALIVAFVYPFFEGLVWNGNFGLQEWLKLEFGAPFHDFAGSVVVHALGGWLALAAVLLLGSRNGRYRDGKLVAMAPSSIPFLALGSWILIIGWFGFNVMSAQTLAGVSGLVAVNSLLAMVGGTMASLLIGRNDPGFLHNGPLAGLVAVCAGSDLMHPIGALATGLVAGALFVWAFTATQVRWKIDDVLGVWPLHGLCGVWGGIACGIFGQQALGGLGGVSLASQALGSLLGVTVAFAGGLLVYGLMKALLGIRLSQEEEYYGADLSIHKIGAISHE

SEQ ID NO: 947 - protein, 377 aa, Thermus thermophilus
MEVARGLEGVLFTESRMCYIDGQQGKLYYYGIPIQELAEKSSFEETTFLLLHGRLPRRQELEEFSAALARRRAMPAHLLESFKRYPVSAHPMSFLRTAVSEFGMLDPTEGDISREALYEKGLDLIAKFATIVAANKRLKEGKEPIPPREDLSHAANFLYMANGVEPSPEQARLMDAALILHAEHGFNASTFTAIAAFSTETDLYSAITAAVASLKGPRHGGANEAVMRMIQEIGTPERAREWVREKLAKKERIMGMGHRVYKAFDPRAGVLEKLARLVAEKHGHSKEYQILKIVEEEAGKVLNPRGIYPNVDFYSGVVYSDLGFSLEFFTPIFAVARISGWVGHILEYQELDNRLLRPGAKYVGELDVPYVPLEARE

SEQ ID NO: 948 - protein, 501 aa, Lotus corniculatus var. japonicus
MALPECSAANLAQLIGPNATDAAAVAGFICDQFTAVGQRFSDTAFAVDSTYLLFSAYLVFSMQLGFAMLCAGSVRAKNTMNIMLTNVLDAAAGGLFYYLFGFAFAFGAPSNGFIGRHFFGLKDVPTVAFDYSYFLYQWAFAIAAAGITSGSIAERTQFVAYLIYSSFLTGFVYPVVSHWFWSGDGWASATNTGNLLFGTGVIDFAGSGVVHMVGGVAGLWGALIEGPRIGRFDHAGRAVSLRGHSASLVVLGTFMLWFGWYGFNPGSFTKILSAYDSGNYYGQWSAIGRTAVTTTLAGCTAALTTLFGKRIISGHWNVTDVCNGLLGGFAAITAGCSVVEPWAAIVCGFVAAVVLIACNMLAEKVRYDDPLEAAQLHGGCGAWGIIFTALFAKEEYVNQVYPGKPGRPYGLFMGGGGKLLGAHVIQILVIIGWVSATMGPLFFILNKMKLLRISTEDELAGMDLTRHGGFAYAYEDDESHKPGIQLRKIEPNSSSTPSAES

SEQ ID NO: 949 - protein, 159 aa, Arabidopsis thaliana
MEKTDEERKKAQMLDARARNISHNVRCTECGSQSIEDSQADIAILLRQLIRNEIGAGKTDKEIYSKLEDEFGETVLYAPKFDLQTAALWLTPVIIAGGTAAGIVYQKHRLRKNVDIMALNLIRGVPLTPKERVTILDVLIPPSPPPQGVVSRLRRWLNR

SEQ ID NO: 950 - protein, 142 aa, Brassica napus
  misc_feature (133)..(133): Xaa can be any naturally occurring amino acid
  misc_feature (141)..(141): Xaa can be any naturally occurring amino acid
MTTASVIIIGAGISGITAAKELAEKGVEDVLILEATDRIGGRIQKQSFGDVSVELGAGWIAGVGGKESNPVWELASRLNLRTCFSHYTNARYNIYDRSGEIFPTGFAADSYKKAVDSAIQKLKSLEAECDGKXAEEAPSSXK

SEQ ID NO: 951 - protein, 354 aa, Zea mays
HASAHASAHASAHASDSGRLGEDEARIYFHQLINAVDYCHSRGVYHRDLKPENLLLDSHGTLKVSDFGLSAFAPQTKEDGLLHTACGTPNYVAPEVLADKGYNGMAADVWSCGIILFVLMAGYLPFDDANLMRLYKLICHATFSCPPWFSSGARKFIKRILDPNPDTRIKIAEILEDEWFKKGYKPPHFEQGEDVNLDDVDAAFNDSEDRLVAEKREKPESMNAFALISRSQGFNLGNLFEKEMMGVVKRETSFTSQCTAQEIMSKIEDACGPLGFNVRKQNYKMKLKGDKSGRKGHLSVATEVFEVAPSLHMVELRKTGGDTLEFHNFYKNFSSELKDIVWKAESDASMKQTK

SEQ ID NO: 952 - protein, 360 aa, Synechococcus elongatus PCC 7942
MAVRKLGVLTSGGDCPGLNAVIRAIARHAVGNYGWELWGIAYATQGLLKRQAIALSPHHFDRQSLDPLLCSGGTILGSINRGDTLAHQAEILAGYQELGLDALIGIGGDGSLAILRQLAEAGRWQFIGIPKTIDNDVALTERAIGFDTAIHTVAEALLSLGSTAASHDRIMIAEVMGRQSGHLALQGGIAGGADVILLPEIPYRLLELCHYLQQLRDRWQRRYAVIAIAEGTHHPPEVTQGPGSLGEQLVQAITAQDPTLDARVTVLGHVQRGGNPVASDRLLATQMGYAAVERLAAGASGEMMAWQGGRVVSVPLEAVCLQSPTLVDPHSPLVDTAAGLGIFLGDRSLTPWRGSACPTH

SEQ ID NO: 953 - protein, 155 aa, Glycine max
VGRSLFGGLSNSSPGLFTTLHEMTCKNMFSQQQRTFIQMRTVLKVVDNSGAKKVMCIQALKGKKGARLGDTIIASVKEAHPNGKVKKGKVVYGVVVRAAMQKGRCDGSEVKFDDNAVVLVDKQGQPIGTRVFGPVPHELRQKKHVKILTLAGHNA

SEQ ID NO: 954 - protein, 449 aa, Bradyrhizobium japonicum USDA 110
MSTRTSRVLHRSLRETPPKAIGGEGIYLFAEDGRRVIDASGGAAVSCLGHQHPRVIAAMAKQASTLAYAHTAFFSSEPAEALAETLVGHEPGGLAYAYFVSGGSEAIEASIKLARQYFIERGEPQRQHFIARRQSYHGNTLGALAAGGNAWRRAPYAPLLSAAFSHVTPAFAYHEKHDGESDAQFVARLAAELEAEFQRLGPNSVAAFLAEPVVGATAGAVTAPDGYFRAVREICDRHGALLILDEVMCGMGRTGTTHAWEQEGVAPDIQAIAKGLGGGYQPIGAMLASGRIIDTIRSGSGAFQHGHTYLAHPLACAAALAVQDVIREDGLLDRVKERGKQLEQRLTERFGNHRHVGDIRGRGLFWAIELVADRASRTSFDPALKLNQKIKAEAFANGLGCYPGGGTVDGVRGDHVLLAPPYIASVAEIDLIVDKLGTAVDNVLRSVNH

SEQ ID NO: 955 - protein, 131 aa, Triticum aestivum
  misc_feature (55)..(55): Xaa can be any naturally occurring amino acid
  misc_feature (92)..(92): Xaa can be any naturally occurring amino acid
  misc_feature (107)..(107): Xaa can be any naturally occurring amino acid
  misc_feature (128)..(128): Xaa can be any naturally occurring amino acid
MVLEAVMVVVDNSESSRNGDYTPTRFEAQSDAVSMIFTVITEANPESSVGLMSMXGKGPEVLVTLTTDYGKILEGLHRTKSKIRGEGHLATXIQVAGLTLKHRQNNXQRQLSSFYCNSIPEDEKTLQXGKK

SEQ ID NO: 956 - protein, 311 aa, Saccharomyces kudriavzevii IFO 1802
MLRTTVRTLRQRAFFHRSFVHVNLPELHSAIQDAQTTCYCQSINARLPSTTDPLDPQIKLPHRTPNYNKHVLLVSPGDKLAQPWKIAWNHNLDTNLNRPYNAIGKLRSYLRNSPGILINAVHLQNEFVPRPKEGDKWLFFFVIPDMKLYKIRETDLEEFASFLDEGVVQAPRLSFQDYLIGKAKVPQETQQVHHKNLTKFQGDIFLRDWSLVCGHYKRDAKCGEMGPDIIAAFQDEKLLTDNNLGLISHVGGHVFAGNVIFYKLFKAENALNKLDSLWFGKVYPHNLKLLCENLENGKIIDEMYRGGISMN

SEQ ID NO: 957 - protein, 128 aa, Brassica napus
  misc_feature (10)..(11): Xaa can be any naturally occurring amino acid
MAIATETQHXXREKEASSAAAQKRWNLSDFDIGKALGRGKFGHVYLAREKRSNHIVALKVLFKTQLQESQVEHQLRREVEIQSHLRHPNILRLYGYFYDQKRVYLILEYAARGELYKELQKCKYFSER

SEQ ID NO: 958 - protein, 117 aa, Nicotiana glauca
MAKVALLVVVCMAAVSVMLTPHADAAISCGQVVSSLTPCISYVTKGGAIPAPCCNGIESLNNQATSTPDRQTACNCIKSAAASIKGINFSLAGSLPGKCGVNLPYKISPSIDCSTVQ

SEQ ID NO: 959 - protein, 506 aa, Azotobacter vinelandii
MRYAHPGSEGAIVSYKVRYGNYIAGQFVPPVKGQYFTNSSPVTGEEFTEFPRSTAEDIEKALDAAHAAAGAWGRTSVQERAAVLLKIADRIEQNLEVLAVTETWDNGKPVRETLNADVPLSADHFRYYAGCIRAQEGSAGEINENTVAYHFHEPLGVVGQIIPWNFPLLMAAWKLAPALAAGNCIVLKPAEQTPLSITVLVELIGDLLPPGVLNIVQGFGREAGEALATSKRIAKIAFTGSTPVGAHILKCAAENIIPSTVELGGKSPNIFFEDIMQAEPAFIEKAAEGLVLAFFNQGEVCTCPSRALIQESIYDDFMKVVMKKVGQIKRGHPLDTDTMVGAQASSQQFEKILSYLEIARGEGAEVLTGGAAERLEGSLASGYYIQPTLLKGHNKMRVFQEEIFGPVVGVTTFKDEAEALAIANDTEFGLGAGLWTRDINRAYRMGRGIQAGRVWTNCYHLYPAHAAFGGYKKSGVGRETHKMMLDHYQQTKNLLVSYDINPLGFF

SEQ ID NO: 960 - protein, 117 aa, Nicotiana glauca
MAKVALLVVVCMVAVAVMLTPHADAAISCGQVVTSLTPCINYVRQGGAIPAACCSGIKTLNSQATSTPDRQTACNCIKSAARSISGINFGLASSLPGKCGVNLPYKISPSIDCSTVQ

SEQ ID NO: 961 - protein, 79 aa, Glycine max
NFLYMLDSFGNRSYKPNPRLTRVLDIIFILHAEHEMNCSTSAVRHLASSGVDVYTAIAGAVGALYGPLHGGANEVAISS

SEQ ID NO: 962 - protein, 236 aa, Zea mays
  misc_feature (81)..(81): Xaa can be any naturally occurring amino acid
  misc_feature (170)..(170): Xaa can be any naturally occurring amino acid
SDSDHCHSARYYLKDAVLDGGIPFNKAYGMTAFEYHGTDPRFNRVFNEGMKNHSVIITKKLLDFYTGFEGVSTLVDVGGGXVGATLHAITSRHPHISGVNFDLPHVISEAPPFPGVRHVGGDMFASVPAGDAILMKWILHDWSDAHCATLLKNCYDALPEKGGKVIVVEXCVLPVSTEAVPKAQGVFHVDMIMLAHNPGGRERYEREFRDLAKAAGFSGFKATYIYANAWAIEFIK

SEQ ID NO: 963 - protein, 117 aa, Nicotiana glauca
MAKVALFVVVCMAAVAVMLTPHADAAIFCGRVVSSLIPCINYVIKGGAIPAPCCNGIKSLNNQATSTPDRQTACNCIKSAAASIKGINFSHAGSLPGKCGVNLPYKISPSIDCSTVQ

SEQ ID NO: 964 - protein, 102 aa, Glycine max
  misc_feature (65)..(65): Xaa can be any naturally occurring amino acid
EFGTRQLHSIFLHVRKVRRMAGVRDAKSILVRLEWFLNWVTFFVARSAPHILITAKLVKDAHKFXKGMELPLALCGQGGDDFAYTGLGIGLLKTLRERENPR

SEQ ID NO: 965 - protein, 112 aa, Nicotiana glauca
MAKVALLVVVCMVAVAVMLTPHADAAISCGQVVTSLTPCINYVRQGGDIPTACCSGIKTLNSQATSTPDRQTACNCIKSAAGSISGINFGLASSLPGKCGVNLPYKISPSID

SEQ ID NO: 966 - protein, 363 aa, Geobacter sulfurreducens PCA
MARKVGILTGGGDCPGLNAVIRGVVKSSIIRRGWEVVGIRDGFDGLLYNNRIVPLGLNEVRGILPRGGTILGTSNRGNPFSYPVEADGKTVLTDVSDEVVANIKKQGIDALVAVGGDGSLKIALELMNKGIPVVGVPKTIDNDLMETDVTFGYNTALETATDALDKLHSTAESHHRVMIMEVMGRYAGWIALESGISGGADVILIPEIPYDISAVCRAVDERRRRGSSFSIIVVAEGAFPRGGNRVVQKRADETNTIERLGGIGQYVARQLGDCLDMDVRVMVLGHLQRGGSPSTFDRCLGSRFGVAAIDLIEQEQYGRMVCLRGRDIKSVSIERAVRKLKLVNPGGQMVTAAEELGIVVGRR

SEQ ID NO: 967 - protein, 190 aa, Microbulbifer degradans 2-40
MKKSFIRAFANTAITAVAFSVSCAVYAGSLVLTSSDIGDGKHMAKTQEYTGFGCAGGNLSPQLSWRGAPEGTKAFALLVHDPDAPTGSGWWHWQVVNIPAGTTSLPAGAGAVNSKLLPKGASQNTNDYGEKAFGGACPPVGHGVHRYRFTLHALSKPLELPENASAALTGYMVKAHTIEEATIEALYKRD

SEQ ID NO: 968 - protein, 490 aa, Bacillus subtilis subsp. subtilis str. 168
MSQTLFIDGEWISAEKEQIRSIINPFNQEEIATVSEGGREDAIKAIAAARRAFDKGEWSSLSGLERGKIVLKIAELIRRDLEELAELESLDTGKTLEESKADMDDIANVFQYYAGLADKDGGEIISSPIPDSESKIIREPIGVCGQITPWNYPLLQASWKIAPALAAGNTIVMKPSEITPLTTIKVFKLMEEAGVPKGVANLVLGPGATVGDELAVNKDVDLISFTGGIETGKKIMRAASGNVKKIALELGGKNPNIVFKDADLEVAVDQALNAVFFHAGQVCSAGSRLLVEDAIHDQFLAELVKRAKRIKLGNGFHAETESGPLISAEHRAKVEKYVEIGIEEGAKLETGGKRPEDPELQNGFFYEPTIFSNCNSDMRIVQEEVFGPVLTVETFSSEEEVIELANDTIYGLAGAVWSKDIEKCERVAARLRMGTVWINDFHPYFAQAPWGGYKQSGFGRELGKIGLEEYTEVKHVYRNTKPAAVNWFNS

SEQ ID NO: 969 - protein, 157 aa, Griffithsia japonica
MSATKLSDLQGLKDIEGGAIDPSRFAGKVVFAMNVASACGYTKPGYELLKRLTDKFAPADFVAVAIPCNSFLWQESGSAEDVKTFALARADKLLVTEKAAVNGNHPHPIVALAKQAFPGRVMWNFDGRFVFDRNGVPVARFGNSAKPEEIEAAIANA

SEQ ID NO: 970 - protein, 323 aa, Mesoplasma florum L1
MKRIGVLTSGGDAPGMNNAIAGVVKAAEAQGIEVYGVRDGYKGLINGWFEKLDSKFALEIISKGGTVLGSARLPEFKEESVRQKAVDQLKAHDIEALVVIGGDGSYMGAQRLTEMGINCIGLPGTIDNDIVSSDYTIGFDTALNTVIESVEKVRDTMQSHNRAAVIEVMGNGCGDLVTYAAIATQAEIFSPSESKLTVEQICEQAKKFAEANHRSLIILISEKQLDANELAKKVEEASGYVTRATILGHVQRGGRPSGMDRYLAFTAAIYAVEKLIEGKGGLYIGLSENKLVARDIESTLNMPKPDKTEFIEKIRLLNAKISK

SEQ ID NO: 971 - protein, 278 aa, Glycine max
  misc_feature (224)..(224): Xaa can be any naturally occurring amino acid
  misc_feature (238)..(238): Xaa can be any naturally occurring amino acid
  misc_feature (274)..(274): Xaa can be any naturally occurring amino acid
MVSSKPSGFYEQRSFPSIKILILILLNSILHKANSGCSNSVSNSLVPFLSHEILSSLQTLPLDGHFSLRDNEDAAKDFGNIHHFPPLAVLYPKTVSDISLTIKHVFEMGFAAQLKIAARGHGHSLQGQAQVHGGLVINMESLQGPEMKVHNGELPYVDVSGGELWINILHETLKLGLAPKSWTDYLHLTVGGTLSNAGISGQAFKHGPQINNIFQLEVITGKGXVVTCSGNRNADLFXGVLGGLGQFGIITRARISLEPAPKMVKWIRVLYFRXLYIT

SEQ ID NO: 972 - protein, 508 aa, Bifidobacterium longum NCC2705
MKNKVQLITYADRLGDGTLSSMTDILRTRFDGVYDGVHILPFFTPFDGADAGFDPIDHTKVDERLGSWDDVAELSKTHNIMVDAIVNHMSWESKQFQDVLEKGEESEYYPMFLTMSSVFPNGATEEDLAGIYRPRPGLPFTHYKFAGKTRLVWVSFTPQQVDIDTDSDEGWEYLMSIFDQMAASHVSYIRLDAVGYGAKEASTSCFMTPKTFKLISRLREEGVKRGLEILIEVHSYYKKQVEIASKVDRVYDFALPPLLLHSLFTGHVEPVAHWTEIRPNNAVTVLDTHDGIGVIDIGSDQLDRSLKGLVPDEDVDNLVNTIHANTHGESQAATGAAASNLDLYQVNSTYYSALGCNDQHYLAARAVQFFLPGVPQVYYVGALAGRNDMELLRRTNNGRDINRHYYSTAEIDENLERPVVKALNALAKFRNELSAFDGEFSYEVDGDTSITFRWTAADGASTAALTFEPGRGLGTDNATPVASLAWSDAAGDHETHDLLANPPIADID

SEQ ID NO: 973 - protein, 217 aa, Aquifex aeolicus VF5
MKFFLDTANVEEIKKAMEWGILDGVTTNPTLISKTGRPFKEVVKEILELVDGPVSLETVSLDAEGMIREGRMLAELGENVVVKIPMTPEGLKAVIALESEGIPTNVTLVFSPTQALLAAKAGASYVSPFVGRLDDISGEGMKLIEEIKTIFSNYEFDTEIIVASVRHPMHVLESALIGADICTMPFKVMEQLFKHPLTDIGLERFLKDWEKVPEKPF

SEQ ID NO: 974 - protein, 307 aa, Nanoarchaeum equitans Kin4-M
MKPVRDLNVNKNTTIEELIKQFSSIGGFQAQELYRGYEILKEMFDNAEYKILSFPADIIATGIRGIIKELIKRKMFDLVITTCGTLDHDLARLEKDYYLGYFEADDIELREKNIFRLGNIFIPEENYGLAIENILKKALPYIYNKKKELSTYEFVWLLGEYLENHPKKEESIIYWAYKNRIPIIIPGITDGAVGTQILLFRQEHRDFNVNVWLDEEFLLNQFFGDKNIGALMLGGGISKHHTIWWAQFSNGLKYAVYVTSAVELDGSLSGARTREAISWGKIDKKAKHVTIWGDVTIILPLLVGPFL

SEQ ID NO: 975 - protein, 142 aa, Triticum aestivum
  misc_feature (87)..(87): Xaa can be any naturally occurring amino acid
  misc_feature (92)..(92): Xaa can be any naturally occurring amino acid
  misc_feature (102)..(102): Xaa can be any naturally occurring amino acid
  misc_feature (104)..(104): Xaa can be any naturally occurring amino acid
  misc_feature (112)..(112): Xaa can be any naturally occurring amino acid
  misc_feature (119)..(119): Xaa can be any naturally occurring amino acid
  misc_feature (122)..(122): Xaa can be any naturally occurring amino acid
  misc_feature (125)..(125): Xaa can be any naturally occurring amino acid
  misc_feature (134)..(134): Xaa can be any naturally occurring amino acid
  misc_feature (141)..(141): Xaa can be any naturally occurring amino acid
MAPAVMASSATTVAPFQGLKSTAGLPVGRRSSGSLSSVSNGGRIRCMQVWPIEGIKNSETLSYLPPLSTGGLPGNRSDYLDSAQKWXPCLRXNKFGFLFPLXNXPPGYYDGXRYWDMLXLPXFRXTGPTQVLNXVEESKKXT

SEQ ID NO: 976 - protein, 484 aa, Escherichia coli
MSDMEPKTKKQRSLYIPYAGPVLLEFPLLNKGSAFSMEERRNFNLLGLLPEVVETIEEQAERAWIQYQGFKTEIDKHIYLRNIQDTNETLFYRLVNNHLDEMMPVIYTPTVGAACERFSEIYRRSRGVFISYQNRHNMDDILQNVPNHNIKVIVVTDGERILGLGDQGIGGMGIPIGKLSLYTACGGISPAYTLPVVLDVGTNNQQLLNDPLYMGWRNPRITDDEYYEFVDEFIQAVKQRWPDVLLQFEDFAQKNAMPLLNRYRNEICSFNDDIQGTAAVTVGTLIAASRAAGGQLSEKKIVFLGAGSAGCGIAEMIISQTQREGLSEEAARQKVFMVDRFGLLTDKMPNLLPFQTKLVQKRENLSDWDTDSDVLSLLDVVRNVKPDILIGVSGQTGLFTEEIIREMHKHCPRPIVMPLSNPTSRVEATPQDIIAENKPPFSVFRDKFITMPGGLDYSRAIVVASVKEAPIGIEVIPAHVTEYL

SEQ ID NO: 977 - protein, 481 aa, Escherichia coli
MEPKTKKQRSLYIPYAGPVLLEFPLLNKGSAFSMEERRNFNLLGLLPEVVETIEEQAERAWIQYQGFKTEIDKHIYLRNIQDTNETLFYRLVNNHLDEMMPVIYTPTVGAACERFSEIYRRSRGVFISYQNRHNMDDILQNVPNHNIKVIVVTDGERILGLGDQGIGGMGIPIGKLSLYTACGGISPAYTLPVVLDVGTNNQQLLNDPLYMGWRNPRITDDEYYEFVDEFIQAVKQRWPDVLLQFEDFAQKNAMPLLNRYRNEICSFNDDIQGTAAVTVGTLIAASRAAGGQLSEKKIVFLGAGSAGCGIAEMIISQTQREGLSEEAARQKVFMVDRFGLLTDKMPNLLPFQTKLVQKRENLSDWDTDSDVLSLLDVVRNVKPDILIGVSGQTGLFTEEIIREMHKHCPRPIVMPLSNPTSRVEATPQDIIAENKPPFSVFRDKFITMPGGLDYSRAIVVASVKEAPIGIEVIPAHVTEYL

SEQ ID NO: 978 - protein, 324 aa, Triticum aestivum
  misc_feature (208)..(208): Xaa can be any naturally occurring amino acid
  misc_feature (238)..(238): Xaa can be any naturally occurring amino acid
  misc_feature (282)..(282): Xaa can be any naturally occurring amino acid
  misc_feature (287)..(287): Xaa can be any naturally occurring amino acid
  misc_feature (291)..(291): Xaa can be any naturally occurring amino acid
  misc_feature (297)..(297): Xaa can be any naturally occurring amino acid
  misc_feature (309)..(309): Xaa can be any naturally occurring amino acid
  misc_feature (315)..(315): Xaa can be any naturally occurring amino acid
  misc_feature (317)..(317): Xaa can be any naturally occurring amino acid
  misc_feature (319)..(319): Xaa can be any naturally occurring amino acid
  misc_feature (322)..(323): Xaa can be any naturally occurring amino acid
MKTLFILTILAMATTIATGNMQVDPSGQVQWPQQQPFRQPQQPFYQQPQQPFLQPQQAFPQQPQQPFPQTQQPQQPFPQQPQQPFPQTQQPQQPFPQQPQQPFPQQPQQPFPQTQQPQQPFPQQPQQPFPQTQQPQQPFPQFQQPHQPFPQPQQQFPQPQQPQQSFPQQQRPFIQPSLQQRLNPCKNILLQQCKPASLVSSLWSIIWXPQSDCQVMQQQCCQELAQIPQQLQCAAIHXVVAFYHRASSKQQQQQQQQQQQQQRDCISCCQLSQQQQLGQGTXVQGQXIIQXPQQLSXQLGGIRSMGGCXLLPTMXNXVXPTXXS

SEQ ID NO: 979 - protein, 448 aa, Escherichia coli
MEERRNFNLLGLLPEVVETIEEQAERAWIQYQGFKTEIDKHIYLRNIQDTNETLFYRLVNNHLDEMMPVIYTPTVGAACERFSEIYRRSRGVFISYQNRHNMDDILQNVPNHNIKVIVVTDGERILGLGDQGIGGMGIPIGKLSLYTACGGISPAYTLPVVLDVGTNNQQLLNDPLYMGWRNPRITDDEYYEFVDEFIQAVKQRWPDVLLQFEDFAQKNAMPLLNRYRNEICSFNDDIQGTAAVTVGTLIAASRAAGGQLSEKKIVFLGAGSAGCGIAEMIISQTQREGLSEEAARQKVFMVDRFGLLTDKMPNLLPFQTKLVQKRENLSDWDTDSDVLSLLDVVRNVKPDILIGVSGQTGLFTEEIIREMHKHCPRPIVMPLSNPTSRVEATPQDIIAENKPPFSVFRDKFITMPGGLDYSRAIVVASVKEAPIGIEVIPAHVTEYL

SEQ ID NO: 980 - protein, 243 aa, Zea mays
MDWDAPALTSFVADLSFRHLCCYGAGIAGNAFAFVLFVSPLPTFKRIVRNGSTEQFSCTPYIYSLLNCLICMWYGLPFVSYGVVLVATVNSIGAVFQLAYTAVFIAFADAKQRLKVSALLAAVFLVFGLIVFVSLALLDHKARQVFVGYLSVASLVCMFASPMSIVNLVIRTKSVEYMPFYLSLSMFLMSASFVIYGVLLGDGFIYIPNGIGTILGIVQLLLYAYIRKGSSEEAKLPLLITHT

SEQ ID NO: 981 - protein, 213 aa, Glycine max
MALEVAVKAAVGAPNVLGDCPFSQRVLLTLEEKKIPYKLHLIDLSNKPEWFLGVNPEGKVPVVLFDGKWVADSDVIVGILEEKYPEPSLITPPEFASVGSKIFGSFVSFLKSKDTNDGTEQALVAELSALDEHLKTHGPYIAGEKVTAVDLSLAPKLYHLVVALGHFKNWNIPESLVHVHNYTKLLFSRESFEKTKPPKEEYVIAGWAPKVNA

SEQ ID NO: 982 - protein, 122 aa, Huperzia lucidula
MIQPQTYLNVADNSGAKKPMCIRILKASNRKYANTGNVIVAVVKEAVPNMPLRKSEIVRAVVVRTCKELKRNNGMIIQFDDNAAVIINQEGNPRGTRVFGPVARESREFNFTKIVSLAPEVL

SEQ ID NO: 983 - protein, 125 aa, Thermus thermophilus HB27
MALDIERIKEELSQATVLELKQLIDALKEAWGVTAAAPVAVAAAPAAGAAAAPAEEKTEFDVILKEAGAKKLEVIKELRAITGLGLKEAKDLAEKGGPVKEGVSKQEAEEIKKKLEAVGAVVELK

SEQ ID NO: 984 - protein, 175 aa, Glycine max
MEAVGSRLSRASSRYGAPTVFSGPVRKWKKKWVHVTPSSLPNNSSHSHTNNSTTTSSASSRLLLRRWTPATVDDAAGAVSDEPPRRKFRYTPVVVLEEQKKMNVVKAEHEPTIETDQLAARKTNVTHEMQGKLNMNEMLEETKDSNIGNLDLGSDFQSNTGGNSQNSDAQLENSM

SEQ ID NO: 985 - protein, 148 aa, Brassica napus
MAGGTALTPTSVGSKSLLPLRNHEAAERVNNNNNNNSLKALPKAVQPVSSIDGGMVKRPRGRPAGSKNKPKPPIIVTHDSPNSLRAHAVEISSGNDICEALSDYARRKQRGLCILSANGCVTNVTLRQPASSGAIVTLHGRFEILSLL

SEQ ID NO: 986 - protein, 247 aa, Zea mays
  misc_feature (25)..(25): Xaa can be any naturally occurring amino acid
  misc_feature (135)..(136): Xaa can be any naturally occurring amino acid
  misc_feature (163)..(163): Xaa can be any naturally occurring amino acid
  misc_feature (174)..(174): Xaa can be any naturally occurring amino acid
MYRAKRAALSPKVKRRVGKYELGRXIGEGTFAKVRFAKNTENGEPVAIKILDKEKVKRHRLVEQIKREICIMKLVRHPNVVRLFEVMGSKARIFIVLEYVTGGELFEIIATNGRLKEDEARKYFQQLINAVDYCXXRGVYHRDLKLENLLLDAAGNLKVSDFXGLSALTEQVKXDGLLHTTCGTPNYVAPEVIEDGGYDGATADIWSCGVILFVLLAGYLPFEDDNIIALYKKISEAQFSCPSWFSR

SEQ ID NO: 987 - protein, 506 aa, Crocus sativus
MVSTGCSGNGAKGTNGGIVVPEIKFTKLFINGEFVDSVSGSTFETRDPRNGDVIANIAEGDKEDVDLAVKAAREAFDHGKWPRMSGYERGRIMMKFADLIEAFIEELAALDTLDAGKLLSMGKAVDIPAAVHIIRYYAGAADKIHGYTLKLSSELQGYTLKEPIGVVGVIIPWNFPTTMFFLKVSPALAAGCTMVVKPAEQTPLSALYYAHLAKLAGVPDGVINVVPGFGPTAGAALSSHMDVDSVAFTGSAEIGRAIMESAAKSNLKNVSPELGGKSPMIVFDDADVDMAVSLNSLAVFFNKGEVCVAGSRVYVQEGIYDEFVKRAVEAARSWKVGDPFDQSRNMGPQVDKDQFESVLKYIEHGKSEGATLLTGGKPAADKGYYIEPTIFVDVTEDMKIAQEEIFGPVMSLMKFKTVEEGIDCANNTKYGLAAGILSQDLDLINTVSRSIKAGIIWVNCYFGFDLDCPYGGYKMSGNCRESGMDALDNYLQTKSVVMPLHNSPWL

SEQ ID NO: 988 - protein, 576 aa, Triticum aestivum
LLPGGPAAGGGVEDKYGEDRATEELPVTPWAFSVASGYTLLRDPHHNKGLAFTERERDAHYLRGLLPPGVVSQDLQVKKIMHNLRQYKVPLQRYVAMMDLQERNERLFYKLLIDNVEELLPVVYTPTVGEACQKYGSIFRRPQGLYVSLRDKGKVIDVLRNWPERNIQVIVVTDGERILGLGDLGCQGMGIPVGKLSLYTALGGVRPSACLPITIDVGTNNEQLLNDEFYIGLRQRRATGEEYHELMEEFMDAVKQIYGEKVLIQFEDFANHNAFDLLAKYSKSHLVFNDDIQGTASVVLAGLLSSLKVVGGTLAEHTYLFLGAGEAGTGIAELIALEISKQTNAPIEECRKKVFLVDSKGLIVSSRKNSLQPFKTSWAHEREPVTTLLDAIKSIRPTVLIGTSGVGRAFTKEVIEAMASFNERPVIFSLSNPTSHSECTAEEAYKWTQGRAVFASGSPFDPVEYDGKIRVPGQANNAYIFPGFGLGVVISGAIRVHEDMLLAASETLAAQATQENFDKGSIFPPFTNIRKISALIAASVAAKAYELGLATRLPRPRDLEKYAESCMYTPVYRSYR

SEQ ID NO: 989 - protein, 391 aa, Bordetella pertussis Tohama I
MTVRTVRIAGGRLIDPASGADARADLYLADGRIAAIGQAPAGFQAQQHIDARGLAVLPGLVDLSARVHGAGLAPLACEMQAALAGGVTRLVVPPDTDPPLDEPGRVEMLRHRAHQAGQAQLHPLGALTEGLRGERLSEMAALAEAGCVAFSQAGLPVADTRVLWRAMQYARTFGLALWLRPLDPWMGRDGVAAAGAYASRLGLAEVPVQAETLALHTIFELQRATGARVHLMRLSSAAGVALVRAARREGLPLTCDVAAHQIHLTDVDIGFFDSRFRLDPPLRGQRDRDAIVAGLADDTIDAICSDHRPVGDTGKLLPFAEAEAGASGLELLLSLTLKWAQRERVPLARALALVTSAPAAILRAATAAPPPCGELAAGAPADLCLVDLDAD

SEQ ID NO: 990 - protein, 1320 aa, Candida albicans SC5314
MKSQSTDTLQPRISSDSLVYSSSSSSSNVYSQPKLPFARSYSSIPEQVHDPGSRQSSKNSNTNFSFSEHDDSIQEFLISPIQSDIFPYSKKPVISPVLESPEAGGDSTIVETSSPSPTKSGTVSLNSNAIGSIIGSYDYSKSSLELEKPKPVEEPVFQKDHARDHARQGSDASTISNGSEQVSKDKRFVRYAMNTQSPLVNASNKWQISNVIKWLDKNQFNNSWKETFRRNEISGNRFLELENFDKESMIWKQFSKFLQLDDDLNSVDRFIELLRKESSHELQTRKSLGGGEISPINVKHENRKSTPIYTKHMSTSSVSSSNSSSSISRPLSYVDSKPKEQLSSPSHHSFFRKHSRSTSNESKDAKKRYSSFDDNRVKSVPKNDKKSNGILSTLRKYGGDKIAKNTKQRSSTYFPSLDLPPPLESDPPAYNERKISVDSELSPKSIKSFSDDLSIDPKYLPTQHQELDLRKFHDCEPITILASKDNISFVPIVITELSNAKSHIIKALGLIDIGSITLHLTDFFHKEGEAIPDFLIPKVLKLDGLLKFYVRQELKSPEGTTTTFSTTSSDSKSYIADGNKTYPETPQYLLQAQHDSRVDYWNFKDLTSISEDPSKSLAGAKQNIDSKRNDTKQKPKEFPLKFPFANAPKKGNTVPQLQIDTSGVNNISKPPTSTGSTFQVLRKKGHEIDFDKRRKSPYESKTPKIIANIYSSSVANTKKSPISASTVMALKDDVVVQRPETISRSNSIIAKRTAPPPPGDRRVQIQRQNSILRRKPGLKSTNNVTSGSSEGSKKNISDSTDDNDSEDAFFVKPLKKKENELGNNSDNNSENDEDNDSDDDFFVKPIKKEVADVSAGKVELDDSEEDFFVKPIHKKPSHMNVRPPVEEVYNNLEKYFPYTNLDKPIIDDSPASPSPQRRPTISRTFSSANKSPVAPTSADSKNTNDEQPSLRVRRMKTIRGVANEARRKVLQMKQASPPNTFANITRENSAKLTRSNTKMWGQRVVEVTSQEIEKGFVSKLRNKNGLYQEYAWIKGELIGRGSFGDVYLGLNVTTGEMLAVKQVVCGRNNKEGIEALHKEVETMKDLNHMNIVQYLGYDQQKNIYSLFLEYVAGGSIALCLKSYGKFDETLIRFITKQILLGLEYLHSNNIIHRDLKADNLLLEVDGTCKISDFGISKRSNDIYANNANMSMQGTIFWMAPEVIDSMVEGYSAKIDIWSLGCVVLEMFAGKRPWSNEAAISVIYKTGKEKLAPPIPDDIAHLVSPVAESFINRCFTIDPKDRPTAGELLNDPFVNTLDHDFNFANTKLAEMIRYNSKRLFT

SEQ ID NO: 991 - protein, 380 aa, Desulfovibrio vulgaris subsp. vulgaris str. Hildenborough
MRKTVYWIEGDGIGPEVWKAARPVIDAAVEKSYGDSRSIEWKELLAGEKAHRETGEYLPQSTLDTLATAELAIKGPLGTPVGKGFRSLNVTMRQTLDLYACIRPIRYFDGIMSPVKRPDLVDMVVFRENTEDVYAGIEYRAGTPEAKRLIAFLRDELGAKVDIEAAVGIKPMTEKGSKRLVRRALRFAIDQKRPNLTLVHKGNIMKFTEGGFREWGYEVARDEFADLTTTETEGTAGRLVVKDRIADAMFQEVLIRPQQYSVIATSNLNGDYISDALAAQVGGLGLAPGVNMSDSLAFFEATHGTAPTIAGQDKANPGSLILCGALMLEHMGWNEAAERIYKAVNEAIASRRVTVDLATQMENATTVGTVAFGDIVTAGL

SEQ ID NO: 992 - protein, 483 aa, Ralstonia sp. U2
MKTKLFINNTWSASSDKKSFDRKHPVSGEVVTQCANATVDDAVNAARAAQEAFKSWKAVGPSERRRLLLKVADVMESKTPEFIEVMAKEVGASALWAGFNVHLSANVFREAASLATQIQGETIPTDKPDTLSMTLRHAVGPILSIVPWNGTAVLAARAIAYPLVCGNTVVFKGSEFSPGTHALITKCLQEADLPAGVLNYLNSSPDRSPDIADALISSKEIRRINFTGSTRVGRIIAQKSAQHLKRCLLELGGKSPLIVLDDADIDAAVKAAVFGSFLFQGQICMSTERLVVDEKIADEFVAKFVEKTKQLSAGDPCVTGDCIIGPMVSPNSGDRINGLFKDAISKGAKVVCGGIAEGAVMPATILDHVTADMQIYDEETFGPITVVIRCKSEADAIRIANDSAYGLSSGVFGRDVNRALRVGMAIEYGSVHINGSTVQNEAQAPYGGTKATGYGRFDGRAVIDEFTELKWLTIEPFEQQYPF

SEQ ID NO: 993 - protein, 477 aa, Gibberella zeae PH-1
MEFIAAGTAWALNRAPSPQKILSRLGLASLVVTNTWSELSSKLSPNASIVFPDDPEFSGLVSRWRDWHAPQVGAVVTAFTENDVQEAVIYANRNGIPFLARSGGHGATEALQLAKDALVVDIRGMNDIKVAPDGNYATISGGASVKKVVNELWTSKKQTVTGICECVGISAPVLGGGHGWLQGQYGLASDQVISARVVLPNGEAVTASEESNPDLFWALRGAGHNFGIVTEWEYRIYDVKNPNWSYEIFIFLGDKLEEVLELTNKMMKTQPPEIIHWIPVNEAREYAKPLHEMGPLNVNAGAVPMPELAHITLMSEDTVGCTKGFTGLRYPIGLKKYDPPAVRQVYDSIAEISHRIPELAGSFFLLEGYSTHGVKAVDASESAFPHRDDEILVTSYVLYKPNATLDSLAQEHGEKLRGLLQEASDEPERLRAYVNYAHGVESLESMYGYEPWRINKLKALKKKWDPENRMRFYAPIV

SEQ ID NO: 994 - protein, 301 aa, Triticum aestivum
  misc_feature (63)..(63): Xaa can be any naturally occurring amino acid
  misc_feature (200)..(200): Xaa can be any naturally occurring amino acid
MDSLSLYEISCFAAGFAGNLFAFALFLSPVPTFKRILKAKSTEQFDGLPYLLSLLNCFICLWXYGLPWVSDGRLLVATVNGTGAAFQLAYISLFFIYADSRKTRLRMVGLLVLLVCAFALVAHASIAFFDQPTRQQFVGAVSMASLISMFASPLAVMGVVIRTECVEFMPFYLSLSTLLMSASFAVYGLLLRDLFIYLPXGLELSWEQRSWHSTLTTAGNGDARIHLRRCLPDQTSSDQFSVLAWLERAGVGFCRRELYAPALFSPVDAESVCTDLLAYASVYMLLKYHSFPEECRGGYFV

SEQ ID NO: 995 - protein, 76 aa, Glycine max
MVGIGVPICVQCGNTSNPCRCKVVGPTLGFLAFAAAAVVEWPVGALVYCFRHTKGRKIMGHPATVIYPSVTNAIPI

SEQ ID NO: 996 - protein, 326 aa, Triticum aestivum
  misc_feature (116)..(116): Xaa can be any naturally occurring amino acid
MKLQTEAAAAAGGEGKLMIRQVWANNVESEFQAIRQVAERFPYVSMDTEFPGVIHCPSKHHATLTPSERYAALKANVDALHLIQVGLAFAASPDAAPAVAFEINLREFDPRVHRHXPASVALLAGHGLDFAKQRRGGRGRARVPRRCSCRRGWCRSGASAPTCVTFHSAYDFGYLVKLLMGRKLPRTLTEFLGLVRVFFGDEVYDARHVMDSCAGLYGGLDALAAQLGVKRAAGMSHQAGSDAALTWDVFRRIREVYFAGNSRQGQGQGVGNFAGVLYGLDLELHLAAPADNGNGNGNRNNNKNKCGSGNGAGGRGNNRRAVAALR

SEQ ID NO: 997 - protein, 459 aa, Mesorhizobium sp. BNC1
MSDFDVVVTGRVVTTDRVYEDGYVAIRGGLVERVGSGTPPAAREKYDFDGDYILPGAIDAQVHSRSQLDQEDFLWSTRSAAAGGVTTIVDMPYDEGFLVCTGERLQRKAEEAAQQSRVDFALYGTVRAQDGAREIAGMVEAGAIGFKFSTFETDPERFPRIGPAILHECFSEIGRYGLIAGIHNENDEMVRHALAQVAASGITDYRAHAMSRPAAAETLAMAEAYELGAQAGCSTHVVHCSVGRGYELCAGYRAQGFDTTVEACIHYLTLDEEDHVRRFGGMAKINPPIRPRREVEALWRHLAAGNVTVVSTDHVSWSIDHKRNPEMLKNKSGVPGLEVLYALLMKGLAERGLPMTWAARLLAANPARLFRIGHRKGALEPGRDADIVVMRHDPRRYDPAASGNNFVDWSPYEGMELPFRPVATFLRGRVVFDGSAVVAPSGTGTFIRPRGANAIQIGA

SEQ ID NO: 998 - protein, 1082 aa, Magnaporthe grisea 70-15
MIQKYGGHAVKFSFSNSPLDNIFGLRFAWEFYRHGRRDEYLKFTHRSFAQSGAGRANPYTYEVNLGGVRTIWTADPENIKAMLGSQFEDYGRGKAFQSRWHDLLGTGIFNADGREWHDSRHRLRPLFNRQRVSNLDSFERQIQIMINRHLGGGRTVDLKDVISRFALDAIGDYAMGFQVNALADRKNDFLDALERIKTIQNIKECAGPLSWLVPTPGFKRDLKVLDDFMEPLIEHAASLPQSVLDEMEKTDHGWTYVKACASVSRDRHFLKYELMSVILAGRDTVSGTLVWTFLELVKRPDLMADLRREIENTVGIGRDAPRPTHDDLRSMRLVKNTLNETLRLYPTVSLNLRTALRDTSLPRGNDHDGNKPVGLAEGTPVIFSSHILQLSPETYEQSPPGTSPPHVFDPYRWEEWKPKPWTYIPFGGGPRICIGQEFALAEMAFLLVRLLQNYSRLEMRCEMRGNSDEGWERPNGSASIVEQFMMEKGRVRISGDVTLSPRDKDSQLVKIISTKPTMIVTIPVLLATYILYWTVRLVKNILRANATGLPVRWTPVAPTNPFWIVLGKPTSRVLRAILPSFLSNWTYFSTFDWHWLDRLYLDFEVHEKNGDTFLHATPSGLMLHTRDPQVAQQILHTCPKPDDVAKSLELCGPNLVSSSEVDWPRHRKVTVSTLSDRNNRLVWSETVRQTLNVLQSYQPGHGEIIDPEGDIRRIYLNMFSAVCFGRPLDAEKEPGETTDGKLPGGHKRSYRYCLETSLRDIFILHTVPSWIKYLPPALVPHKISEFFAASREMMQYLDEMIRRCQDEAQEGGEESKSGDNLLRITVRSGLQSNTKEPQGRSYLSKEEVRGNLLIYSLAGHESNAHTLTYALYLLAACPDVQDWLAEELAAITLLDGQLSAEETYFGIMAKLPRTLAVMYETLRLYPSIIFLPKTTASRSVSIDLGHVEGQSKAIIPPNTNIWVNMCGMQVLPEVWGDDARTFRPSRWINSSGQLAAPSLVAGSAYVAWGGGKRVCPGQRFSQAAFAASVVALLTGGKRVHVVPREGEEEGMARRRVLEVLDDSFVGTTIHMRRAGDVKLVVA

SEQ ID NO: 999 - protein, 433 aa, Escherichia coli
MVETIEEQAERAWIQYQGFKTEIDKHIYLRNIQDTNETLFYRLVNNHLDEMMPVIYTPTVGAACERFSEIYRRSRGVFISYQNRHNMDDILQNVPNHNIKVIVVTDGERILGLGDQGIGGMGIPIGKLSLYTACGGISPAYTLPVVLDVGTNNQQLLNDPLYMGWRNPRITDDEYYEFVDEFIQAVKQRWPDVLLQFEDFAQKNAMPLLNRYRNEICSFNDDIQGTAAVTVGTLIAASRAAGGQLSEKKIVFLGAGSAGCGIAEMIISQTQREGLSEEAARQKVFMVDRFGLLTDKMPNLLPFQTKLVQKRENLSDWDTDSDVLSLLDVVRNVKPDILIGVSGQTGLFTEEIIREMHKHCPRPIVMPLSNPTSRVEATPQDIIAENKPPFSVFRDKFITMPGGLDYSRAIVVASVKEAPIGIEVIPAHVTEYL

SEQ ID NO: 1000 - protein, 81 aa, Zea mays
  misc_feature (25)..(25): Xaa can be any naturally occurring amino acid
  misc_feature (55)..(55): Xaa can be any naturally occurring amino acid
YRRLKHTGPDWTDLYHHEDNFLAHXRLADGSPLYVDQPVFNKDSTDVVVANGEIXNHRNGLRQLTGPHIIKTGSHCEVIIP

SEQ ID NO: 1001 - protein, 144 aa, Brassica napus
  misc_feature (132)..(132): Xaa can be any naturally occurring amino acid
MDDYRDRISRLPDDFLLQILSRLPTKDVVAMSLLSKRWRFLWTLVPKLNFDLRLHDNTCPKFTKFVDRSLLLHKAPTLESLRVKIGSICHNADVDVGVWVRIAVDRGVRELDISYCPAEEPIRLPKCLFPCXTLVVLKLENMEP

SEQ ID NO: 1002 - protein, 480 aa, Azoarcus sp. EbN1
MKEYKLFIDGEWVGSSTETILDDLNPATSEVWGRVHQASAADLERAIAAAYRARESWGNTLANEREAILLRAADALQKRIPDVAAVLIDEAGSTYGKAMFEASFVVNLLRSAAGECRRITGETMPSDSPGVFSMSVRRPLGVIAGIAPFNFPFLLATKKVALALAAGNTFILKPASYTPVTGLKIAEIFEAAGLPKGVLNVVPVQGSVLGNTFVADPRVRMITFTGSTEVGRELSAEAGRHFKRITLELGGKSPMIVLKDADVDYAVNAAAFGIFLHQGQVCMANSRLIVEAPIFDVFCDKLATKIAGFKVGDPRDPQTVIGPLIDRKQCAVLDRHVADAVAKGAKLLHGGKSDGAFYQPTILAGVTPDMVVFREESFGPAVSVIRAADSEDALRLANDSCYGLSSGLITNDLQKAFDLSLRLEAGMVHINDSSIMDEPHVPFGGVKDSGFGREGGHHSMDEMTELKWITVQMGQRQFPF

SEQ ID NO: 1003 - protein, 79 aa, Glycine max
  misc_feature (30)..(30): Xaa can be any naturally occurring amino acid
  misc_feature (57)..(57): Xaa can be any naturally occurring amino acid
LKSMAGFCTMQNMNDIISIASNGGRVQCLXVWPPVGKKKFETLSYLLDLDDAQFANXVEYLLRNGWILVRYHWSTFVYV

SEQ ID NO: 1004 - protein, 273 aa, Zea mays
  misc_feature (62)..(62): Xaa can be any naturally occurring amino acid
MAAPPMAAAPARHEDICGAVLGAARASATCHLHPTPSTRRDSSIGDSRAIKGVDRNHVLRHXMAEQIKLQISTMKLIKHPNVAQLHDVMASRTKIYMLLEFVDGGELFDKIVNSGRLGEDEARIYFHQLINAVDYCHSRGVYHRDLKPENLLLDSNGALKVSDFGLSAFAPQTNEDGLLHTTCGTPNYVAPEVLADKGYDGMAADVWSCGIILFVLMAGYLPFDDASLSYPSLVSTPICSAVCGQAEPGETIETICAGEQSLPNSSQHGCTGR

SEQ ID NO: 1005 - protein, 167 aa, Glycine max
  misc_feature (131)..(131): Xaa can be any naturally occurring amino acid
ATIQVQYPSDIMAKKLWKILEAKARGEGGGCSITYGALDPVQITQMAKHLETVYVSGWQCSSTASSSLEPGPDLADYPANTVPNKVAQLFTAQLVHDRKQRWTRSQALAKGEDLPPPIDYLRPLIADADTXGHGGLTAAMRLTKMMIQALAAVIHIEDQAPATKKCG

SEQ ID NO: 1006 - protein, 210 aa, Candidatus Blochmannia floridanus
MLFHYYMIKHINKYNDKNVMWHFYRINREDRERLHQHRSMILWFTGLSGSGKSTLASILEEKLYCRGVSTYSLDGDNIRHGLCKDLSFNSNDRSENIRRVGEVARLMVDAGLVVLVALISPYRIDRQIIRDMCIKDSFLEIFVDTPMLICKQRDPKGLYHQVDCKKIKNFTGIDSIYERPKQPDIYLDGRKTISELMNQLLDLVLVKIFK

SEQ ID NO: 1007 - protein, 253 aa, Fusarium solani
ILMNQSSDTLKKLSLELGGNAPFIVFDDADLDLAVAGAIASKFKCSGQTCVCSNRIFVQKGIYNEFVQKLKAVVSKFQVGHGFDSKTTHGPLVTAAAAERVDGLVKEAVKAGAKVEVGGKRRTDLGPNFFEPTILTNVTTDMRLVRDEIFGPLAPIFSFDNEDEVVDIANKCDVGLASYIFTQDVNRVARVTELLHFGMVAVNTGIMSDAAAPFGGVKHSGMGREGSKYGIEDYLHVKTIVTGNVNVVHRALL

SEQ ID NO: 1008 - protein, 361 aa, Escherichia coli
DLWHAPAPKNGQAVGTNTIGSSEACMLGGMAMKWRWRKRMEAAGKPTDKPNLVCGPVQICWHKFARYWDVELREIPMRPGQLFMDPKRMIEACDENTIGVVPTFGVTYTGNYEFPQPLHDALDKFQADTGIDIDMHIDAASGGFLAPFVAPDIVWDFRLPRVKSISASGHKFGLAPLGCGWVIWRDEEALPQELVFNVDYLGGQIGTFAINFSRPAGQVIAQYYEFLRLGREGYTKVQNASYQVAAYLADEIAKLGPYEFICTGRPDEGIPAVCFKLKDGEDPGYTLYDLSERLRLRGWQVPAFTLGGEATDIVVMRIMCRRGFEMDFAELLLEDYKASLKYLSDHPKLQGIAQQNSFKHT

SEQ ID NO: 1009 - protein, 487 aa, Lesquerella fendleri
MANVKLLYHYLITHFFKLCLLPLIALVASKASSLDQEDLQNLWFHLQHNILTLTILFAVLTFVSAIYFLTRPRPVYLVDYSCHLPPPHQKITVKKIVENVNKNRELDASHNSKIPESSLDFVLRLLERSGLGEETYIPDSLLNVPPIQTMAAAREETEQVIFNAIDNLLANTKVNTRDIGIIIVNSSMFNPTPSLSAMVVNKYKLRSTIKSFNIGGMGCSAGIIAIDLAKDLLQVHKNTYALVISTENLTRNMYVGNNRSMLVANCLFRLGGAAILLSNKSGERRRSKYKLLHTVRTHTGADDKSFRCVQQEDDDMGKTGVSLTKDITSVASRTITKNIATLGPLVLPISEKILFFITYIHKKFVNDKVKHYIPDFKRAIDHFCIHAGGRALIDELEKNLGLLPIDVEPSRSTLHRFGNTSSSSIWYELAYTEAKGRMKKGNKAWQIALGSGFKCNSAVWVALCDVKPSVNSPWEHCLDKYPVKLDL

SEQ ID NO: 1010 - protein, 449 aa, Zea mays
MYRAKRAALSPKVKRRVGKYELGRTIGEGTFAKVRFAKNTENGEPVAIKILDKEKVKRHRLVEQIKREICIMKLVRHPNVVRLFEVMGSKARIFIVLEYVTGGELFEIIATNGRLKEDEARKYFQQLINAVDYCHSRGVYHRDLKLENLLLDAAGNLKVSDFGLSALTEQVKADGLLHTTCGTPNYVAPEVIEDGGYDGATADIWSCGVILFVLLAGYLPFEDDNIIALYKKISEAQFSCPSWFSAGAKNMITRILDPNPTTRITISQILEHPWFKKGYKPPVFDEKYQTSLDDVDAAFGDSEDRHVKEETEDQPTSMNAFELISLNQALNLENLFEAKEEYKRETRFTSQCPPKEIITKIEEAAKPLGFDVQKKKYKMRMENPKAGRKGNLNVATEVFQIAPSLHVVELKKAKGDTLEFQKFYRSLSTQLKDVVWKCDGEVDGNSAAA

SEQ ID NO: 1011 - protein, 259 aa, Aquifex aeolicus VF5
MADKKWKTAISTHVNHEPYVRGYRLLDLVGNLTFSEAIYLLLKGELPSEAEAKMMDAIFVSVIEHSIAPPSVIATRAVISGGNSLNVGVGAGVLAFGSAHGGALEDAMKFMQEGVKSNRPVEEIVKEYLSQKKPIPGYGHRYYKEFDPRTKRLFELAEKYGFCKEHCEFAKKVEEEIYKQKGKRIVLNVDGAIAAITSDMGFDWRLGKGFFIIGRVPGLVAHAYEELTQEKPFSKRLSEEEYEYTGVEPRELPPERKKV

SEQ ID NO: 1012 - protein, 580 aa, Glycine max
MATPNPTRFSLAMERTGQWVFSPEIPTDVIVAVGQTNFSLHKFILAAKSNYVRKVIMESEESDLTRIEISDIPGGSEAFEKAAKFCYGVNFEITVHNVAALHCAAVFLQMTDEYCDGNLAGRTEDFLSQVGLSTLHSAVAVLKSCQKILPFAAEVNVVDRCVEVISCKACNEANFPSQSPPNWWTEELAVLDVDSFAKVITAMKQRGAKYLTVAGALITYTERALRELVRDQTGGGKGIRSPESGDSDSESKRSEQRELLQAIVPLFPTEKAAFPVNFLCCLLRCAIYLRASSVCKRELEKRVTEILEHVTVDDLLVLTFSYDGERLLDLDSVRRIISGFVEREKGTTVFNAGVNFNEDFSAAMQRVVKTVDTYLAEIAAYGELSISKFNGIAILIPKGSRKSDDDLYRAVDIYLKVHPNLDEIEKEKVCSVLDPLKLSYEARVHASKNKRLPLQIVLHALYYDQLHIRSGTAADKQAVVAAAEKKQLQADVSLVRENEELRSELMKMKMFISDLQKNVHGTSSSGRENIGPTKKPTFFSSMSKKLSKLNPFKNGSKDTSHIDDAPVDLTKPRKRRFSIS

SEQ ID NO: 1013 - protein, 160 aa, Bacillus thuringiensis serovar konkukian str. 97-27
MTVYDFSAKTIIGEEKSLKDYEGKVLLIVNVASKCGFTPQYKGLQEVYDKYKEQGLEILGFPCNQFGGQEPGTEVDITSFCELNYGVNFPMFAKIDVKGDKAHPLYTYMTEQAPGLLGMKAVKWNFTKFLIGKDGKVVGRFAPQTKPVDLEVEIEKVLGE

SEQ ID NO: 1014 - protein, 324 aa, Gibberella zeae PH-1
MVNVPNIKLNSGFDMPQIGFGLWKVDDNCAEVVYNAIKAGYRLLDGACDYGNEKACGEGVARAIKEGIVKREDLFIVSKLWQTYHDKKNVEPITRRQLADWQIDYFDLFLIHFPVALEYVDPEVRYPPGWHYDDAGTEIRWSKATNQETWEGMEDLVEKGLAKSIGISNFQAQGIYDMLKYAKIRPATLQVELHPYHQQSELVSLAKAEGIALTAYSSFGPTGFIELDMDIAKSASPLMQHEVFTTLASKYNKTSAQVLLRWATQQGLAVIPKSTTPQYMAQNFDCFEWSIDEEDMKRISKMNLNLKFNKPTNYFPTEKLWIFG

SEQ ID NO: 1015 - protein, 280 aa, Arabidopsis thaliana
MAIIKPNRDLKPDGVTVVTREVWAENLESEFELISEIIDDYPFISMDTEFPGVIFKSDLRFTNPDDLYTLLKANVDALSLIQVGLTLSDVNGNLPDLGDDLHRGFIWEFNFRDFDVARDAHAPDSIELLRRQGIDFERNCRDGVESERFAELMMSSGLVCNEEVSWVTFHSAYDFGYLMKILTRRELPGALGEFKRVMRVLFGERVYDVKHMMKFCERRLFGGLDRVARTLEVNRAVGKCHQAGSDSLLTWHAFQRMRDLYFVQDGPEKHAGVLYGLEVF

SEQ ID NO: 1016 - protein, 479 aa, Gloeobacter violaceus PCC 7421
MSSIAIVWHRRDLRVHDNPALWQASRTGGQVLAVFIVDPTIVERDDTAPARIYFLRESVLELQKAYRTIGGRLAVRVGEPVQQLVALAQAVGAGAVYFNDDIEPYARERDARAAEALRAAGITVHACAEILLHPAGEVLTAAGGKPYTVYTPFWRQWSAKPKPKPFPTPERLEAPTVEEQSFPELAQLGRPFAGELLVSPGEQSGLEQLEAFAREGLYRYGERRDLPGCDGTSRLSAHLKFGTVGIRAVWARTMDAWKQAEHDRDRAGLAVWQQELGWREFYKYELFHLPQLAGRPFRREFENFQWDEDQERFERWCQGETGYPIVDAAMRQLNTVSWMHNRLRMIVASFLTKDLLLPYGWGERYFMQKLVDGDLSANNGGWQWAASVGTDPKPLRIFNPSTQAGRYDPKAVFIRRWLPELEGVDTALLVTSERLPPLMRAQHRYAQPIVEHKRQQQVFKERYRAVRAQQADPGARDSE

SEQ ID NO: 1017 - protein, 52 aa, Zea mays
PVGRVYFPGGAPSGPFNGFVPGAFFSGFGSPEIFFNCAPKKMCQFPVPGKFF

SEQ ID NO: 1018 - protein, 222 aa, Desulfitobacterium hafniense DCB-2
MCGLAGLLRPRNDLDQEHLQALAASMGEALHHRGPDDDGVWADPQAGIALAHRRLSILDLSPLGHQPMASADGRFVVAYNGEVYNFAELREQLRGLGHGFRGHSDTEVLLAAVSQWGVEAAIARCNGMFAIALWDRERGELWLARDRVGKKPLYYGWAGDTLVFGSELKALWRHPQFDNGVDRDALALLLRYDYVPSPYCIHTDTWKLAPGAIARFTPRRDP

SEQ ID NO: 1019 - protein, 78 aa, Triticum aestivum
  misc_feature (68)..(68): Xaa can be any naturally occurring amino acid
MGLCSCCCRCLEIMCAILLPPLGVCLRHGCCSMEFWISVLLTILGYLPGVLYAAYVICSVDPDRVRRXRTDDDYIYVA

SEQ ID NO: 1020 - protein, 351 aa, Zea mays
SVAFVPLPVVYVLFVPSVAGTGEVVTCSPTQSPELFFAVLGGLGQFGIITRARIPLQVAPPKVRWVRAFYDSFETFTKDQELLVSMPELVDYVEGFMVLNEQSLRSSSVAFPAQVNFRPDFGSDDGTNKKVCYYYCIEFAVHDFQRQDSAADHVVDLVSGKLSYLRPHAYSVEVAYWDFLNRVRMEEESLRRRGLWDVPHPWLNLFVPRHGVARFMDLLMATIAQGDFEGPVLVYPLLTHRWDGNMSAVVPAAPDGVMYVFSVLRSTDPARCGRACMERILEQHRRVADEACRRLGAKQYLARQPSLAHWRDHFGASWDRFVARKARFDPMNVLGPGQGIFPWTDSSSSPM

SEQ ID NO: 1021 - protein, 319 aa, Aspergillus niger
MASPTVKLNSGYDMPLVGFGLWKVNNDTCADQIYHAIKEGYRLFDGACDYGNEVEAGQGIARAIKDGLVKREELFIVSKLWNSFHDGDRVEPICRKQLADWGIDYFDLYIVHFPISLKYVDPAVRYPPGWKSEKDELEFGNATIQETWTAMESLVDKKLARSIGISNFSAQLVMDLLRYARIRPATLQIEHHPYLTQTRLVEYAQKEGLTVTAYSSFGPLSFLELSVQNAVDSPPLFEHQLVKSIAEKHGRTPAQVLLRWATQRGIAVIPKSNNPQRLKQNLDVTGWNLEEEEIKAISGLDRGLRFNDPLGYGLYAPIF

SEQ ID NO: 1022 - protein, 416 aa, Ralstonia eutropha JMP134
MYQHIKVPAGEKITVNQDFSLNVPDTPIIPYIEGDGTGLDITPVMIKVVDAAVEKAYAGKRKISWMEIYAGEKSTKVYGPDVWLPDETLDVLKEYVVSIKGPLTTPVGGGIRSLNVALRQQLDLYVCLRPVRYFKGVPSPVREPEKTDMVIFRENSEDIYAGIEWEAESPQAQKLIAFLQNEMGVKKIRFPETSGIGVKPVSKQGTQRLVRKAIQYAIDNDKPSVTLVHKGNIMKFTEGGFRDWGYELAQKEFGAELVDGGPWCKFKNSKTGRDIVIKDAIADAFLQQILLRPAEYSVIATLNLNGDYISDALAAQVGGIGIAPGANLSDSVAMFEATHGTAPKYAGKDYVNPGSEILSAEMMLRHMGWTEAADLIIASMEKSILSKKVTYDFARLLEGATQVSCSGFGQVMIENM

SEQ ID NO: 1023 - protein, 485 aa, Pseudomonas syringae pv. tomato str. DC3000
MLKNQLKDPSLLVDRAYVDGQWISADDGATLAISDPATGEVIAQVPALQGAETRRAIEAADRAWPAWRARPAAERAALLERWHQAMLDNVEDLALIMTLEQGKPLNESRGEIRYGASFVKWFAEEARRSYGETIPTPSADRRLMTLKQPVGVCAAITPWNFPNAMITRKCAPALAAGCTIIVKPSDLTPLSALALAVLAERAGIPVGVFSVVTGMPTAIGEELTGNPVVRKISFTGSTPIGRLLMRQSAEHIKRLSLELGGNAPFIVFDDADLEQAVAGIMLSKFRNAGQTCVCANRILVQSGIYDRFAARLVEEVAKLKVGNGLEEGVTIGPLINPAAVSKIARHIDDALSQGAKLLYGGLPNGDGQFVQPTVLGDTHAGMLLANEETFGPVAPLMRFTDEAEALALANATPYGLAAYYFTQDLRRSWRFGEALEFGMVGLNTGIISMEIAPFGGIKQSGLGREGSSYGLDEYLEVKAFHVGGL

SEQ ID NO: 1024 - protein, 348 aa, Listeria monocytogenes str. 4b F2365
MKALKLYGKRDLRYEEADMPTIEQPDDVILKVKTVGICGSDISRYSKLGPYVPGMVWGHEFSGEVIEVGSEVTDIEIGDRAAGCPALYCGECEYCKKGEFARCRKLTVIGARHPGAYAEYIKLPAENVVKIPDELDYEAAALVEPSAVVVHGFYHTKLQAGDDVVVVGSGNIGLLAIQWAKVFGAKRVIAIDVDDKKLALAKEVGADVVINSLKEDPLEVVAAHTDGLNADLVVEAAGSPITSAQVFAYAKKGGGVVFLGIPYADVTIERFYFEKIVRSELTVWGSWNAISAPFPGKEWQTTIHFLANKQINIEPMITHRLSLAEGPEVFERIYERNEFFGKVLFFPE

SEQ ID NO: 1025 - protein, 500 aa, Zea mays
MSSSPSFGLLAVAALLLALSLAQHGSLAATVGPRVIVVGAGMSGISAAKRLSEAGITDLLILEATDHIGGRMHKTNFAGINVELGANWVEGVNGGKMNPIWPIVNSTLKLRNFRSDFDYLAQNVYKEDGGVYDEDYVQKRIELADSVEEMGEKLSATLHASGRDDMSILAMQRLNEHQPNGPATPVDMVVDYYKFDYEFAEPPRVTSLQNTVPLATFSDFGDDVYFVADQRGYEAVVYYLAGQYLKTDDRSGKIVDPRLQLNKVVREIKYSPGGVTVKTEDNSVYSADYVMVSASLGVLQSDLIQFKPKLPTWKVRAIYQFDMAVYTKIFLKFPRKFWPEGKGREFFLYASSRRGYYGVWQEFEKQYPDANVLLVTVTDEESRRIEQQSDEQTKAEIMQVLRKMFPGKDVPDATDILVPRWWSDRFYKGTFSNWPVGVNRYEYDQLRAPVGRVYFTGEHTSEHYNGYVHGAYLSGIDSAEILINCAQKKMCKYHVQGKYD

SEQ ID NO: 1026 - protein, 157 aa, Glycine max
MASTKKITLKSSDGEAFEVEEAVAVAVESQTIKHMIEDNCADSGIPLPNVTSKILAKVIEYCKKHVEANCADEKPSEDELKAWDADFVKVDQATLFDLILAANYLNIKSLLDLTCQTVADMIKGKTPEEIRKTFNIKNDFTPEEEEEVRRENQWAFE

SEQ ID NO: 1027 - protein, 251 aa, Glycine max
  misc_feature (70)..(70): Xaa can be any naturally occurring amino acid
MCMMEGDENIQASTKGKNVESFTSLEAPRKKSKKIENKRRFSDEQIRSLECIFESESKLEPRKKMQLARXLGLQPRQVAIWFQNRRARWKSKRIEQEYRKLKDEYDNLASRFESLKKEKDSLQLELQKLSDLVVTSQDGGREDKDGKENSIEDGGSGSGYSSWKPEAKKPRFSNDEGLEERIGVYSDDQNENSIIRGVEKSEDKGHQLLRMDDHDHADMPLASLEKWYSGVDPSGILDQSCSSSQWLDFWT

SEQ ID NO: 1028 - protein, 1349 aa, Candida albicans SC5314
MPHSRQPSISSSIMSQSNHNHPQKIGPWKLGKTLGRGATGRVLLATHQTTGQKAAVKVVSKSELQDEETEKNGDGLPYGIEREIIIMKLLTHPNVLRLYDVWETSKALYLVLEYVEGGELFDLLVERGPLPEVEAIKYFRQIILGTAYCHALGICHRDLKPENLLLDSQLNVKLADFGMAALESNGKLLETSCGSPHYAAPEIVSGLKYHGAASDVWSCGVILFALLTGRLPFDDENIRNLLLKVQAGNFEMPVDEVSREARDLIARMLEVDPMRRISTEKILRHPLLTKYPMSNEDLISEKSLPHPQTGYKSLGSVRNIDKQILSNLTILWNDRPEEEIVDCLLKDGSNPEKTFYALLMRYKHNQEDNTNNNSPKKSTSFNNKVVRSGSKYSLNGTPRRKRASHISVSRPTSFQYKSNPGAGATANRNSVARHSVASSANNSPRKSPYKSPYRSPYRSPYKSPSKRYSYNQSPTKSPYGRRSNSQRQFENEPLKAKPRNIYNEIVDAQSNFSLPPSLPPSLPSKDSRYMIDEPNQPQLQQPALSQVPENPIVDESPDLMQSAKISSGKRNSIIGKNNNNSNSNKRMSKRKSIRASMTTGLKRNSITMKLLSTYAKLSGDDDWEYMDKQTKRTSATFAALCDKIFNQEDYDEEDEQLVDPEEKEAKEYERLMELERKKHEAELKARRELEKKKRRQKRRSILSSKKLSIIVKNDADPNNSEQELVDEGIKQPKRQSKNLTALRALSEGNHASEELTLEDVENLKRRSASQPVPKRRQTPVLTRRPVSRLDPLWQAHENEQLDRAKDALEQEWRDSQKRSSTVSRKKVNRESMISVMDDIVEEDQGRVNRRSTRNTYYERERDYELPEPTVEDSNLTDDYMTEIRKSRLLNSQLNVRDPLNEKRKSEPKTLISNVQIPSVTRKSRNFTTSNKRLSVLSMYSTKESYRDLNSIINSPDENPEQHQNMNKPALRTSIADRLDKAGLAEPEYETETDGEDKVSVIDLDDHLADRRTSYYDGSGKRASRASTTKRYNVHSSSGQRPKSKVPDLPKNDYDDTFVSNSDEVHKRQYKSMVSDESSASDDVFDKIKLPDGKSTKSSIDELANGTSTSGHRKPKIRHSQPGPEMLIPHLNGGIESSQPMSKVRGNNSSGHDDSVPPPPPAHKVNKKPLDDKTNFPPPEVDPKRKGSFFRKLSWGSKKTIENNTNAATNTTTQQQLPSPAESKEEKPKSSFFRWFSSSNTPSAAEIRKFNTILPKHEMSTALFALLNSWSNFGLKDLRNDQVGYYITGAISKHNSFNLKSCKFRIKINQRDFNQKSEIVCVRVKGSKVTTDTLFSEIEKVLLKEGVLDK

SEQ ID NO: 1029 - protein, 457 aa, Oryza sativa (japonica cultivar-group)
MMELEKNGNILLRRYEIGKLLGQGTFAKVYHGRNIVTSQSVAIKVIDKDKIFKVGLMDQIKREISVMKLVRHPNIVQLYEVMATKSKIYFVLEYVKGGELFNKVAKGRLKEDAARKYFQQLVSAVDFCHSRGVYHRDLKPENLLVDENGNLKITDFGLSALAESRRQDGLLHTTCGTPAYVAPEVISRKGYDGVKVDTWSCGVILFVLMAGYLPFQDSNLMEMYRKIGKAEFKCPAWFSSDVRKLVSRILDPNPRSRMPITKIMETYWFKKGLDSKLILKNVETNEPVTALADVNVVFSSMGSSSSKKTEEKQDAGKLTNLNAFDIISLSEGFDLSGLFEETDKKKEARFTSSQSASAIISKLEDVASCSKLTVKKKEGGVLKMEGASEGRKGVLAIDAEIFEVTPSFHLVEIKKNNGDTLEYQHLWKEDMKPALKDIVWAWQGERQDQQPEDHGQP

SEQ ID NO: 1030 - protein, 77 aa, Glycine max
ISSPAVATVNRAGACMVAPFTGLKSMDGFPTINTNDDVASIAIYGVTVQCIQVWTPVGRRKFDTLSYLPDLDDAAIG

SEQ ID NO: 1031 - protein, 216 aa, Zea mays
  misc_feature (50)..(50): Xaa can be any naturally occurring amino acid
EMMYTIIADELKSMDNKDMRPEDYLSFFCLGNREEPPSNGSPESEKSTDXSAVGLATKYRRFMIYVHAKGMIVDDEYVILGSANINQRSLAGSRDTEIAMGAYQPHYAWSTKNGHPDGQVYGYRTSLWAEHLGTIDDRFKDPSSLECVRFVNQIAVENWRRYTAEEMSTLQGHLLKYPVKVEADGKISPLPDQECFPDVGGKILGASTSLPDSLTM

SEQ ID NO: 1032 - protein, 329 aa, Glycine max
  misc_feature (237)..(237): Xaa can be any naturally occurring amino acid
MESTLLTNLLVFNNTLQPELMRSVHVYRRGDGEKREVEREFVFSESGSYGEMQATPIPGLVKSRVSEVCEGHRNGVWLCVFAFHADHTPQFCRIPPVLLVTRNPKLKMIPNLLDDLHVIYKLDRKEEDSDIAQDYTGEERQGNSNNCQPSWKVFPVLDQDLNCLPYEDDESESLDNETDVESSPGFAGFLVKKKRAPSDLVAKISLSDLVKYFGMPIVEASRNLNVGLTVLKRKRRXSGIPRWPHRKIKSLDSLIHDLQEEVKSQELEDREAALAVAKRQRMLESEKENIEKKPFMDIQSETKRFRQDVFKRRHRARAVGKHNSTVSST

SEQ ID NO: 1033 - protein, 79 aa, Brassica napus
  misc_feature (76)..(76): Xaa can be any naturally occurring amino acid
MSSKKVEGSSAPANRRDPYEVLCVARDASDQEIKSAYRKLALKYHPDKNANNPEASDLFKEVAFSYSILSDPEKRXQYD

SEQ ID NO: 1034 - protein, 418 aa, Listeria monocytogenes str. 4b H7858
MNKYFKNLATVLFTVSLLTTSITALPAMASAYEETHNASTIYISPLDAPHVGDTKITGKTTALSSFAIAIYTPEGRLTGTFFGTTNAAGTYAVDLSDFTYYDPLGYEASGNVILEKGAMVRSMTETNSDLIKTVTINYNYIQTAINELFLNNDPTGTILAATDQNAINAVQEQINTVTSSEKETFQEQLNNAQQQLDARIAQEQAAIQAVNQLFLEDNPANSIKAETTQDLIDQAQTLVDVLPASELKDTLQANIVKAQTELDERSKPVTPPKNDPETDNPEEPVTPVDPATPTPDEPSTPTDPATPTPDEPSTPTDPATPEKPEITTPENPESTVVESDSSENEPEKSADSKIVNNPIQITSQATKTATKQATKQAKSSVTKTTTLPIPKTGDTETTSSILFGTLMLASLALFRRKK

SEQ ID NO: 1035 - protein, 366 aa, Candida albicans SC5314
MATFAPHISKITKSSTKFNYGRIAKTFLGVAGSAAIATYFYNNGNPFNNNNNNNNNNGGSKNAAKALFGASAGANVKIAKVPEGKSASDYQKVYNDIATKISENLEFDENAGYYGQLLRLAWHTSGTYDKSDNSGGSYGGTMIFAPEEFDPENAGLQVGREFLMEFLVKYPWISRGDLWTLGGVAAVQESGGPKIEWRPGRVDDNTASKVPPNGRLPDASKDGKYVKDLFARMGFNERETVALLGAHVLGRCHKHNSGYDGPWGPSFNQFTNVFYTTLLGDWHVKKWDGKKQYEDDETGEFMMLPTDMALKEESYFLKYVKMYADDQDLFFKDFAKAFSKLISNGIKYPADSKPILFKTLDEQDEE

SEQ ID NO: 1036 - protein, 267 aa, Zea mays
MDTAGLVQHATSSSSTSTSASSSSSEQQSRKAAWPPSTASSPQQPPKKRPAGRTKFRETRHPVFRGVRRRGAAGRWVCEVRVPGRRGARLWLGTYLAAEAAARAHDAAILALQGRGAGRLNFPDSARLLAVPPPSALPGLDDARRAALEAVAEFQRRSGSGSGAADEATSGASPPSSSPSLPDVSAAGSPAAALEHVPVKADEAVALDLDGDVFGPDWFGDMGLELDAYYASLAEGLLVEPPPPPAAWDHGDCCDSGAADVALWSYY

SEQ ID NO: 1037 - protein, 106 aa, Brassica napus
  misc_feature (99)..(99): Xaa can be any naturally occurring amino acid
MDPSYTCIKEEFPTGINDSPSPPSSSTSSYLHSTSMAPNDPATLNSPQPIEGFHESGPPPFLTKTYDLVEDSRTNDVVSWSQDKNSFIVWDPQAFSMTXLPRSFKH

SEQ ID NO: 1038 - protein, 495 aa, Bacillus subtilis subsp. subtilis str. 168
MSSLTMQVTKRLETFLQGTKKLYIDGKFVPSASGATFDTPNPATGETLMTLYEAQAADVDKAVKAARKAFDQGEWRTMSPASRSRLMYKLADLMEEHKTELAQLETLDNGKPINETTNGDIPLAIEHMRYYAGWCTKITGQTIPVSGAYFNYTRHEPVGVVGQIIPWNFPLLMAMWKMGAALATGCTIVLKPAEQTPLSALYLAELIDQAGFPAGVINIIPGFGEDAGEALTNHEAVDKIAFTGSTEIGKKIMSTAAKSIKRVTLELGGKSPNILLPDANLKKAIPGALNGVMFNQGQVCCAGSRVFIHKDQYDEVVDEMASYAESLRQGAGLHKDTQIGPLVSKEQHERVLSYIQKGKDEGAKAVTGGSCPFEAGYFVAPTVFANVEDEMTIAKEEIFGPVLTAIPYETVDEVIERANHSEYGLAAGLWTENVKQAHYIADRLQAGTVWVNCYNVFDAASPFGGYKQSGLGREMGSYALDNYTEVKSVWVNLED

SEQ ID NO: 1039 - protein, 197 aa, Bacillus thuringiensis serovar konkukian str. 97-27
MDTNITWHTASVSKDERRVKNGHHSFVIWFTGLSASGKSTVANAVARKLFEKNIGNYVLDGDNIRHGLNKDLGFSESDRMENIRRIGEVAKLFVDQGAVVLTAFISPFRVDRKQVRDLLAVDEFIEVFVKCPIEECEKRDPKGLYKKARKGDIKDFTGIDSPYEEPEKAELIVETNKYSIEECAEQIVKYLQERSFI

SEQ ID NO: 1040 - protein, 466 aa, Brucella melitensis 16M
MPASTPKGNISERAPTASEKEALDFHAQGRPGKLEINPTKPMTTQRDLSLAYSPGVAVPVKAIAEDAARAYDYTAKGNLVAVISNGTAILGLGNLGALASKPVMEGKAVLFKRFADVDSIDLEIDTTDIDAFINAVRYLGPSFGGINLEDIKAPDCFIIESRLRELMDIPVFHDDQHGTAIIAAAGLINALHLTGRDMKTTKLVCNGAGSAGIACIELIKAMGFAPENVILCDTKGVVYQGREEGMNQWKSAHAVKTDRRSLANAMKDADVFFGVSAKGALTQDMVRSMAPNPIIFAMANPDPEITPEEVERIRDDAIVATGRSDYPNQVNNVLGFPYIFRGALDVRATTINDAMKIAAVNALAELAREDVPDDVVAAIRAAARALGRTISFRCRSIRACLPPFPPPSPRLRWKPAWPGAPLPILKATSANCWRAATRSPRRCAAFTSVCAASQSASYLPKARKNR

SEQ ID NO: 1041 - protein, 274 aa, Triticum aestivum
  misc_feature (11)..(11): Xaa can be any naturally occurring amino acid
  misc_feature (59)..(59): Xaa can be any naturally occurring amino acid
AGLKLAGGTLXADHTFLFFGAGEAGTGIAELVALEISMQSKTSQEEAHKNIWLVDSKGXLIVSSRKDSIQPFKKLYAHEHEPVKDLLSAIKDIKPTALIGSAGVGQSFTKEVIEAMSSINKRPIILALSNPTSKSECTAEQAYSWSQGRAIFGSGSPFDPVKYNEKLFVPAQANNAYIFPGFGLGVVISGAIRVKDDMVLAAAEALAEQVMAEHFDKGLIYPPFSSIRKISTNIAARVAAKAYDLGLASHLPRPKDLVKYAESCMYSPIYRSYR

SEQ ID NO: 1042 - protein, 163 aa, Thermoplasma acidophilum
MISMVFKRKEAGITDYSKRLKLLKSREKRFIVRITGKGVIAQVAEYSDIGDRILFTVTDKTLAKYGVDLRGNNIQVCYLVGYIAGIESEKNGVESAVLDTGRRKFRKGGRIAACLKGFTDAGIEVPHGEDVFPDKKRIDGKHLKSPVKISEIVKNFKKMEEKA

SEQ ID NO: 1043 - protein, 606 aa, Zea mays
MDTHIGSVNGAASNQTVGCPASAPGCPMASTPAQPAATLSAGEASLGRHLARRLVQVGVNDVFAVPGDFNLTLLDHLIAEPGLRLVGCCNELNAGYAADGYARARGVGACAVTFTVGGLSVLNAIAGAYSENLPVICIAGGPNSNDYGTNRILHHTIGLPDFSQELRCFQTVTCHQAVVNNLDDAHEQIDTAIATALRESKPVYLSISCNLPGLPHPTFSRDPVPFFLTPRTSNKMGLEAAVEATVEFLNKAVKPVLVAGPKLRVAKAGKAFVDMVDASGYAYAVMPSAKGLVPETHPHFIGTYWGAVSTAFCAEIVESADAYLFTGPIFNDYSSVGYSFLLKKEKAIIVQPERVIVGNGPAFGCVMMKEFLSELAKRVNKNTTAYENYKRIFVPEGQPLESEPNEPLRVNVLFKHVQKMLTGDSAVIAETGDSWFNCQKLKLPEGCGYEFQMQYGSIGWSVGALLGYAQGANHKRVIAFIGDGSFQVTAQDVSTMLRCEQNSIIFLINNGGYTIEVEIHDGPYNVIKNWNYTGFVDAIHNGEGKCWTSKVKSEEELTAAIETALGEKKDCLCFIEVIAHKDDTSKELLEWGSRVSAANSRPPNPQ

SEQ ID NO: 1044 - protein, 158 aa, Glycine max
MSSTSLKEMRNGGEDYSNGHGGGVRDLYGEDCATEDQLITPWTFSVASGCSLLRDPRYNKGLAFTEGERDAHYLRGLLPPAVFNQELQEKRLMHNLRQYEVPLHRYMAMMDLQERNERLFYKLLIDNVEELLPVCYTPTVGEACQKYGSIFRRPQGLY

SEQ ID NO: 1045 - protein, 176 aa, Zea mays
MEAGGAGSGLNGAVQAKGTGADDGSAKRLPPCCVKARAAAPESEARCHATVVSGWFTEPRSRCGKASKVQYYNNPMWPGEANSLKVEKILYQGKSLYQEVLVFESSTYGKVLVLDGIVQLTDKDECAYQEMITHLPLCSIPSPKKVLVIGGGDGGVLREVSRHSSVESIDICEIDQ

SEQ ID NO: 1046 - protein, 315 aa, Pseudomonas resinovorans
MHAQPVLAYRTNRPAHPAHSPPDPGGGCQQPLPGFTPGAHIEIQIAGSKPQWRAYSLVNLPGHAHYEIAVQLEEQSSGGSRWIHQLQVGQPLQVRAPKNHFPLVTQASDYLLIAGGIGITPMLGMARALAAGQQPFTLHYAGREAQGMAYLEEVRALGSAHCWISGGDPARRLPLASLLATPHNGRQLYVCGPKALIASVLHSARELGWDDSHVHSELFTGSLDAAGDASFEVELRSSGITLQVPAGKSVLEAMLDADLDPLFDCRRGDCGVCVAQVLEGSAEHRDICLSARERSDGRFCTCVSRASSARLVLDL

SEQ ID NO: 1047 - protein, 477 aa, Enterococcus faecalis V583
MKRVIWFRRDLRLQDNKALAHALQNSAADELILLFQMNPQQFIQESANHNAFFASLASFKERIDQEAHLQIMVGEPLDLFSRLKRKLPDWQAIYFNEDTCGFGAKRDQQAMRFFEENNIQSFSFQDAYLHGSEEIKKNDGSKYQVFTPYYNKWKEAPKETPIPVSYTAEKIFSACLFPEEEAAYREQIARIPLTHYSVGEETARRRLNTFIDQKLQSYENKRDFPYQDQTSHLSTFLRTGELSIRTIWQELASVPSSLSKETFKKELAWRDFYNMIYSAFPQQKEEAIQEKFRYIQWTNDPEMFVKWQKGETGYPIIDAAMRQLNQTGWMHNRLRMITASFLVKNLHIDWRWGEKYFQKMLIDYDAANNIGGWQWAASTGTDAVPYFRIFNPIIQSKKFDNDGQFIKKYVPELKQVPQKYIHQPNLMNEALQTQYHVHLGENYPKPIVDYASSKKQTLFLYEASKEIHQEMNNPRFQ

SEQ ID NO: 1048 - protein, 177 aa, Glycine max
RALKRAVGDPFKGGIEQGPQIDSEQFQKILKYIRSGVESGATLETGGDRFGNSGFYIQPTVFSNVKDDMLIAKEEIFGPVQSILKFKDLDDVIQRANNTHYGLAAGVFTKNINTANTLTRALRAGTVWVNCFDTFDAAIPFGGYKMSGQGREKGEYSLKNYLQVKAVVTSLKNPAWL

SEQ ID NO: 1049 - protein, 110 aa, Bartonella bacilliformis
EACLKMLQEIGSVKKIPQFIARAKDKNDPFRLMGFGHRVYKNYDPRAKIMQKTCHEVLKELNIQDNPLFDIAMELEHIALNDEYFINKKLYPNVDFYSGITLKALGFPTE

SEQ ID NO: 1050 - protein, 162 aa, Triticum aestivum
MAGMVFGLENPMMTALQHLLDIPDGEAGGAGAPRGEKQGPTRAYVRDARAVAAAPADVKELPGAYAFVVDMPGLGSGDIKVQVEDERVLVISGERTREEEEDPKYLRMEPRMGKLMRKFVLPENADMEKISPACRDGVLPVPVEKLPPPEPKKPKPIQVQVA

SEQ ID NO: 1051 - protein, 109 aa, Bartonella bacilliformis
TCLKMLQEIGSVKKIPQFIARAKDKNDPFRLMGFGHRVYKNYDPRAKIMQKTCHEVLKELNIQDNPLFDIAMELEHIALNDEYFINKKLYPNVDFYSGITLKALGFPTE

SEQ ID NO: 1052 - protein, 479 aa, Streptomyces avermitilis MA-4680
MSSTFRNYIDGAFADASDGRTLDVVDPTTGDVYATSPLSGAADVDAAMAAAAAAFPVWRDATPSVRQRTLLKIADAMEARADELVAAESRDTGKPLHLTRSEELAPAIDQVRFFAGAARMLEGRSAGEYMEGMTSIIRREPVGVCAQVAPWNYPLLMAVWKFAPALAAGNAVVLKPSDTTPASTVLIAEIIGGVLEELGLPRGIFNVVCGDRETGRLMVEHPTPAMASITGSVRAGIQVAQSAAKDVKRVHLELGGKAPAVVFEDADLAKAVEDLVVGGFFNAGQDCTAATRVLVHESVHDEFVAALAKAAADTKTGQPDDEDVLYGPLNNAGQLAQVSGFIERLPEHATIEAGGHRVGEKGYFYAPTVVSGLRQDDEIVQNEVFGPVMTVQSFTDEAQAVQYANGVDYALASSVWTKDHARAMRMSKNLDFGCVWINTHMALVAEMPHGGFKKSGYGKDLSAYGFEDYTRIKHVMTSL

SEQ ID NO: 1053 - protein, 250 aa, Zea mays
MVKAYPTVNEDYLKAVDKAKRKLRGLIAEKNCAPLMLRLAWHSVGTFDVVTKTGGPFGTMKNPVEQAHGANAGLEIAIRLLEPIKEQFPILSYADFYQLAGVVAVEVTGGPDVPFHPGRQDKPEPPPEGRLPDATQGSDHLRQVFSTQMGLSDQDIVALSGGHTLGRCHKDRSGFEGAWTSNPLIFDNSYFKELLSGEKEGLLQLPSDKALLSDPSFRPLVDKYAADEDAFFADYAEAHLKLSELGFAEA

SEQ ID NO: 1054 - protein, 339 aa, Vibrio vulnificus YJ016
MLSQLFRQIRYVFRQTKKQKGQFIQMVNNSIQWFPGHMHKAQKEIAEAIPQIDVIIEVLDARIPFSSENPLISKIRGEKPVVKVLNKRDLADPELTELWIEHLEKEQNVKAMAITTSQTQEVHKILELCRKLAPHREEVGKNIRTMIMGIPNVGKSTIINTLAGRAIAQTGNQPAVTRRQQRINLQNGIVLSDTPGILWPKVENPHSGFRLAATGAVKDTAMEYDEVAFYTVEYLAKHYPEKLKERYQIEELPETDVELMEEIGQRRGALRSGGRVDLHKASEILLHELRSGTLGQITLERPEMITEELVEVELEAARRAEEKAKNKEERRKRYLRNKR

SEQ ID NO: 1055 - protein, 115 aa, Hordeum vulgare subsp. vulgare
MARAAASQLVLVALVAAMLLVAADAAISCGQVSSALSPCISYARGNGAKPPAACCSGVKRLAGAAQSTADKQAACKCIKSAAGGLNAGKAAGIPSMCGVSVPYAISASVDCSKIR

SEQ ID NO: 1056 - protein, 109 aa, Bartonella bacilliformis
TCLKLLQEIGSVKKIPQFIARAKDKNDPFRLMGFGHRVYKNYDPRAKIMQKTCHEVLKELNIQDNPLFDIAMELEHIALNDEYFINKKLYPNVDFYSGITLKALGFPTE

SEQ ID NO: 1057 - protein, 113 aa, Oenococcus oeni
DIKLLVVSDAEGILGIGDWGVQGVDIAVGKLMVYTVAAGIDPSTVLAVVIDAGTNNEKLLKDPMYLGNKFNRVRGDKYYDFIDKFVNHAESLFPNLYLHWEDFGRSNASNILN

SEQ ID NO: 1058 - protein, 159 aa, Zea mays
  misc_feature (41)..(41): Xaa can be any naturally occurring amino acid
  misc_feature (101)..(101): Xaa can be any naturally occurring amino acid
  misc_feature (109)..(109): Xaa can be any naturally occurring amino acid
MGGILAVVGCSECSQAKRARILACSIRLKHRVPDWPGLYQXTRPTSLRQQRFYSSSPLSGEQPLLNEDRIGEVETHVQIYNHIKVRKQLTGTHKFSTSSDXEVIMPLYXKHCHNFVHMLDRLLTFELYDTRDRTYVTTRDTIEGNPLYIGCGNDGSDCI

SEQ ID NO: 1059 - protein, 440 aa, Shewanella oneidensis MR-1
MTKATQTSRQAQIDAIKKDWAENPRWKNVRRPYTAEEVVALRGSIVPENTIAKRGAAKLWDLVNGGSKKGYVNSLGALTGGQAVQQAKAGIEAIYLSGWQVAADANLAGTMYPDQSLYPANSVPAVVSRINNSFRRADQIQWSNGVNPEDENFVDYFLPIIADAEAGFGGVLNAFELMKSMIDAGAAGVHFEDQLASVKKCGHMGGKVLVPTQEAVQKLVAARLAADVSGVETLVIARTDANAADLLTSDCDPYDRDFVTGERTNEGFYRVNAGLDQAISRGLAYAPYADLIWCETAKPDLEEARRFAEAIHAQYPDQLLAYNCSPSFNWKKNLDDATIARFQQALSDMGYKYQFITLAGIHNMWYNMFDLAYDYARGEGMKHYVEKVQEVEFAAAKKGYTFVAHQQEVGTGYFDQVTTVIQGGHSSVTALTGSTEEEQF

SEQ ID NO: 1060 - protein, 380 aa, Phanerochaete chrysosporium
MSKRTFKIVILPGDGIGPEVVAEATRVLEVVSASSSDVEIKLETHDFGGCSIDKHGEPLTAATLEACKLADAILLGAIGGPKWGVNSKVRPEQALLALRKALGLYANIRPANFASDSLLAYSPLKPSVARGVDIIVIRELIGGAYFGERKELGARAQEDAAWDTMIYSVPEVQRITRSRRQVASPDPPLPVHSIDKANVLASSRLWRKVATETIQNEFPQLKLDHHLVDSASMLIVANPKKLNGVILTENLFGDILSDESSVIPGSLGLLPSASLAARPLWPNTAHRRSSPRRVYEPIHGSAPDIAGQGIANPIGTILSAAMLCGTRSVWRSPAKAIEAAVEGARRQGDRREGLRTADLGGSSKTKDIGHKVVEILKATL

SEQ ID NO: 1061 - protein, 453 aa, Aquifex aeolicus VF5
MWELDPKTLEKWDKEYFWHPFTQMKVYREEENLIFERGEGVYLWDIYGRKYIDAISSLWCNVHGHNHPKLNNAVMKQLCKVAHTTTLGSSNVPAILLAKKLVEISPEGLNKVFYSEDGAEAVEIAIKMAYHYWKNKGVKGKNVFITLSEAYHGDTVGAVSVGGIELFHGTYKDLLFKTIKLPSPYLYCKEKYGELCPECTADLLKQLEDILKSREDIVAVIMEAGIQAAAGMLPFPPGFLKGVRELTKKYDTLMIVDEVATGFGRTGTMFYCEQEGVSPDFMCLGKGITGGYLPLAATLTTDEVFNAFLGEFGEAKHFYHGHTYTGNNLACSVALANLEVFEEERTLEKLQPKIKLLKERLQEFWELKHVGDVRQLGFMAGIELVKDKEKGEPFPYGERTGFKVAYKCREKGVFLRPLGDVMVLMMPLVIEEDEMNYVIDTLKWAIKELEKEV

SEQ ID NO: 1062 - protein, 719 aa, Zea mays
ASLRAGKSFPVGRVSCRVRSVQARRVRFGGKLGRCWCSLGAAFGLIGAAVWRCAVCRLAVCASLVADVFRKQGQEWYCTSGLPSDISVVVGEQSFHLHKFPLLSKSGLLEKRIREKIDNRDDSCAIDLSDIPGGAKAFELAAKFCYGVKFEMTASNVVHLRCAADYLEMTEEISEGNLIAETESFLTQTVLRSWKDSVKALQTCDNVLDVAERLQIVKRCVDSIATKSCSDPDLFGWPVARYGGPMQSPGGSLLWNGISTGARPRNSSPDWWYDDVSCLSLPLYKKLISAMEYRGISQGVIVGSLNHYAKRRLPGLNRRKSIGDASNCLSMTSLTSIPSEDDQKYLLEEIDRLLPFQRGVTSCKLLFGLLRTAIFLKASPSCVSNLERRIGMQLDKASLEDLLIPNVSDSVETLYDVECVQRIVDHFLSMDQETGGASPGIGEDGQMLASPSLMPITMVAKLIDGYLAEVAPDMNLKLPKFRSLAAAIPDYARPIDDGLYRAIDIYLKAHPYLPESDKEELCRVMDCQKLSLEACTHAAQNERLPLRVILQVLFFEQLQLRSSIAECLMISEPLDGGGGFSRQLGGLPVSGEHLRGAGWPLAARENQTLREGMDSMKQRVSELEKECFAMKEDIERLGRSRSAGKSRFPFALAAKPHVCGTKDKEAAPESSKSETSKSKAAAATRSDDKLAVVKGGAAAAGDGGPQLKHRKHKTSLSAC

SEQ ID NO: 1063 - protein, 282 aa, Solanum bulbocastanum
MDRMYSGGGDMGYGYENGVVMTRDPKPRLRWTADLHDRFVDAVTKLGGPDKATPKSVLRLMGLKGLTLYHLKSHLQKYRLGQQTKKQNAAEQNRENIGESFRQFSLHSSGPSITSSSMDGMQGEAPISEALRCQIEVQKRLHEQLEVQQKLQMRIEAQGKYLQAILDKAQKSLSTDMNSPSAVDETRAQLTDFNIALSNLMDYMHGHNGDETSAGERTQDDTNKDLQRSTYLTEGEQKKIMNIKLEETSVSFDLNSRSSYDFIGMSSAALEAKHFSNGRLEI

SEQ ID NO: 1064 - protein, 113 aa, Oenococcus oeni
DIKLLVVSDGEGILGIGDWGVQGVDIAVGKLMVYTVAAGIDPSTVLAVVIDAGTNNEKLLKDPMYLGNKFNRVRGDKYYDFIDKFVNHAESLFPNLYLHWEDFGRSNASNILN

SEQ ID NO: 1065 - protein, 462 aa, Bacillus thuringiensis serovar konkukian str. 97-27
MTFSKSTTDKPSYTYEELSEKNKAYVWHPFTQMKDYLEEDPVIIERGEGRKLYDVNGNEYWDGVSSIWLNVHGHQVPELDEAIREQLNKIAHSTMLGLANVPSILLAEKIIEVVPEGLKKVFYSDSGSSAVEIAIKMAFQYWQHKGKPKKQRFVTLKEAYHGDTIGAVSVGAIDLFHQVYSSLLFEAIKMPYPYTYRSPYGNDKAEIVKKHLEEMEELLKDKHEEIAAIIVEPLMQGAGGMITMPKGYLRGLRNLCTKYNVLFITDEVATGFGRTGKMFACEHENVTPDILTAGKGLTGGYLPVAITVTTDEIYNAFLGSYEEQKTFFHGHSYTGNPLGCAVAIANLELYEKTNLIEEVARKTEYVATQLEELFACKHVGDIRQCGLMVGIELVKNKETKEAFEWTERVGVQVCKRSRELGMILRPLGNTIVFMPPLASTIDEIDEMLRILYKAISDITEGE

SEQ ID NO: 1066 - protein, 236 aa, Rickettsia rickettsii
MIDYTKTLTAASKNKTFDEGLRQYMLKVYNYMALALLLTGVAAVTTISVEPIYNLMFQTGFGTIIMFAPLGIALYFFMGFGQMNLQTAQILFWVYAGLTGMSLAYLALIYTGASIARTFFICSSVFGAMSLYGYSTSRDLTSMGSFFAMGLIGLIIASLVNLFLKSSALSFATSLIGIVIFMGLIAWDTQKIKSMYYMAGNDEVGQKLSIMAAFTLYLDFINLFLYLMRFLGNRRD

SEQ ID NO: 1067 - protein, 167 aa, Blumeria graminis
MGPTTTLYDFMPKDKNGEPVPLEKYKGQVVLIVNTASKCGFTPQFEGLEKLYKSVSSTHPGKFTILGFPCNQFGGHDPGSNDEIQNFCRINYGVTFPMLGKVNVNGDTADPLFEWLKVEKPGIMGMKRVKWNFEKWLVSKDGKPIKRYSSTAGPEGFQSLIIEEIEK

SEQ ID NO: 1068 - protein, 78 aa, Glycine max
MGLWMLLEGFLLLANSLAILNEDRFLGPRGWSMSEVSGNGQTKSLKGQIVGLIYATQFLRMPLIALNVLIIVVKMVSG

SEQ ID NO: 1069 - protein, 486 aa, Bordetella pertussis Tohama I
MEDLRNHEFKNYIGGQWVACAAGKTYPNVNPADTDDIVGRFQASQAEDAAAAVAAAQAAFDGWRNLAVSKRAALMQRAADYLEAHAEQFGRELTREEGKALNLAKDEVLRSAQTIRFYAAEGQSFSGETFVNDDPDMVVYSQREPLGVVTVISPWNFPVSIPARKIAPALITGNTVVFKPSSDAPLSGLRLVEAFEQAGLPPGVLNLVTGSASAIGAAITQASQVRAVSFTGSTAAGEQIHRSVDMTTRTQMELGGKNPLIVMADADLDRAVDLVVKGGFSLSGQACTGTSRVLVDAPVKAAFTEKLLAKVKALKVGNSLEGSFDLGPLATARQLESVMRYIEVGKQEARLLCGGERLEGPGYERGYYLTPAVFADVTQQMRIAREEIFGPVIALIEVNGYEDAIAKANDTEYGLAAAIATTNAQYAHRFARDIQAGTVKINRTTTGNLINAPFGGLKRSSTSTFRESGRIGLEFYTQIKTVYRAG

SEQ ID NO: 1070 - protein, 158 aa, Xanthomonas campestris pv. campestris str. ATCC 33913
MNIVRYPQWPTHALQNEIKQVFDRFFEQSGDTDESAVVTAQWVPRVDIKEEANQFVLYADLPGIDPSQIEVQMDKGILSIKGERKSESSSETERFSRIERRYGSFHRRFALPDSADADGITADGRNGVLEIRIPKRPAATPRRIQVGGGQDGGGTTVQ

SEQ ID NO: 1071 - protein, 415 aa, Glycine max
  misc_feature (279)..(279): Xaa can be any naturally occurring amino acid
MGNCWGPPPHNPTPTTTGNLSSSTGTTGTSQAISSISYTTTTTTTTTSSGSGSSSINSKFSVSSGGQPYPNGQILPTSNLRIFTFAELKAATRNFKADTVLGEGGFGKVFKGWLEEKATSKTGSGTVIAVKKLNSESLQGLEEWQSEVNFLGRLSHPNLVKLLGYCLEESELLLVYEFMQKGSLENHLFGRGSAVQPLPWDIRLKIAIGAARGLAFLHTSEKVIYRDFKASNILLDGSYNAKISDFGLAKLGPSASQSHVTTRVMGTYGYAAPEYVATXGHLYVKSDVYGFGVVLVEILTGQRALDTNRPSGLHSLTEWVKPYLHDRRKLKGIMDPRLEGKFPSKAAFRIAQLSLKCLASEPKQRPSMKEVLENLERIQAANEKPVEPKFRSTHAASRQGHQAVHHRSPRQDGSY

SEQ ID NO: 1072 - protein, 331 aa, Oryza sativa (japonica cultivar-group)
MREEEEPSWFARWEEQLPAPDELMPLSQSLITPDLAVAFDIPTHGGGGGGGVGGGVVGGDGVGGGGGGGGGGGGGVGAGEMNGGASSAAGSSGGGGGGGGGDEPARTLKRPRLVWTPQLHKRFVDAVAHLGIKNAVPKTIMQLMSVDGLTRENVASHLQKYRLYLKRMQGVGNGGGGGGGGGAGAGGSHSSGSGTDAATEHLFATGPVPFLPPGRAPAGGDPYPPFAPMGGHHHHPPQIGHFHHHPAARPLGHYGSGPGAGFDHGFLSRAVAGGGPPVGPPGMHHRMVGPAAGMAMMAPSPFAEELELGSRGGGGGGGRRELTLFPTTGDH

SEQ ID NO: 1073 - protein, 474 aa, Aspergillus niger
MAFARLAARRLPVARRLVPSIDSLPQQRFFSMSQHVKSQNKASVPNPDPAADSVSVAFVNDQSPYMLPTYVRPAPVMVKGQGCYLWDMENRKYLDLTAGIAVNSLGHCDPEVAQIIAEQAEVLVHASNLYYNAWTGALSKLLIDVTQKSGAMRDASQVFICNSGTEANEAAIKFARKVGRSLDPSGAKHEVVSFHNSFHGRTMGALSATPNPKYQTPFSPMLPGFKYGNYNDVAQLESLVTEKTCGVIVEPIQGEGGINVATPEFLVALRKRCDEVGAVLIFDEIQCGLSRTGSFWAHAHPSLAPASGEAAHPDILTSAKALGNGIPIGATIVSEKTVAKHIKPGDHGTTYGGNPLVCRVAHHIVNRLADPELQKSVEIKGDLLVSGFKDLQKKFPNVISEIRGRGLIRGLQLSPEFVSKAGDLVGAARERGMLIITAGEGCIRFVPPLTITEEQIKSGLKILEQALEAVVAQA

SEQ ID NO: 1074 - protein, 336 aa, Lactobacillus reuteri
MEALVLTGKKQLEIEDIKEPEIKPDEVLIHTAYAGICGTDKALYAGLPGSASAVPPIVLGHENSGVVTKVGSEVTNVKPGDRVTVDPNIYCGQCKYCRTQRPELCEHLDAVGVTRNGGFEEYFTAPAKVVYPIPDDVSLKAAAVVEPISCAMHGVDLLETHPYQKALVLGDGFEGQLFAQILKARGIHEVTLAGRSDEKLENNRKHFGVKTIDTTKEEIPADAYDIVVEAVGLPATQEQALAAAARGAQVLMFGVGNPDDKFSVNTYDVFQKQLTIQGAFVNPYTFEDSIALLSSGVVDPLPLFSHELDLDGVEDFVSGKLGKVSKAVVKVGGEEA

SEQ ID NO: 1075 - protein, 435 aa, Nostoc sp. PCC 7120
MTTELLQQVRVIDPVSGIDNITDVLIADGVIQAIAPNIPNTRPDTQIRDCRGLVLGPGLVDLYSHSGEPGFEERETLASFLQAAAAGGFTKVSILPDTSPAIDNPALVAQLQKRGQGAGGRGQGEKSPIPNPQYLAPLLYIWGAMTLDVAGKQMTELADLAAAGVVGFTDGLPLDNLSLVRRLLEYVQPLGKPVAFCPCDRQLSANGVMREGADALRFGLPPIPPSAETSAIAALLELVAASGNTQVHIMRVSTARSVELIAAAKAQGLPITASTTWLHLLLDTKAVKSYNTSLHLDPPLGNASDVKALREGVRTGVIDAIAIDHAPYTYEEKVQAFAEAPPGAIGFELALPLLWQNLVETGEFTALELWQALSTRPAQCIQQKVSAFAPHHQAELTLFDPQKIWKVEKKNLYTLSSNTSWLGQELQGRVIQTWV

SEQ ID NO: 1076 - protein, 158 aa, Listeria innocua Clip11262
MNVHDFSEKAMNGKEIALSDYKGKVLLIVNTASKCGLTPQLEGLEKMYKKLGGDNFEILGFPCNQFLRQDPGSDEEILEFCQMNYGVTFQMFSKIKVKGKDAAPLYKYLTEQTGGKKVEWNFAKFLIDENGEVVERFPSKMKPEDFEDKVEALVAAVK

SEQ ID NO: 1077 - protein, 512 aa, Bradyrhizobium japonicum USDA 110
MDKPTPKADVFQANRDRVAPLLKTLRADGIGHMIDGKIVPSISGETFETKSPVDGAVLASVARGNAEDIDRAATAAALAFKSWREMGPAMRKKLLHRVADAIEDNADDIAVLECIDTGQAYRFMAKAAIRAAENFRFFADKCAEARDGQNTPSDEHWNVSTRVPIGPVGVITPWNTPFMLSTWKIAPALAAGCTVVHKPAEWSPATAAILARLVKEAGVPDGVLNTVHGFGEEAGKALTEHPAIKAIGFVGESATGSAIMVQGAPTLKRVHFELGGKNPVIVFDDADLDRALDAVVFMIYSLNGERCTSSSRLLIQQSIAEKFVEKLTARVKALKVGHPLDPSTEIGPLIHERHLAKVCSYFDVARKDGATIAVGGKAYDGPGGGHYVEPTLVTGAHGKMRVAQEEVFGPFLTVLPFKDEADAIEVANDIRYGLTGYVWTNDVGRALRVADALEAGMIWLNSENVRHLPTPFGGMKASGIGRDGGDYSFDFYMETKHVSLARGTHKIQKLGI

SEQ ID NO: 1078 - protein, 297 aa, Glycine max
  misc_feature (128)..(128): Xaa can be any naturally occurring amino acid
SYVGPPPRYADVSWPGEAHTYKIEKILFHGKSEFQELLVFESSRQGKVAILDGHIQLTENDEFAYQEMLTHLALCSIPDPKKVLLIGGGDGGILREISRHSSVEHIDICELDQMVIDVYSEFFPDIAXGYEDPRVHVHISDGVAFINSVPEGTYDVIISDAFPAMGHSADVLADECFLESVAKALRPGGVFSAPADSLWHKNFVVADTIANCKKIFKGSVNYAWTTVPTYARHFLSNYIGVIGFMLCSTEGPPVNFKHPINKLNPEKNGVAKGPTKFYNPEIHAAAFCLPSFVDKVD

SEQ ID NO: 1079 - protein, 120 aa, Zea mays
MNAPDRYERFVVPEGTKKVSYERDTKIVNAASFTVEREDHTVGNILRMQLHRDPNVLFAGYKLPHPLQYKIIVRIHTTSQSSPTQAYTQAINDLDKELEYLKQAFEDEKNRYEDRMKQGF

SEQ ID NO: 1080 - protein, 343 aa, Corynebacterium glutamicum ATCC 13032
MRIATLTSGGDCPGLNAVIRGIVRTASNEFGSTVVGYQDGWEGLLGDRRVQLYDDEDIDRILLRGGTILGTGRLHPDKFKAGIDQIKANLEDAGIDALIPIGGEGTLKGAKWLSDNGIPVVGVPKTIDNDVNGTDFTFGFDTAVAVATDAVDRLHTTAESHNRVMIVEVMGRHVGWIALHAGMAGGAHYTVIPEVPFDIAEICKAMERRFQMGEKYGIIVVAEGALPREGTMELREGHIDQFGHKTFTGIGQQIADEIHVRLGHDVRTTVLGHIQRGGTPTAFDRVLATRYGVRAARACHEGSFDKVVALKGESIEMITFEEAVGTLKEVPFERWVTAQAMFG

SEQ ID NO: 1081 - protein, 488 aa, Lycopersicon esculentum
MACSVDTLAPFLGPNTTNAVAAASYICNQFSGVSDRFVDTGYAIDSTYLLFSAYLVFSMQLGFAMLLAGSVRNTMNIMLTNVLDAAAGGLFYYLFGFAFALGGPSNGFIGRHFFGLKEIPSNSFDYMNFLYQWAFAIAAAGITSGSIAERTQFVAYLIYSSFLTGFVYPVVSHWFWTPDGWASPTNSNLLFGSGVIDFAGSGVVHMVGGIAGFYGALIEGPRIGRYDHTGRSVALRGHSASLVVLGTFLLWFGWYGFNPGSFNKILVTYGASGGYYGQWSAVGRTAVTTTLAGCTAALTTLFGKRILSGHWNVTDVCNGLLGGFAAITAGCSVVEPWAAIICGFVAALVLIGFNMLAEKFKYDDPLEAAQLHGGCGAWGIIFTGLFAKGEFVDQVYPGKPGRPHGLFMGGGGKLLGAHIIQILVIIGWVSATMGPLFYILHKFKLLRISSEDEMAGMDLTRHGGFAYYHEEDPKLGMQMRRIEPTTST

SEQ ID NO: 1082 - protein, 457 aa, Vibrio vulnificus YJ016
MEYIAHSILIISAHQKKDRPMTNLTRRQQIEALEKDWATNPRWKNVKRTYTAEEVVALRGSMVPANTIAQRGADKLWSLVNGSSKKGYVNCLGALTGGQAVQQAKAGIEAIYLSGWQVAADNNTASTMYPDQSLYPVDSVPSVVKRINNSFRRADQIQWSNGKSPEEGGIDYFLPIVADAEAGFGGVLNAYELMKSMIEAGAAGVHFEDQLASVKKCGHMGGKVLVPTQEAVQKLVAARLAADVAGTTTLVIARTDANAADLLTSDCDPYDADFIVGERTQEGFYRVRAGIDQAISRGLAYAPYADLIWCETATPCLEEARKFAEAIHAEYPDQLLAYNCSPSFNWEKNLDAETIAKFQQELADMGYKYQFITLAGIHNMWFNMFELAHAYAQGEGMRHYVEKVQRPEFEAAEKGYTFVAHQQEVGTGYFDKMTNTIQGGNSSVTALTGSTEEDQFH

SEQ ID NO: 1083 - protein, 197 aa, Glycine max
MSASRFIKCVTVGDGAVGKTCMLISYTSNTFPTDYVPTVFDNFSANVVVDGSTVNLGLWDTAGQEDYNRLRPLSYRGADVFLLAFSLISRASYENVAKKWIPELRHYAPGVPIILVGTKLDLRDDKQFFQDHPGAVPITTAQGEELRKLIGAPIYIECSSKTQQNVKAVFDAAIKVVLQPPKQKKKKRKGQKACSIL

SEQ ID NO: 1084 - protein, 253 aa, Brassica napus
  misc_feature (50)..(50): Xaa can be any naturally occurring amino acid
  misc_feature (58)..(58): Xaa can be any naturally occurring amino acid
NHREYQDLQRLYSEIGHPPSDAFLFLRSYPNRRKQNPPTRFLRLTHKLRXTSTDFILXGNHHHSTIIRIFGYYDECKRRFNVRLWKIFTDCFNCLPVAALIDDKILCMHGGLSPELDNLNQIREIQRPTEIPDSGLLCDLLWSDPDQKIEGWADSDRGISCTFGADKVAEFLDKNDLDLICRGHQVVEDGYEFFAKRRLVTIFSAPNYGGEFDNAGALLSVDESLVCSFEIMKPALASSSGHPLKKVPKMGKS

SEQ ID NO: 1085 - protein, 371 aa, Vibrio vulnificus YJ016
MPLNHSCPPLWGHLSSFYPNKECSMFFEWQGNEPATLQCVDKFFETDDTVSIRLADLTESLLFQFKPGQFVNLGVEIDGKMEFRAYSISSLAGEEYLQFTIKRVEGGKVSNFIIDSLLIGDTVQALAPAGEFNCVDHPPRELDGQGKALLISAGCGVTPVFAMAKHWLSNEMNVDIEFLHIARSAQETIYFDHLSTCQSAYAHFHLKLLLKDAQGTTHPQGRFNAQWLQDLVPDFATRTIYLCGPNQFMQDTQDYLQALGFDMNHFYHESFTPEKVEAMEASDEEVCISVPDFAQTINAKKGQLLADVLENAGLPLIVACRSGICGSCKCKVANGQVRSISQETLTADEIAQGYVLACSSHIESDLDVSLH

SEQ ID NO: 1086 - protein, 353 aa, Xylella fastidiosa 9a5c
MRGYVLEAKGTAKWKDVPMPVLGPNDALVRPTAVATCTTDVHMIATAALPKTVGKVIGHEAVGVVEKVGENVKAFRPGDRVVLPCGNSDWRHPRAQRGEAKYYQTNSPYYSDDPSIGGVFSEYVRTLDADLNLARIPDKVSDLQAVMLPDMAATGFTGVERLGIQFGETVLVMGLGPVGLMAVAGAALRGAGRIIGVDSRPNTVELARAYGVTDIVDFTGGQTLEKVMALTAGQPVDSVLIASGGTASEVFTTALKAVKFGGRVACVSGFLHDESVTIPLEVWNYGFMEKFLTGVHVQDGRDWIERLLAMLECGRFDTRPLVSHVLHGWDSLEQGIELMRSRDPAVIKPVIVI

SEQ ID NO: 1087 - protein, 215 aa, Solanum bulbocastanum
MLTCITCKQKIEDDGGEEGPRGRAPTPHTKDSIKSLTAQIKDIALKVSGAYKCKSSTPAGTYRKGHRPYPDFDTISEGVPYPFQPASSSSTPAWDFTSAGNLRTPRPDSRFARGFSGGGGGAESISQSGDVVVEDDGQKDWTAHVEPGVQITFVSLPNGGNDLKRIRFSRDMFNKWQAQRWWGENYDRIMELYNVQRFNKQALNTPGRSEDGAWI

SEQ ID NO: 1088 - protein, 121 aa, Brucella melitensis biovar Abortus
MADKSVFDTCSTASTPRKNWASSLKVSGHIKWFDVAKGYGFIVPDQPGLTDILLHVTSLRRDGFQTALEGARIVCEVRHGDRGLQCFRVLSMDASTAIHPAQMPPQCTHVTVTPSSGLERV

SEQ ID NO: 1089 - protein, 359 aa, Capsicum chinense
MGSINQSLTQTEDEAFVFAMQLASASVLPMVLKATVELDLLEIMAKSGPGAFISPSELAAQLPTKNPEAPVMLDRMFRLLATYSVLNCTLRTLPDGRVERLYSLAPVCKFLTKNGDGVSIAPILLMNQDKVLMESWYHLTDAVLDGGVPFNKAYGMTTFEYHGTDPRFNKVFNCGMSDHTTLSMKKILEDYTGFEGLNSIVDVGGGTGATVNMIVSKYPSIKGINFDLPHVIRDAPSYPGVEQVGGDMFVSVPKADAIFMKWICHDWSDDHCIKLLKNCYEALPANGKVIIVECILPEAPDTSAATKSKVHGDIIMLAHNPGGKERTEKDFEALANWGWFSRFRKVCCAYHTWVMEFNK

SEQ ID NO: 1090 - protein, 476 aa, Aquifex aeolicus VF5
MIEKKMLIGGEWVDKEEKIEVIYPYTRKPIGRVPKGDEKDVEKAIERAKEGFKEIFSLTAYERYEILMRAAQLLKERAEEFAKTLVLEVGKTIREARTEVQRAIQTLIFSAEEAKRVNGETFPIDAHPNGKGKLGFYIRVPVGIVSAITPFNFPLNLSMHKVAPALAAGNAVILKPSERTPLTPLMLGEILLEAGVPPKALSVIPGYGDVGKAMTTHPDVRVVSFTGSRKVGDIIARQVGIKKLVLELGSNSAIILHKDGNLEKAVEKTVQGGYAIAGQVCISVQRVFVHEDLYDEFIKRLKERVSKLKVGDPMNEDTDLGPMIAPSELERIQEWISEAVQKGAKIEAGGLRCAEDETIFSPTIVSLVPEDSKLFKEEAFAPVVAVNPYKDIEEAIRWVNSSDYGLQVGVFTNDVKLAWKCIKEIEAGGVLINEGPTFRADHMPYGGVKYSGIGREGPKFAIEDYTEIKTVIFDLT

SEQ ID NO: 1091 - protein, 258 aa, Zea mays
  misc_feature (17)..(17): Xaa can be any naturally occurring amino acid
  misc_feature (51)..(51): Xaa can be any naturally occurring amino acid
  misc_feature (110)..(110): Xaa can be any naturally occurring amino acid
  misc_feature (131)..(131): Xaa can be any naturally occurring amino acid
  misc_feature (169)..(169): Xaa can be any naturally occurring amino acid
  misc_feature (178)..(178): Xaa can be any naturally occurring amino acid
  misc_feature (190)..(190): Xaa can be any naturally occurring amino acid
  misc_feature (197)..(197): Xaa can be any naturally occurring amino acid
  misc_feature (205)..(205): Xaa can be any naturally occurring amino acid
  misc_feature (224)..(224): Xaa can be any naturally occurring amino acid
MAKNYPTVSAEYSEAVXEKARRKLRALIAEKSCAPLMLRLAWHSAGTFDVXRRGTGGPFGTMKHQSELAHGANAGLDIAVRLLEPIKEEFPILSYADFYQLAGVVAVEVXGGPEIPFHPGRRDKPQPPPEXGRLPDATKGSDHLRQVFGKQMGLSDQDIVALSGGHTLXGRCHKERSXGFEGAWTTNPLXFDNSYFXELLSGDKXRALLQLPSDKALLSDPVFXRPLVEKYAADEKAFFDDYKEAHLKLSRTGGLLML

SEQ ID NO: 1092 - protein, 251 aa, Triticum aestivum
  misc_feature (125)..(125): Xaa can be any naturally occurring amino acid
  misc_feature (199)..(200): Xaa can be any naturally occurring amino acid
  misc_feature (204)..(205): Xaa can be any naturally occurring amino acid
  misc_feature (222)..(222): Xaa can be any naturally occurring amino acid
  misc_feature (224)..(224): Xaa can be any naturally occurring amino acid
  misc_feature (236)..(236): Xaa can be any naturally occurring amino acid
  misc_feature (243)..(243): Xaa can be any naturally occurring amino acid
MKTFLIFVLLAMAMNIATAARQLNPSNKELQSPQQSFSHQQQPFPQQPYPQQPYPSQQPYPSQQPFPTPQPQFPQQSQQPFPQPQQPIPLQPQQPFPQQPQQPQQPFPQPQQPFPWQPQQPFPQXTQQSFPLQPQQPFPQQPQQPFSQPQLQFPHQPEQISPQQPQQPFLLESQQPFPQQPQQPFSQPQQLIPMQPQQXXSPRXXQQSQQTFSRGPNNYFLXLXQPIPQATNKQTXSPLQTGXQPFPPSWQ

SEQ ID NO: 1093 - protein, 158 aa, Streptococcus intermedius
MTKIYDFSIFDQNNRSISLEIYKGNVLLIVNTATGCGLTPQYKGLQHLYTRYQNQGFEILDFPCNQFMGQAPGTAEEINRFCSLHYQTTFPRFAKVKVNGKEADPLYIWLKEQQAGPLGKRIEWNFTKFLINREGQVVKRFSSKAEPKEIEESLQKLL

SEQ ID NO: 1094 - protein, 227 aa, Thermus thermophilus HB27
MERPLESYKKEAAHAAIAYVQDGMVVGLGTGSTARYAVLELARRLREGELKGVVGVPTSRATEELAKREGIPLVDLPPEGVDLAIDGADEIAPGLALIKGMGGALLREKIVERAAKEFIVIADHTKKVPVLGRGPVPVEIVPFGYRATLKAIADLGGEPELRMDGDEFYFTDGGHLIADCRFGPIGDPLGLHRALLEIPGVVETGLFVGMATRALVAGPFGVEELLP

SEQ ID NO: 1095 - protein, 429 aa, Rhodococcus equi
MSTTGTPRTAEEIQKDWDTNPRWKGVTRNYTAEQVVKLQGTVVEEATLARRGSEILWDLVNNEDYINSLGALTGNQAVQQVRAGLKAIYLSGWQVAGDANLSGHTYPDQSLYPANSVPQVVRRINNALLRADEIAKVEGDTSVDNWLAPIVADGEAGFGGALNVYELQKAMIAAGVAGSHWEDQLASEKKCGHLGGKVLIPTQQHIRTLTSARLAADVADVPTVVIARTDAEAATLLTSDVDERDREFLDGTRTAEGFYGVKNGIEPCIARAKAYAPYSDLIWMETGVPDLEVAKKFAEAVRSEFPDQLLAYNCSPSFNWKAHLDDATIAKFQKELGAMGFKFQFITLAGFHSLNYGMFDLAHGYAREGMTAFVDLQEREFKAAEERGFTAIKHQREVGAGYFDSIATTVDPNTSTAALKGSTEEGQFH

SEQ ID NO: 1096 - protein, 456 aa, Arabidopsis thaliana
MENKPSVLTERYEVGRLLGQGTFAKVYFGRSNHTNESVAIKMIDKDKVMRVGLSQQIKREISVMRIAKHPNVVELYEVMATKSRIYFVIEYCKGGELFNKVAKGKLKEDVAWKYFYQLISAVDFCHSRGVYHRDIKPENLLLDDNDNLKVSDFGLSALADCKRQDGLLHTTCGTPAYVAPEVINRKGYEGTKADIWSCGVVLFVLLAGYLPFHDTNLMEMYRKIGKADFKCPSWFAPEVKRLLCKMLDPNHETRITIAKIKESSWFRKGLHLKQKKMEKMEKQQVREATNPMEAGGSGQNENGENHEPPRLATLNAFDIIALSTGFGLAGLFGDVYDKRESRFASQKPASEIISKLVEVAKCLKLKIRKQGAGLFKLERVKEGKNGILTMDAEIFQVTPTFHLVEVKKCNGDTMEYQKLVEEDLRPALADIVWVWQGEKEKEEQLLQDEQGEQEPS

SEQ ID NO: 1097 - protein, 546 aa, Glycine max
MGNCCSQGNVADGPADDSAAANDKGEANQQGSNNHANDNNDNSTNPTTAPTTTSKPPPTVTPPTSKPSKPAAMGPVLGRPMEDVRATYTIGKELGRGQFGVTHLCTNKATGQQFACKTIAKRKLVNKEDIEDVRREVQIMHHLSGQPNIVELKGAYEDKQSVHLVMELCAGGELFDRIIAKGHYTERAAASLLRTIMQIIHTFHSMGVIHRDLKPENFLMLNKDENSPVKATDFGLSVFFKEGETFKDIVGSAYYIAPEVLKRKYGPEVDIWSVGVMLYILLSGVPPFWAESEHGIFNAILRGHIDFTSDPWPSISNAAKDLVRKMLTTDPKQRLTSQEVLNHPWIKEDGEAPDKPLDNAVLNRLKQFRAMNQFKKVALRVIAGCLSEEEIMGLKEMFKGMDTDNSGTITIEELKQGLAKQGTKLTEQEVKQLMEAADADGNGTIDYDEFITATMHMNRMNREEHLYTAFQYFDKDNSGFITTEELEQALREYNMHDGRDIKEILQEVDGDNDGRINYDEFAAMMRKGNPEVMTKKRRDSLPLPLP

SEQ ID NO: 1098 - protein, 351 aa, Clostridium beijerinckii
MKGFAMLGINKLGWIEKERPVAGSYDAIVRPLAVSPCTSDIHTVFEGALGDRKNMILGHEAVGEVVEVGSEVKDFKPGDRVIVPCTTPDWRSLEVQAGFQQHSNGMLAGWKFSNFKDGVFGEYFHVNDADMNLAILPKDMPLENAVMITDMMTSGFHGAELADIQMGSSVVVIGIGAVGLMGIAGAKLRGAGRIIGVGSRPICVEAAKFYGATDILNYKNGHIVDQVMKLTNGEGVDRVIMAGGGSETLSQAVSMVKPGGIISNINYHGSGDALLIPRVEWGCGMAHKTIKGGLCPGGRLRAEMLRDMVVYNRVDLSKLVTHVYHGFDHIEEALLLMKDKPKDLIKAVVIL

SEQ ID NO: 1099 - protein, 188 aa, Oryza sativa (japonica cultivar-group)
MSAVNITNVAVLDNPTAFLNPFQFEISYECLIPLDDDLEWKLIYVGSAEDENYDQQLESVLVGPVNVGTYRFVLQADPPDPSKIREEDIIGVTVLLLTCSYMGQEFMRVGYYVNNDYDDEQLREEPPAKLLIDRVQRNILADKPRVTKFPINFHPEPSTSAGQQQQEPQTASPENHTGGEGSKPAADQ

SEQ ID NO: 1100 - protein, 317 aa, Yersinia pestis CO92
MTDKLTSLRQITTVVADTGDIAAMKLYQPQDATTNPSIILNAAQIPEYRKLIDEAIAWAREQSSDHAQQIVDATDKLAVNIGLEILKLIPGRISTEVDARLSYDTVASVAKAKRLIKLYNEAGISNDRILIKLASTWQGIRAAEQLEKEGINCNLTLLFSFAQARACAEAGVFLISPFVGRILDWYKANGDQKEFAPSEDPGVVSVTEIYQYYKKHGYKTVVMGASFRNLGEIIELAGCDRLTIAPSLLKELAESEGPVERKLAYTGEIQAKPAPLTEAEFYWQHNQDPMAVDKLADGIRKFAIDQGKLEKMISDLL

SEQ ID NO: 1101 - protein, 536 aa, Glycine max
MDSNSSSPSPNNHASTTKINGFFHPKLGSQPATSSRSRLAMASPVNSDPKVVTGTAGYILEDVPHFTDYIPNLPTYPNPLQDNPAYSVVKQYFVHVDDSVPQKVVVHKDGARGVHFRRAGPRQKVYFEADEVQAAIVTCGGLCPGLNTVIRELVCGLHHMYGVKRVLGINGGYRGFYARNTITLTPKSVNDIHKRGGTVLGTSRGGHDTKKIVDSIQDRGINQVYIIGGDGTQKGASAIFEEVRRRGLKVSVVGIPKTIDNDIPVIDKSFGFDTAVEEAQRAINAAHVEAESVENGIGVVKLMGRNSGFIAMYATLASRDVDCCLIPESPFYLEGPGGLYEYIEKRLKENGHMVIVIAEGAGQELVSESVQSMSKQDASGNKLFQDVGLWISQKIRDHFAAQKTLPITLKYIDPTYMIRAIPSNASDNVYCTLLAQSAVHGAMAGYTGYTSGLVNGRQTYIPFYRITERQNHVVITDRMWARPLSSTNQPSFLDSKGDNEEKKEEEAALNQLPDGHCSKDTSLANKEINSIYPTTC

SEQ ID NO: 1102 - protein, 158 aa, Pseudomonas putida KT2440
MSVSSSSFTDGGVIALQQVGQDPACGAGEERTPQLSWDNLPAGTRSLALIMFDPDGGKGVGVVHWVAYNIDPEHDGLKEGMAGVSGPYVTVGRNSRGTQSYRGPCPPAGDNPHHYALTLIATDLPLGTLPEGLDRSGLLQLLQGHALGAQSLVGRYGH

SEQ ID NO: 1103 - protein, 413 aa, Zea mays
  misc_feature (299)..(299): Xaa can be any naturally occurring amino acid
MGNCASAIDAFVQRGNRASPAATAGMSASRRTSSSATTGKLSTLSSASTFMPSTVSGGDDDDDDPVGQILESPNLKIYTFAELKSATRNFRPETVLGEGGFGKVYKGWVDEKTMNPSKASTGVMVAVKKLNPESVQGMEQWQSEVNFLGRISHPNLVRLLGYSMDDNELLLVYEFMAKGSVENHLFRRGAVYEPLPWSLRLKILIGAARGLAFLHSSERQIIYRDFKASNILLDSHFNAKLSDFGLAKHGPDGGESHVTTRVMGTYGYAAPEYVSTGHLYVKSDVYGFGVVLLEMISGXRALDPSREREKVNLVNWARPLLSDRRKLSQLMDGGLEGQYNPKAALLAAQLTLRCLNGDPKRRPSMKEVVEALEKIESSAKGRMAREPRNSSRRGLVQSPRGDSARNNSSSRGR

SEQ ID NO: 1104 - protein, 487 aa, Ralstonia sp. SJ98
MQTQLFIDGRFVAALSGETLATLNPHDNSEIAQVSMAGREDVDRAVQAAKKAFPAWSAMAAADRGRLLLKLADAIEANADELARLESMDTGHPIRDTRNLDVPRTAATFRYFGGMADKFEGSVIPVEASFLNYLTREPVGIVGQVVPWNFPLMFTSWKMAPALAAGNCVVMKPAELTPLSSLAIAQLMAEVGFPAGVVNVLPGFGHVAGQYIAEHPEIGKVAFTGSTAVGRKIVQASSGNLKKVQLELGGKGANVVFGDANLDAVVQGSAFGIFHNQGQACIAASRLIVHESIADDLLERFTSLARSIRIGDPLDPSTEMGPLTSQMHRDRVLSYVDVAREQGGRVLAGGKSPDAAGLAKGCYVEPTIVQAKPTDRVAQEEVFGPFVTVSTFKSDEEGLAIANGTEYGLGAGLWTRDLQRAHLFARQLKSGMVWINCYKRVNPGSPFGGVGASGYGREMGFEVMREYTQAKSVWVNVDANIPPYYPR

SEQ ID NO: 1105 - protein, 364 aa, Nicotiana tabacum
MAFQIARRLLRSRASSSIRYLDRSFSSESNSNLIRATLFPGDGIGPEIADSVRQIFKTAEVPIEWEEHYVGKEIDPRTNSFLTWESLESVRRNKVGLKGPMATPIGKGHRSLNLTLRKELNLYANVRPCYSLPGYKTRYDDVNLITIRENTEGEYSGVEHQVVRGVVESLKIITRQASLRVAEYAFHYAKAHGRERVSAIHKANIMQKTDGLFLKCCREVAEKYPEIKYEEVVIDNCCMMLVKNPALFDILVMPNLYGDIISDLCAGVIGGLGLTPSCNIGEGGIALAEAVHGSAPDIAGKNLANPTALLLSAVTMLRHLELHDKADRIQGAVLNTIAEGKYRTGDLGGTSSTTDFTNAICDHL

SEQ ID NO: 1106 - protein, 139 aa, Aquifex aeolicus VF5
MLSEETIRVIKSTVPLLKEHGTEITARMYELLFSKYPKTKELFAGASEEQPKKLANAIIAYATYIDRLEELDNAISTIARSHVRRNVKPEHYPLVKECLLQAIEEVLNPGEEVLKAWEEAYDFLAKTLITLEKKLYSQP

SEQ ID NO: 1107 - protein, 442 aa, Pseudomonas aeruginosa UCBPP-PA14
MNNEPQSSSLDNFWMPFTANRQFKARPRLLESAEGIHYIAQGGRRILDGTAGLWCCNAGHGRREISEAVARQIATLDYAPPFQMGHPLPFELAARLAEIAPPGLNKVFFTNSGSESADTALKIALAYQRAIGQGTRTRLIGRELGYHGVGFGGLSVGGMVNNRKAFSANLLPGVDHLPHTLDVARNAFTVGLPEHGAEKAEELERLVTLHGAENIAAVIVEPMSGSAGVVLPPKGYLQRLREITRKHGILLIFDEVITGFGRVGEAFAAQRWGVVPDLLTCAKGLTNGSIPMGAVFVDEKIHAAFMQGPQGAIEFFHGYTYSGHPVACAAALATLDIYRRDDLFQRAVELEGYWQDALFSLRDLPNVVDIRAVGLVGGVQLAPHADGPGKRGYDVFERCFWEHDLMVRVTGDIIAMSPPLIIDKPHIDQIVERLAQAIRASV

SEQ ID NO: 1108 - protein, 321 aa, Bartonella bacilliformis
YIDGDEGILLYHGYSIDQLAENGDFLETCYLLLYGELPNKQQKIDFDRCIMRHTMVHEQFARFFHGFRRDSHPMAVMVACLGAMSAFYHDSINITDPQQRMIASIRLISKVPTLAAMAYKYSIGQPFVYPRNDLNYATNFLHMCFSVPCEEHKISPVIARAMDRIFTLHADHEQNASTSTVRLAGSSGANPYACIAAGVACLWGPAHGGANEACLKMLQEIGSVKKIPEFIARAKDKNDPFRLMGFGHRVYKNYDPRAKIMQKTCHEVLQELNIQDDPLLDIAMELEHIALNDEYFINKKLYPNVDFYSGITLKALGFPTE

SEQ ID NO: 1109 - protein, 378 aa, Taxodium distichum
FSIKGNGIGNGNGHCNGYSNGHGHCINGYSNGISASVSSNGVSHLPYSNGNTVHHSNGNSHTSPSFGDGRRRCFWYEEEIEDDLRWCFALNRIIHTGVSEYQDIALIDTRPFGKALVIDGKMQSTEVDEFIYHESLVHPALVYHSHPKSAFIMGGGEGSTAREILRHKCVKKVVMCDIDKEVVDFCKKYLVVNREAFSNSRLELVINDARTELQSRQERFDVIIGDLADPVEGGPCYQLYTKSFYELVIKPKLNHQGIFVTQAGPAGVLTHTQVFSSIYNTLRQVFKHVMPYSAHVPSFADTWGWVMASDHPLTLKAEEIDDRIKQRIKGELQFLDGQTFLVAATLNKSVRKSLSKETHVYTEETARFIHGHGKASYQ

SEQ ID NO: 1110 - protein, 193 aa, Triticum aestivum
MKTFLIFVLLAMAMKIATAARELNPSNKELQSPQQSFSHQQQPFPQQPYPQQPYPSQQPYPSQQPFPTPQQQFPQQSQQPFTQPQQPTPLQPQQPFPLRPQQPFPQQPQQSQQSFPQPQPQQPQQPSILQPQQPLPQQPQQPFQQPQQQLSQQPEQTISQQPQQPFPQQPHQPQQPYPQQQPYGSSLTSIGGQ

SEQ ID NO: 1111 - protein, 318 aa, Silene latifolia
NFLFKSPKEDSPLKATDFGLSDFIKPSRKFTDIVGSAYYVAPEVLKRKSGPESDVWSIGVITYILLCGRRPFWDKTEDGIFKEVLRNKPDFRRKPWPSISNSAKDFVRKLLVKDPFVRPTAAQALSHQWVREGGSALDIPIDISVLHNMRQFVKYSRMKQFALRALASTLNDDELANLRDQFDAIDVDKSGTISLEEMRQALAKDLPWKLKDSRVMEIVEAIDSNTDGFVDFTEFVAATLHVHQLHELDNEKWQELSQRAFEKFDVDKDGYITPDELRMQTGLKGSMEPLLEEADIDKDGRISLAEFRRLLRSASMSS

SEQ ID NO: 1112 - protein, 153 aa, Bdellovibrio bacteriovorus HD100
MANLPNPWRERSLANPFREFGRHQERIDRLLNELMELRSGTLGEDMSLMPSSELVEEEKNYLLKVDLPGIKKEDVKVEVEGDRLTIRAERRSEKEEKSKKRYFSEISYGSCMRSFALPQSIDEKKVDAKFENGVLSVTIPKTTESKSKQISVH

SEQ ID NO: 1113 - protein, 318 aa, Silene latifolia
NFLFKSPKEDSPLKATDFGLSDFINRSRKFTDIVGSAYYVAPEVLKRKSGPESDVWSIGVIMYILLCGRRPFWDKTEDGIFKEVLRNKPDFRRKPWPSISNSAKDFVRKLLVKDPLVRLTAAQALSHQWVREGGNALDIPIDISVLHNMRQFVKYSRMKQFALRALASTLNDDELANLRDQFDAIDVDKSGTISLEEMRQALAKDLPWKLKDSRVMEIVEAIDSNTDGFVDFTEFVAATLHVHQLHELDNEKWQELSQRAFEKFDVDKDGYITPDELRMHTGLKGSMEPLLEEADIDKDGRISLAEFRRLLRSASMSS

SEQ ID NO: 1114 - protein, 381 aa, Staphylococcus aureus subsp. aureus Mu50
MLTEQEKDIIKQTVPLLKEKGTEITSIFYPKMFKAHPELLNMFNQTNQKRGMQSSALAQAVMAAAVNIDNLSVIKPVIMPVAYKHCALQVYAEHYPIVGENLLKAIQDVTGLEEHDPVIQAWAKAYGVIADVFIQIEKEIYDQMMWIGFKPFKITNIKQESEDIKSFTVETEEYDFSEFTPGQYITVDVSSDKLPYRAKRHYSIVSGEKNHLTFGVKRDVTTEHEGEVSTILHDEIKEGDMINLAAPVGGFVLENTTEPQLFLGSGIGVTPLVAMYEAASAKGLDTQMVQVAENEQHLPFKDNFNSIASHYDNAKLYTHLKDKQGYIGTEELQAFLANKPEIYICGGTKFLQSMIEALKSLNYDMDRVHYETFIPRLSVAV

SEQ ID NO: 1115 - protein, 221 aa, Arabidopsis thaliana
MDSLATDPAFIDSDVYLRLGLIIEGKRLKKPPTVLSRLSSSLERSLLLNHDDKILLGSPDSVTVFDGRSPPEISIAHYLDRIFKYSCCSPSCFVIAHIYIDHFLHKTRALLKPLNVHRLIITTVMLAAKVFDDRYFNNAYYARVGGVTTRELNRLEMELLFTLDFKLQVDPQTFHTHCCQLEKQNRDGFQIEWPIKEACRANKETWQKRTPDSLCSQTTAR

SEQ ID NO: 1116 - protein, 468 aa, Brucella suis 1330
MKQYTLLIGGEHVATPNHAEVRNPSTGEVVGLMPLASEADLDRAVAAAANAFQTWSRTGDAERAAACRAIANKLSEDAEELARLLTLEQGKTFNGLGSRFELGGAMAWTRHTAELGLPVEVVQDDNEGRVEIHRKPIGVTGSITPWNWPVMIACWHIIPAVRTGNTVVIKPSPLTPLSTIRLVEIINEVLPAGVVNVVTGENSIGAALSAHPGIAKMTFTGSTETGRKIMASAAATLKRLTLELGGNDAGIVLPDADPARIAEGLFWGAFINSGQTCAALKRLYVHDHIYDDVCRHLTEYAANIIIGDGLDEKSVLGPVQNAMQFNKVRELVDDARAKGARIPIGGEAAEGPGYFYPITLVADIDNGTRLVDEEQFGPVLPIIRYSDIDEVIRRANDNPSGLGGSVWSSDVEKARAVALQLECGSVWINKHGAIQPNAPFGGVKQSGIGVEFGTDGLKEFTTIQTVLS

SEQ ID NO: 1117 - protein, 484 aa, Gibberella zeae PH-1
MSTNSTKTLNLKDNYVQIINGKSAPTQKTHQGINPATLEKKPEVPVASQDDLNNAVDAARKAFKSWSKVPWEERRQKLFAWADAVEAQKKEFAQLLTSEQGKPVAQANGEADAAVAWIKGQASLDLTEEVVEDSDTRKVVTRYTPLGIVAAIVPWNFPLMLAASKIAPALLTGNVIIVKPSPFTPYCGLKLVELAQQFFPPGVVQSLSGDDNLGPWITSHPGIDKISFTGSTHTGKLVMQSAAKTLKRVTLELGGNDAAVVFPDVDIDSVAEKVSTLAFMNSGQICLNVKRIYVHESIYEKFRDAVVNHVKNYKLGDGSEEVTSHGPVQNQMQYNRVKTFFEDIEKQGWKVATGGKFDPEPKNGYYITPTVIDNPPEDSRIVVEEPFGPILPLLSWKNEEEVIERANDTRLGLGASVWSADLETAERVAKQLDAGTVWVNTHFDITPMAPFGGHKESGIGAEWGINGLKGMCNVQSLFLSKVAA

SEQ ID NO: 1118 - protein, 180 aa, Arabidopsis thaliana
MASSMLSSATMVASPAQATMVAPFNGLKSSAAFPATRKANNDITSITSNGGRVNCMQVWPPIGKKKFETLSYLPDLTDSELAKEVDYLIRNKWIPCVEFELEHGFVYREHGNSPGYYDGRYWTMWKLPLFGCTDSAQVLKEVEECKKEYPNAFIRIIGFDNTRQVQCISFIAYKPPSFTG

SEQ ID NO: 1119 - protein, 178 aa, Zea mays
  misc_feature (169)..(169): Xaa can be any naturally occurring amino acid
EWKMVRPDLGRIEKWVLRKAFDDEEQPFLPKHILYRQKEQFSDGVGYSWIDGLKAHATSNVTDKMLSNVKFIFPHNTPTTKEAYYYRMIFERFFPQKSAILTVPGGPSVACSTTKAIEWDAQWSGNLDPSGRAALGVHLAGYEHQHDPEHVPAAIAAGSGKKPRTIRVXASPGVAIEG

SEQ ID NO: 1120 - protein, 464 aa, Listeria monocytogenes
MLYSKENKESYLEPVFGSSAEDRDIPKYTLGKEPLEPRIAYRLVKDELLDEGSARQNLATFCQTYMEDEATKLMSETLEKNAIDKSEYPRTAELENRCVNIIADLWHAPKDQKFMGTSTIGSSEACMLGGMAMKFAWRKRAEKLGLDIYAKKPNLVISSGYQVCWEKFCVYWDIDMRVVPMDKEHMQLNTDQVLDYVDEYTIGVVGILGITYTGRYDDIYALNEKLEEYNSKTDYKVYIHVDAASGGFFTPFVEPDIIWDLRLKNVISINTSGHKYGLVYPGIGWVLWKDESYLPEELIFKVSYLGGEMPTMQINFSRSASHIIGQYYNFLRYGFEGYRTIHQKTSDVAQYLAHAVEQTGYFDIFNDGSHLPIVRYKLKDDANVNWTLYDLADRLQMRGWQVPAYPLPKSLENIIIQRYVCRADLGFNMAEEFIQDFQASIQELNNAHILFHDTQQSGVHGFTH

SEQ ID NO: 1121 - protein, 265 aa, Triticum aestivum
  misc_feature (111)..(111): Xaa can be any naturally occurring amino acid
  misc_feature (174)..(174): Xaa can be any naturally occurring amino acid
HWSALSGVDTEIMNVEGHIAPSEKHPGSLLEGFSQTQVSTLAVKDNLLVAGGFQGELICKNLDQEGISFCCRTTYDDNAITNAVEIFNTSSGAVHFIASINDSGVREYDMXERYQLCKHFRFDWPVNHTSLSPDGKLVLVVGDDPDALLIDANSGKTIHSMKGHLDFSFASAWXPDGRTFATGNQDRTCRVWDARNLSQSLHVLRGNLGAIRSTRYTSDGQFLTMAEPADFVHIFDVKSDYNKRTYGSLLQYGRLYNYSYLDSLF

SEQ ID NO: 1122 - protein, 311 aa, Candidatus Tremblaya princeps
MVSSALQFLSQHSELSMDSARFLEALRFRPTHATTNPSLILSACQNNEYNSLVNETIRLHRNEGYRNIADHIRLRFCTELLDRIPGMVSVEIDACCAFNVDASIAHARRIVQLCRPTDARDRILVKIPATWQGVQAAAALRAEGVQCNMTLVFSMLQALVCARNGAYLISPFVGRLSDRMPAMQGSSATQDQGVALALRIYSRLRQEGHATRVMAASFRGEQQVIMASACGMVTVGEHIMRRLAAMRASAMPKPCQQFSEAMQHCPTPRDLHAFERALAQNRTAWLELKHGIEAFACNETQLELLIARRLP

SEQ ID NO: 1123 - protein, 519 aa, Brassica napus
MSGAITCSAADLATLLGPNATAAADYICGQLGTVNNKFTDAAFAIDNTYLLFSAYLVFAMQLGFAMLCAGSVRAKNTMNIMLTNVLDAAAGGFFYYLFGYAFAFGGSSEGFIGRHNFALRDFPTPTADYSFFLYQWAFAIAAAGITSGSIAERTQFVAYLIYSSFLTGFVYPVVSHWFWSPDGWASPFRSADDRLFSTGAIDFAGSGVVHMVGGIAGLWGALIEGPRRGRFEKGGRAIALRGHSASLVVLGTFLLWFGWYGFNPGSFTKILVPYNSGSNYGQWSGIGRTAVNTTLSGCTAALTTLFGKRLLSGHWNVTDVCNGLLGGFAAITAGCSVVEPWAAIVCGFMTSLVLIGCNKLAELVQYGDPLEAAQLHGGCGAWGLIFVGLFAKEKYLNEVYGATPGRPYGLFMGGGGKLLGAQLVQILVIVGWVSATMGTLFFILKRLNLLRISEQHEMQGMDMTRHGGFAYIYHDNDDESHRVDPGSPFPRSALPLAFNFQLFGNLLPFKYCLGFGFEI

SEQ ID NO: 1124 - protein, 72 aa, Zea mays
FCKSALFNFNSFLTVVLLVICTCSYIKMQFPAILNDRTGFRGFFWKAARIGERLSPWVSVGCLAMGISTIFF

SEQ ID NO: 1125 - protein, 454 aa, Oryza sativa (japonica cultivar-group)
MVKGGREALLGGYEMGRTLGEGNFGKVKYARHLATGGHFAVKILDRGRVVSLRAGDQIRREIATLKLLRHPHVVRLHEVAASKTKIYMVLEFVNGGELFERIAVKGKLSEKEGRRLFQQLIDGVSYCHDRGVYHRDLKPENVLVDQKGNIKISDFGLSALPQHLGNDGLLHTTCGSPNYIAPEVLQNKGYDGSLSDIWSCGVILYVMLIGYLPFDDRNIVVLYQKIFKGDTQIPKWLSHSAQNLLRRILEPNPMKRIDMAGIKSHEWFQKDYIPVLPYDDDDEDVQFGARLPAKEQINDEPGDKNSHQINAFQLIGMASSLDLSGFFEDEEVSQRRIRFTSTHPPKDAFDKIESSATELGFQVQRGHSKLKLMRNCKGSKNPESFMVSAEVFELGPSVNVVELRKSNGDPALYRQLCERISSDMGARNTEQIFATASLEDDLQNSNAGTPLFAL

SEQ ID NO: 1126 - protein, 439 aa, Oryza sativa (japonica cultivar-group)
MESKGKILMERYELGKLLGKGTFGKVHYAGNLESNQSVAIKMMDKQQVLKFGLSEQIRREITTMRLVAHKNIVQLHEVMATRNKIYFVMEYVKGGELFEKVAKRGKLTEVVAISTSSNSLSAVDYCHSRGVYHRDLKPENLLLDENENLKVSDFGLSALSESKRQDGLLHTTCGTPAYVAPEVISKIGYDGAKSDIWSCGVILFVLVGGYLPFQGPNLMEMYRKIQHGEFRCPGWFSRKLQNLLYKIMDPNPSTRISIQKIKESTWFRKGPEENRILKERTLNENPPKNVALVLGVRPKKNAHEDVKPMSVTNLNAFEIISFSKGFDLSGMFIVKEWRNEARFTSNKSASTIISKLEDVAKALNLRVRKKDNGVVKMQGRKEGRNGVLQFDIKIFEVTTSYHIIEMKQTSGDSLEYRQLLEEGIRPALKDIVLAWHGDE

SEQ ID NO: 1127 - protein, 497 aa, Camellia sinensis
MASLTCSADQLAQLFGSNTTNAAAATYICDHFTAVSQKFSDAASAIDSTYLLFSAYLVFSMQLGFAMLCAGSVRAKNTLNIMLTNVLDAAAGAIFYYLFGFAFAFGSPSNGFIGSHFFALKSIPTSSFDYSFFLFQWAFAIAAAGITSGSIAERTQFAAYLIYSAFLTGFVYPVVSHWFWSGDGWASASNTNHLLFGSGVIDFAGSGVVHMVGGIAGLYGAFIEGPRIGRFANPGQSVTIKGHSASLVVLGTFLLWFGWYGFNPGSFTKIANPYTSGSYYGQWSAVGRTAVTTTLAGSTAALTTLFLNRVVSGHWNVTDVCNGLLGGFAAITAGCSVVEPWAAVICGLVAALVLIGCNKVAERVKFDDPLEAAQLHGGCGAWGVIFTALFASEKYVNEVYPGKSDRPYGLLMGGGGRLLAAHVIQIVVIVGWVSVTMGPLFFVLHKLKLLRISAEDEIAGMDMTRHGGFAYVYQYHDEDESNKLGMQMRKIDPEDKS

SEQ ID NO: 1128 - protein, 139 aa, Azoarcus sp. EbN1
MSNLIRRDPFDDLLRGFFVRPVDMTAGIQGEAPQMRVDVKEDESAYQVHAELPGIKKEDIHVHIDGPVVSISAERKQEKEVKEGERVLRTERYFGKVSRSFQLGQEIDEGKSSAKFNDGVLELSLPKKAPEQAKRLTID

SEQ ID NO: 1129 - protein, 162 aa, Chlamydomonas reinhardtii
MANPEFYGLSTTTLSGQPFPFKDLEGKAVLIVNVASKCGFTPQYKGLEELYQQYKDRGLVILGFPCNQFGGQEPGDASAIGEFCQRNFGVTFPIMEKSDVNGNDANPVFKYLKSQKKQFMMEMIKWNFEKFLVDKSGQVVARFSSMATPASLAPEIEKVLNA

SEQ ID NO: 1130 - protein, 318 aa, Silene dioica
NFLFKSPKEDSPLKATDFGLSDFIKPSRKFTDIVGSAYYVAPEVLKRKSGPESDVWSIGVITYILLCGRRPFWDKTEDGIFKEVLRNKPDFRRKPWPSISNSAKDFVRKLLVKDPFVRPTAAQALSHQWVREGGSALDIPIDISVLHNMRQFVKYSRMKQFALRALASTLNDDELANLRDQFDAIDVDKSGTISLEEMRQALAKDLPWKLKDSRVMEIVEAIDSNTDGFVDFTEFVAATLHVHQLHELDNEKWQELSQRAFEKFDVDKDGYITPDELRMHTGLKGSMEPLLEEADIDKDGRISLAEFRRLLRSASMSS

SEQ ID NO: 1131 - protein, 318 aa, Silene dioica
NFLFKSPKEESPLKATDFGLSDFINRSRKFTDIVGSAYYVAPEVLKRKSGPESDVWSIGVIMYILVCGRRPFWDKTEDGIFKEVLRNKPDFRRKPWPSISNTAKDFVRKLLVKDPLVRLTAAQALSHQWVREGGNALDIPIDISVLHNMRQFVKYSRMKQFALRALASTLNDDELANLRDQFDAIDVDKSGTISLEEMRQALAKDLPWKLKDSRVMEIVEAIDSNTDGFVDFTEFVAATLHVHQLHELDNEKWQELSQRAFEKFDVDKDGYITPDELRMHTGLKGSMEPLLEEADIDKDGRISLAEFRRLLRSASMSS

SEQ ID NO: 1132 - protein, 318 aa, Silene diclinis
NFLFKSPKEDSPLKATDFGLSDFIKPSRKFTDIVGSAYYVAPEVLKRKSGPESDVWSIGVITYILLCGRRPFWDKTEDGIFKEVLRNKPDFRRKPWPSISNSAKDFVRKLLVKDPFVRPTAAQALSHQWVREGGSALDIPIDISVLHNMRQFVKYSRMKQFALRALASTLNDDELANLRDQFDAIDVDKSGTISLDEMRQALAKDLPWKLKDSRVMEIVEAIDSNTDGFVDFNEFVAATLHVHQLHELDNEKWQELSQRAFEKFDVDKDGYITPDELRMHTGLKGSMEPLLEEADIDKDGRISLAEFRRLLRSASMSS

SEQ ID NO: 1133 - protein, 368 aa, Glycine max
MLTCIARPKKLVGDSAASEDPSSRGVKSLTGQLKEMALKASGAYKQCGGPCATAPPSRVSRGGGTELDSESSSSSSSRRRWGKELEARLKGISSGEGTPSSSGRRVVLLLEDDEEPKEWVAQVEPGVLITFVSLPRGGNHLKRIRFSREIFNKWQAQRWWAENYDKVMELYNVQRLNRQAFPLPTPPRSEDESSKRESIEDFPVTPPLSRERPPCNLFRAGGGGMGMGYSSSDSCVHHSMLSSRHYYDPNGVNSTPIASSTCSAAAQPDISSSMDVHASIRSSSSTEADRSGGLSLSNASHLGSEWVEQDEPRVYISIRALPGGKKELRRVRFSPEKLGDMQNVNFVSTPFSLNNLPILYLRYNHIVG

SEQ ID NO: 1134 - protein, 318 aa, Silene diclinis
NFLFKSSKEDSPLKATDFGLSDFINPGRKFHDIVGSAYYVAPEVLKRRSGPESDVWSIGVITYILLCGRRPFWDKTEDGIFKEVLRGKPDFGRKPWPTISNSAKDFVRKLLVKDPLVRLTAAQALSHQWVREGGNALDIPIDISVLHNMRQFVKYSRMKQFALRALASTLNDDELANLRDQFDAIDVDKSGTISLEEMRQALAKDLPWKLKDSRVMEIVEAIDSNTDGFVDFTEFVAATLHVHQLHELDNEKWQELSQRAFEKFDVDKDGYITPDELRMHTGLKGSMEPLLEEADIDKDGKISLAEFRRLLRSASMSS

SEQ ID NO: 1135 - protein, 504 aa, Brucella suis 1330
MSKLDDNVAKAKTYLARFEKGVLNRIGGEDVAAADGATFETISPVDLKPLATVALGKAADIDRAARAAKAAFPEWAAMSGDARKKLLHKIADAIVARAEEIAFVECMDTGQSLKFMAKAALRGAENFRFFADRAPEARDGKTLRGPGQVNMTTRVPIGPVGVITPWNTPFMLSTWKIAPALAAGCTVVHKPAEFSPLTARLLVEIAEEAGLPKGVWNLVNGFGEDAGKALTEHPDIKAIGFVGESRTGSLIMKQGADTLKRVHFELGGKNPVVVFADADLERAVDAAVFMIYSLNGERCTSSSRLLVEASIYEKFTALVAEKAKRIKVGHPLDPETVVGPLIHPVHEKKVLEYIEIGRSEGATVAAGGAKFAGPGGGCYVSPTLFTAAHNGMRIAQEEIFGPVLTAIPFKDEAEALALANDVKYGLTGYLWTNDVTRAFRFTDALEAGMIWVNSENVRHLPTPFGGVKNSGIGRDGGDWSFDFYMETKNIAFANAAHAIAKLGG

SEQ ID NO: 1136 - protein, 328 aa, Triticum aestivum
RHWFYCINNKERSCLETGEVLIRVAASGICGTDLHICKGETPQATKNVVVGHEFCGYVEEIHPETMAVVKVGDLVAIDPNMPCNQCTFCRNKKYHLCLNLFCIGVTVDGGMSQYVAVPARAAITVPAHVPPEVACLSEPLSCVVHAVDKGHVKSGDSVLVIGAGPIGLMTTALVNASGGKVTVIEPNEFRRKEALEIFGAAAAYGPGELGPVNGALGEGYDVVFECVGRPNTADDAVKFAKAGGTVVWVGVAKVEDRVSISPYDVYRRELTITSTFTNPYGIDRAVKILAEGRVNWRALVSHSFKLSEFDKAWEVFTAGTGLKVVVKP

SEQ ID NO: 1137 - protein, 351 aa, Staphylococcus aureus subsp. aureus Mu50
MKALVKTREGHGNLELLDKEVATPLDDKVKIKVHYAGICGTDIHTYEGHYKVNFPVTLGHEFSGEIVEVGADVKDFKVGDRVTSETTFYVCNECEYCKSKDYNLCNHRKGIGTQVDGVFTNYVIAREESLHHIPDEVSYQSAAMTEPLACAHHGVSKIQVNSGDVAVVMGPGPIGLLVAQVLKSKGATVVVTGLDNDKVRLDKAEALHMDYVVNLQQTDLKTYINGITDGYGADVVVECSGAVPAARQGLDIIRKKGFYSQIGIFKDAEIPFDMEKVIQKEITVVGSRSQKPADWEPSLQLMADGLVNAEALVTKIYDISKWDEAYQHLKSGEGIKALLKPLDLDENEGEN

SEQ ID NO: 1138 - protein, 400 aa, Aspergillus fumigatus
MTTTTTTTALVLHGAKDLRLESRPISPPTGSEVQVAIRATGLCGSDLHYYNHGRNGDFVVREPMCLGHESSGTVTAVGPDVTTLQVGDRVALEVGLPCRTCTLCRTGRYNICPDMKFRSSAKLFPHLDGTLMELTNHPADLCHKLPESVSYAGGALVEPLAVCLHAIRRSHPPTPAEVDLATEQGDQTAALIFGAGAIGLLLAAALATSQPFTSIVIADIDPARLEIAKSLNLGLKTHLLPKGGNAANPPPAPDASAAEHAAYAMQNAQRTAAALKEANGVASGFVRVYECTGVPACVQAGIYAASPGAVLVQIGMGNPIQTLPVSAAALREVDIIGTFRYDGHAYPAAIELMASGKLDHVEKQVVTHRVRLEDGSRAFALAGKGVDETGRPVVKVVIES

SEQ ID NO: 1139 - protein, 318 aa, Silene vulgaris
NFLFKSSKEDSPLKATDFGLSDFINPSRKFTDIVGSAYYVAPEVLKRKSGPESDVWSIGVITYILLCGRRPFWDKTEDGIFKEVLRNKPDFRRKPWPSISNSAKDFVRKLLVKDPLVRLTAAQALSHQWVREGGSALDIPIDISVLHNMRQFVKYSRMKQFALRALASTLNDDELANLRDQFDAIDVDKSGTISLDEMRQALAKDLPWKLKDSRVMEIVEAIDSNTDGFVDFTEFVAATLHVHQLHELDNEKWQELSQRAFEKFDVDKDGYITPEELRMHTGLKGSMEPLLEEADIDKDGRISLAEFRRLLRSASVSS

SEQ ID NO: 1140 - protein, 245 aa, Metasequoia glyptostroboides
YTYNLRNKGPEDVIVRVIYCGICHSDLIQMRNEMGMSHYPMVPGHEVVGIVTELGSEVKKFKVGEHVGVGCIVGSCRKCGNCNESMEQYCSKRIWTYNDVNHGGTPTQGGFASSMVVDQMFVVRIPENLPLEQAAPLLCAGVTVYSPMKHFGMTEAGKRCGILGLGGVGHMGVKIAKAFGLHVTVISSSDKKKEEALEVLHADAYLVSKDAEKMQEAAESLDYILDTIPVAHPLEPYLSLLKTNG

SEQ ID NO: 1141 - protein, 170 aa, Zea mays
MAGIGRNMVAPLLVLNLIMYIIVIGFASWNLNHFINGQTNYPGVAGNGATFYFLVFAILAGVVGAASKLAGVHHVRAWRHDSLATNAASSLIAWAITALAFGLACKEIHIGGHRGWRLRVLEAFVIILAFTQLLYVLMLHTGLFGGSGGYRDHDYGVGGAAGEPKGVTRV

SEQ ID NO: 1142 - protein, 198 aa, Glycine max
  misc_feature (91)..(91): Xaa can be any naturally occurring amino acid
MTISNTSSTSKTIFRRNGKDIQGIPWERLNYSRDKYRETRLKQYKNYQNFSLSPHHLHKECFQVQKGQTFYDFFFNTRLVKSTIVHFQLLXRWNMSSLAGPYIMLRNLLWATSKHDVYLMQDYSVMHWSALLQRSKEVLNVAKPIIPTLTHPGFLAQPVSRVQISTMTVKENLMVAGGFQGELICKVGLIIISYFHSI

SEQ ID NO: 1143 - protein, 335 aa, Glycine max
MADESVVESPVKRQRDDGEENGVSVSMDAEGGKDPLSNGLSSVIPGWFSEISAMWPGEAHSLKVEKILFQGKSEYQNVMVFQSSTYGKVLVLDGVIQLTERDECAYQEMITHLPLCSIPNPKKVLVIGGGDGGVIREVARHSSVEKIDICEIDKMVVDVSKQYFPDVAVGYDDPRVTLHIGDGVAFLKEVPEGTYDAVIVDSSDPIGPAQELFEKPFFASVAKALCPGGVVCTQAESIWLHMDIIEDIVANCRQIFKGSVNYAWTTVPTYPSGMIGFMLCSTEGPPVDFKHPVNPIDENESQKSVRPLKFYNSEIHTAAFCLPSFAKRKISSKAN

SEQ ID NO: 1144 - protein, 452 aa, Brucella suis 1330
MRDSNFLIENNARHLWHPMAHPAEMQANPPRIVNGGEGVEVIDIHGKKVLDAVGGLWNVNLGYSCEPVKKAIRDQLDSLPYYSTFRGTTNSPLIELSYELAEFFKEDGLTRAFFTSGGSDSVETALRLARQFHKINGQPERTKFVSLKKGYHGTHFGGASVNGNANFRRNYEPLLPGVFHLAAPYPYRNPFNMDDPAAIAAAIARQFEDEIAFQGADTIAAFIMEPVLGAGGVIVPHESFMLLMREICDRHGILLIADEVITAFGRTGAWTGSRGWGVKPDMMTTAKAITNGYFPFGAVMISDKVASVFEANKNSLGAIGHGYTYSGHPVGAAAALATLKETARANTAANAGARGVELMAGLNQLKEKHELVGDVRGKGLMAALELVSDREKKSAAAKTVVQKVYDVAYEEGVMVRTSGANVIISPPLVITSADVNRIVSALDAGLSAAKGQ

SEQ ID NO: 1145 - protein, 298 aa, Glycine max
MVYVKAQKSKAYFKRYQVKFKRRREGKTDYRARIRLINQDKNKYNTPKYRFVVHFSNKDIVAQIISASIAGDIVLAAAYAHELPRYGLEVGLTNYAAAYCTGLLLARRVLKTLDMDEEYEGNVEATGEDYSVEPAESRRPFRALLDVGLVRTTTGNRVFGALKGALDGGLDIPHSDKRFAGFDKEKKELDAEVHRKYVFGGHVAAYMKILAEDEPEKYQSHFSEYIKRGIEADGIEALYKKVHAAIRADPTLKKSDKQPPKEHKRYNMKKLTYEERKAKLVARVAAINSAADNDEDDE

SEQ ID NO: 1146 - protein, 163 aa, Glycine max
VATQNCCCFQVVSIGLGSRPFSLHLLLNLLNFLFPFLPSKFSLDSSSMLSSAAVVTSPAQATMVAPFTGLKSSSAFPVTRKANNDITSIVSNGGKVSCMKVWPPVGKKKFETLSYLPDLTEVELGKEVDYLLRNKWIPCVEFLLPRGSACPGPAATPGCSGGR

SEQ ID NO: 1147 - protein, 170 aa, Triticum aestivum
MAGVGRNMVAPLLVLNLIMYIIVIGFASWNLNHFINGLTNRPGVGGNGATFYFLVFAILAGVVGTWRGDSLATSASSALVAWAITALAFGLACKEIHIGGYRGWRLRVLEAFVIILMFTQLLYVLALHSGLFGNQFGNHAGAGGYGAEHGAYGAGDPHNKGMGTGGVARV

SEQ ID NO: 1148 - protein, 215 aa, Saccharomyces cerevisiae
MSRSGKSLTKYKIVFLGEQGVGKTSLITRFMYDTFDDHYQATIGIDFLSKTMYLDDKTIRLQLWDTAGQERFRSLIPSYIRDSRVAIIVYDITKRKSFEYIDKWIEDVKNERGDENVILCIVGNKSDLSDERQISTEEGEKKAKLLGAKIFMETSTKAGYNVKALFKKIAKSLPEFQNSESTPLDSENANSANQNKPGVIDISTAEEQEQSACQC

SEQ ID NO: 1149 - protein, 458 aa, Mesorhizobium loti MAFF303099
MRHQILSNRSGEDLRASDLAHHLHPFTDHTVLAAEGGPRVIKDGDGIYVWETEGRRLLDGMAGLWCVNVGYGRKELGEVARQQMDRLAFYNTFFKTSHEPVINLAERLAAVTPEGIDNFFFGNSGSEANDTAIRLVRSYWAAVERPERQVVISREYAYHGSTLAGASLCGLPGMHGVAGLPIPGIAHAAAPYAWAAGKDQDDPAYGRASADALEAKILEIGPKNVAAFIGEPVMGAGGVITPPPRYWARVQEICRKYDILLVCDEVICGFGRTGEWFGAQSFGIAPDIMCMAKGLSSGYIPISAVGVGTRVAEILRTRPGVLSHGFTSSGHPVAAAVALKNIELIEAEGLVNHVRDVAGPALARRLGALAMHPLVGQVRGIGAMWALELTSDKATRAPFAPLGSVATRVRNLCFERGLATRAVREGLVFAPPLIITEAQVDEMADILTSCLDTAVAEL

SEQ ID NO: 1150 - protein, 440 aa, Mesorhizobium loti MAFF303099
MSHVFHRSALSVPPMAVAADGHYIIDINGRRYLDASGGAAVSCIGHGDPRVVAAVAEQIARLDYAHSGAFTSPSAEELAAHICAEAGQGMARVYFVGSGSEAVEAAIKMARQCQIERRQPSRHVVISRRLSYHGNTLGALGRSGSETRRAPYAPMLQKRTQIAPCFPYHYAEPGETPEAYGLRAAEALEAEILRLGSENVAAFLAETVVGATSGAVVPATGYFRHIREICDRYGVLLICDEVMCGAHRTGPFLACSDEGVSPDIVTLAKGLGGGYLPIGAVVCRADVHDSFAQGSGAFTHGHTYMAHPVACAAALEVQRVIVDDRLAERVVRQGALLDAALRDRLSQHTYVGDIRGRGLLYAVELVADRETRVSFDPEMRLAARIGAQAKGRGLLVYPGSGTIDGLRGDHVLLAPAYSIDAQRVGEIADILTEAIDAALG

SEQ ID NO: 1151 - protein, 494 aa, Bacillus cereus ATCC 14579
MSQLAVNLHEKVEKFLQGTKKLYVNGSFIESASGKTFKTPNPATGETLAVVSEAGREDIHKAVVAARMAFDEGPWSRMSTAERSRLMYKLADLMEEHKEELAQLETLDNGKPIRETMAADIPLAIEHMRYYAGWATKIVGQTIPVSGDYFNYTRHEAVGVVGQIIPWNFPLLMAMWKMGAALATGCTIVLKPAEQTPLSALYLAELIEEAGFPKGVINIVPGFGESAGQALVNHPLVDKIAFTGSTPVGKQIMRQASETLKRVTLELGGKSPNIILPDADLSRAIPGALSGVMFNQGQVCSAGSRLFVPKKMYDNVMADLVLYSKKLNQGVGLNPETTIGPLVSEEQQKRVMGYIEKGIEEGAEVLCGGSNPFDQGYFVSPTVFADVNDEMTIAKEEIFGPVISAIPFNDIDEVIERANKSQFGLAAGVWTENVKTAHYVASKVRAGTVWVNCYNVFDAASPFGGFKQSGLGREMGSYALNNYTEVKSVWLNLN

SEQ ID NO: 1152 - protein, 479 aa, Nostoc sp. PCC 7120
MSDLVLFWHRRDLRIADNIGLAAARQQSSKVVGVFCLDPNILERDDVAPARVTYMIGSLQELQQRYVQAGSQLLILHGDPVQAIPHLAEALNAKAVFWNWDVEPYSQTRDRAILDILKDKGIQFLTHKWDQILHSPDEIRSGSNTPYTVYTPFWKNWSSKPKAKPVETLQNAEGLTESEQELAQKAGVKTLPTAKDLGFFWDADLIIAPGEAAAQAKLEEFTAKAITEYQEQRNFPAVDGTSQLSAALKFGVIGIRTVWQATLEALENSRSEEASAAIRTWQQELAWREFYQHAMYNFPELADGAYRETFKNFPWETNEEHFQAWREGKTGYPIVDAAMRQMNESGWMHNRCRMIVASFLTKDLLINPQLGEKYFMQKLIDGDLSANNGGWQWSASSGMDPKPLRIFNPASQSQKFDPDAEYIRRWVPELRSMDTEYLVTGKITPLERHAVGYVKPIVDHQKQQQLFKQRYQQQKATSL

SEQ ID NO: 1153 - protein, 199 aa, Penicillium marneffei
MASGPATQSLKCVVTGDGAVGKTCLLISYTTNAFPGEYIPTVFDNYSASVMVDGRPISLGLWDTAGQEDYDRLRPLSYPQTDVFLICFSIVSPPSFDNVKAKWFPEIEHHAPGVPIILVGTKLDLREDRATAEALRAKKMEPVSYEQALAVAKEIRAHKYLECSALTQRNLKSVFDEAIRAVLNPRPQPKNKAKRCTIL

SEQ ID NO: 1154 - protein, 310 aa, Vitis vinifera
MSFIGEASAYFKVLSDGSIKRVEWESAPASNDSSSNGYKSKDVIINSTKPISARIFLPDVPGSSGRLPVLVYFHGGGFCLGSTTWFGYHTFLGDFAVASQSIVLSVDYRHAPENRLPIAYDDCYSSLEWLSCQVSSEPWLERADLSRVFLSGDSAGGNIVHNVALRTIQEQSCDQVKIKGLLLIHPFFGSEERIEKERAGGEAENLALTDWMWKLSLPEGSNRDHYWCNYEMAELSRAEWCRFPPAVVYVAGLDFLKERGVMYAAFLEKNGVEVKLVEAEGEKHVYHMLHPESEATRLLQKQMSEFIHNF

SEQ ID NO: 1155 - protein, 105 aa, Rickettsia sp. RAv1
GQPFIYPNNSLDFTENFLHMMFATPCTKYTVNPIIKNALNKIFILHADHEQNASTSTVRIAGSTGANPFACISTGIASLWGPAHGGANEAVINMLKEIGSSEYIP

SEQ ID NO: 1156 - protein, 160 aa, Zea mays
  misc_feature (43)..(43): Xaa can be any naturally occurring amino acid
MSDSEEHHFESKADAGASKTYPQQAGTVRKNGFIVIKNRPCKXVEVSTSKTGKHGHAKCHFVAIDIFNGKKLEDIVPSSHNCDIPHVNRTEYQLIDISEDGFVSLLTSDGNTKDDLRLPTDETLVAQIKEGFESGKDLVVTVQSAMGEEQICALKDVGPK

SEQ ID NO: 1157 - protein, 105 aa, Rickettsia sp. RAv3
GQPFIYPNNSLDFTENFLHMMFATPCTKYTVNPIIKNALNKIFILHADHEQNASTSTVRIAGSSGANPFACISTGIASLWGPAHGGANEAVINMLKEIGSSEYIP

SEQ ID NO: 1158 - protein, 57 aa, Triticum aestivum
MADEGTANCIDIILAIILPPLGVFFKFACGIEFWICLLLTFFGYLPGIIYAVWVITK

SEQ ID NO: 1159 - protein, 196 aa, Cichorium intybus x Cichorium endivia
GHNNLNAKFVLLGDMGAGKSSLVLRFVKGQFLEFQVSTIGAAFFSQTLAVNDATVKFEIWDTAGQERYHSLAPMYYRGAAAAIIVYDITSADSFTRAKKWVQELQKQGNPNMVMALAGNKADLEDKRKVTAEEARVYAEENGLFFMETSAKTAANVNDVFHEIAKRLPRAQPTQNPAGMVLVDRPAEGARAASCCS

SEQ ID NO: 1160 - protein, 511 aa, Cylindrotheca fusiformis
MAEFDNTFILDFCSGGNESSSDVQALCQVAGLANGTSASAAGLVEGINTFFLLFAGALVFLMQAGFAMLCAGSVRQKNVKNIMLKNMLDACGGAIGFWTIGYAFAYADNSSGDKTFIGGKNFFVNQLDESGGAWIGFFFQFAFAATAATIVAGTVAERCKMSAYLCYSVFLTGFVYPVVVHSIWSADGWLTAFRDDPWKGVGVIDFAGSGVVHMTGGATALVAAIVLGPRKGRFYDEDGNALETPASFPAHSVALQVLGTFLLWFGWYGFNPGSALVIDNAASASTSALCAVTTTLAAASGCVCAMFTDTIIEMMATGEASYDLTMAMNGALGGLVAITAGCSVVTPWASIIIGIIAGWVYIAFSKLLVKLKIDDAVDAVPVHFANGMWGVLAVGFFAEPDAMVTAGYNDVPGVFYKGDGKLLLCQFVAIIWICAWIFFLMTPFFVVLNILGMFRVDPLEEEVGLDISHHRGAAYDMTSAKKEDVEELMEHRSSKHGKVEVPKEVQKEDTA

SEQ ID NO: 1161 - protein, 411 aa, Anaplasma phagocytophilum
MVEKAVLECGDRRISLPVLRGTDGTPVVDITTLYRENNVLTYDPGFMSTAACRSEITFIDGNKGTLRYRGIDIENLIGTPNSFSSIVYLLLKGTLPSETEHEEFVRILGAEYDVPEQVMNVIRSFPRDSHPMAILIASFSALAANYHASRIDPLTGAIIAIAKVPGIVASIYRHTANLDFIQADANLEYTHHFIRMMFGDMDDAHRDIMHKALDAIFIMHADHEQNASTSTVRMTGSSGAGLFACLCAGVATLWGPAHGGANEAVIKMLAEIGSPENVSSFIDKVKNNKGKSRLMGFGHRVYKSYDPRARVLRTICKDVLDSLGRDENLLAVAEELESQALQDEYFIERKLYPNVDFYSGIVLRAMGVPVDMYTAFFALARTSGWASQWYEMIQSDEGKRISRPRQLYTGK

SEQ ID NO: 1162 - protein, 105 aa, Rickettsia sp. RAv9
GQPFIYPNNSLDFTENFLHMMFATPCTKYTVNPIIKNALNKIFILHADHEQNASTSTVRIAGSSGANPFASISTGIASLWGPAHGGANEAVINMLKEIGSSEYIP

SEQ ID NO: 1163 - protein, 482 aa, Corynebacterium glutamicum ATCC 13032
MNANARVFILNSLAMNDPQRSPTLLWFRDDLRLSDNAALKWAADHGPVIGLFIDETINRSIGAAARWWREQSLNALAQDLSFYGVPLLRRTGNPLEILPKIVSEMEVKAVTWNRRYHQPLCEVDATLKKNLRDKGIEVHSHPGFLLTEPWEVSTATGTPYKVFTPFSKAAWEVARVHAYETVKNNVPVPSHLTGPEDVELPILEMEQPFWSTTLVKECAPGEKNASEKLFDFLEHLQDYPQARDSLARSATSKLSAHLRFGEISIHRVWAETAAIDSEGTELFLKELLWRDFAWHRLYALPHMDTQNVRMQFNRFGWSWDPSEKDKLNTPSTPLIPTKADQFHEDLAAWRAGKTGIPLVDAGMRELWATGSMHNRVRMVVASFLTKNLQIHWRHGEEWFWETLVDADPASNAFNWQWAAGSGDDASPYFRIFNPVTQAKKFDPDETYIRRWVPEYGTPSYPDPIVDLKESRQIALDAYSAIK

SEQ ID NO: 1164 - protein, 511 aa, Cylindrotheca fusiformis
MAEFDNTFILEFCSGGNESSSDVQVLCQVASLANGTSASAGGLTEGINTFFLLFAGALVFIMQAGFAMLCAGSVRQKNVKNIMLKNMLDACGGAIGFWTIGYAFAYADNSSGNKTFIGGKNFFVNQLDESGGAWIGFFFQFAFAATAATIVAGTVAERCKMSAYLCYSIFLTGFVYPVVVHSIWSADGWLTAFRDDPWQGVGVIDFAGSGVVHMCGGATALVAAIVLGPRKGRFYDEDGNALETPASFPAHSVALQVLGTFLLWFGWYGFNPGSALVIDNAASASTSALCAVTTTLAAASGCVTAMFTDTLIEMMATGEASYDLTMAMNGALAGLVAITAGCSVVTPWASLIIGIIGGWVYLGLSKLLIKLKIDDAVDAVPVHFGNGMWGVLAVGFFAEPDAMVTAGYNDVPGVFYKGDGSLLLCQFVAIVWVCAWVFFLMTPFFVVLNILGMFRVDPLEEEVGLDISHHRGSAYDMTTAKKEDVEELMEHRSSKHGKVEIPKEVQKEDTA

SEQ ID NO: 1165 - protein, 411 aa, Anaplasma phagocytophilum
MVEKAVLECGDRRISLPVLRGTDGTPVVDITTLYRENNVLTYDPGFMSTAACRSEITFIDGNKGTLRYRGIDIENLIGTPNSFSSIVYLLLNGTLPSETEHEEFARILGAEYDVPEQVMNVIRSFPRDSHPMAILIASFSALAANYHASRIDPLTGAIIAIAKVPGIVASIYRHTANLDFIQADANLEYTHHFIRMMFGDMDDAHRDIMHKALDAIFIMHADHEQNASTSTVRMTGSSGAGLFACLCAGVATLWGPAHGGANEAVIKMLAEIGSPENVSSFIDKVKNNKGKSRLMGFGHRVYKSYDPRARVLRTICKDVLDSLGRDENLLAVAEELESQALQDEYFIERKLYPNVDFYSGIVLRAMGVPVDMYTAFFALARTSGWASQWYEMIQSDEGKRISRPRQLYTGK

SEQ ID NO: 1166 - protein, 435 aa, Rickettsia sibirica 246
MTNENNNDSEFAELKIRGKIFKLPILKASIGEDVIDISRVSAEADCFTYDPGFMSTASCQSTITYIDGDKGILRHRGYDIKDLAEKSDFLEVAYLLIYGELPSGEQYNNFTKQVAHHSLVNERLHYLFQTFCSSSHPMAIMLAAVGSLSAFYPDLLNFKEADYELTAIRMIAKIPTIAAMSYKYSIGQPFIYPDNSLDFTENFLHMMFATPCTKYTVNPIIKNALNKIFILHADHEQNASTSTVRIAGSSGANPFACISTGIASLWGPAHGGANEAVINMLKEIGSSEYIPKYIAKAKDKNDPFRLMGFGHRVYKNYDPRAAVLKETCKEVLKELGQLDNNPLLQIAIELEAIALKDEYFIERKLYPNVDFYSGIIYKAMGIPSQMFTVLFAIARTVGWMAQWKEMHEDPEQKISRPRQLYTGYVHREYKGIRER

SEQ ID NO: 1167 - protein, 380 aa, Ehrlichia sp. ERm58
VDITCLYKDTGILTYDPGFMSTAACESRITFIDGNKGILRYRGYNIADLVNSNKSFIEIVYLLFYGVLPDANDLQNFVLQVSQEYMPIKIVNDIIKSFPRNSHPMAILISCFSGLASYYNNQRHNEDELKYARLAVSQIAGIVAMIYRHITDQDFIQANTELSYSENFIHMMFDISSYEFTKVVSKALDVIFILHADHEQNASTATVRLTGSTGANLFACLAAGAATLWGPAHGGANEAVINMLMEIEKPSNVKQFVQKVKDKNNGIRLMGFGHRVYKNYDPRAKIICEICKEVLNDLKTSHPLLEVALELESIALQDSYFIERSLYPNVDFYSGIVLKAIGIPVSMFTTLFALARTSGWSAQWYEMIKGRDYKICRPRQ

SEQ ID NO: 1168 - protein, 445 aa, Arabidopsis thaliana
MVVRKVGKYELGRTIGEGTFAKVKFAQNTETGESVAMKIVDRSTIIKRKMVDQIKREISIMKLVRHPCVVRLYEVLASRTKIYIILEYITGGELFDKIVRNGRLSESEARKYFHQLIDGVDYCHSKGVYHRDLKPENLLLDSQGNLKISDFGLSALPEQGVTILKTTCGTPNYVAPEVLSHKGYNGAVADIWSCGVILYVLMAGYLPFDEMDLPTLYSKIDKAEFSCPSYFALGAKSLINRILDPNPETRITIAEIRKDEWFLKDYTPVQLIDYEHVNLDDVYAAFDDPEEQTYAQDGTRDTGPLTLNAFDLIILSQGLNLATLFDRGKDSMKHQTRFISHKPANVVLSSMEVVSQSMGFKTHIRNYKMRVEGLSANKTSHFSVILEVFKVAPSILMVDIQNAAGDAEEYLKFYKTFCSKLDDIIWKPPDASMRNRVTKAKSKRR

SEQ ID NO: 1169 - protein, 341 aa, Yersinia pestis KIM
MKALSKLKAEEGIWMTDVPQPELGHNDIMIKIRKTAICGTDVHIYNWDEWSQKTIPVPMVVGHEYVGEVVAIGQEVKGFNIGDRVSGEGHITCGHCRNCRGGRTHLCRNTVGVGVNRPGSFAEYLVIPAFNAFKIPDNISDELAAIFDPFGNAVHTALSFDLVGEDVLVSGAGPIGIMAAAVCKHVGARHVVIADVNEYRLDLARKMGVTRAVNVSKENLNDVMTELGMTEGFDVGLEMSGAPPAFRSLLNSMNHGGRIAMLGIPPSDMSIDWNQVIFKGLFIKGIYGREMFETWYKMAALIQSGLDLTPIITHRFPIDEFQQGFDAMRSGKSGKVVLSWD

SEQ ID NO: 1170 - protein, 411 aa, Anaplasma phagocytophilum
MVEKAVLECGDRRISLPVLRGTDGTPVVDITTLYRENNVLTYDPGFMSTAACRSEITFIDGNKGTLRYRGIDIENLIGTPNSFSSIVYLLLKGTLPSETEHEEFARILGAEYDVPEQVMNVIRSFPRDSHPMAILIASFSALAANYHASRIDPLTGAIIAIAKVPGIVASIYRHTANLDFIQADANLEYTHHFIRMMFGDMDDAHRDIMHKALDAIFIMHADHEQNASTSTVRMSGSSGAGLFACLCAGVATLWGPAHGGANEAVIKMLAEIGSPENVSSFIDKVKNNKGKNRLMGFGHRVYKSYDPRARVLRTICKDVLDSLGRDENLLAVAEELESQALRDEYFIERKLYPNVDFYSGIVLRAMGVPVDMYTAFFALARTSGWASQWYEMIQSDEGKRISRPRQLYTGK

SEQ ID NO: 1171 - protein, 396 aa, Ehrlichia sp. EHt224
KVKLPVLCDTNGNKVVDITSLYKSTGILTYDPGFMSTAACESKITFIDGSKGILCYRGYNIADLVNSNKSFIEIVYLLFYGSFPSVDDFKDFMLQISQEYMPPKMICDVIKSFSQDAHPMTILMACFSGLASYYNNQQHCENELKYARLAVSQIAGIIAMIYRHITDQDFIQANTELSYSENFIHMMFDISSYEFTKIVSKALDIIFILHADHEQNASTATVRLTGSTGANLFACLAAGAATLWGPAHGGANEAVINMLMEIEQPSNVKQFVQKVKDKNNGIRLMGFGHRVYKNYDPRAKIICEICKEVLKDLKVSHPLLEIALELENIALQDSYFIERNLYPNVDFYSGIVLKAIGIPVSMFTTLFALARTSGWSAQWYEMIKDKNYKICRPRQL

SEQ ID NO: 1172 - protein, 368 aa, Candida albicans SC5314
MTFVPRKTFPNYNIPLNNFKGHHQKALSKFGHLAPQLDMILEVRDSRAPISTTNVLFDKVLPSKKKLILYSKKDLSILKPRLLEKWHKSKNEQYMFVDCRSKRDGKKIINEIKKLYDSMETPPPLGLRTMIIGMPNVGKSSLVNTLRYVGLSDGENAVSTKIRKVARTGGQPGVTRSTSEIIRLSRDPEIMVYDTPGVFLPTTKNAETMLSLALVGCINESFIDPVILADYLLYVLNLQDPTGKLYTDYIDHPTNNVYELLESIDQKRNVLQIDKRFDECGLANHWISKWKQGKSSKYRGLFDVAAIHEINAKDFGNLTNAERERIGLSNVQQRLQERFGDDGTSTSKHRKRTAKDREFDMKNRLFKL

SEQ ID NO: 1173 - protein, 178 aa, Glycine soja
MASSMISSPAVTTVNRAGAGMVAPFTGLKSMAGFPTRKTNNDITSIASNGGRVQCMQVWPPVGKKKFETLSYLPDLDDAQLAKEVEYLLRKGWIPCLEFELEHGFVYREHNRSPGYYDGRCWTMWKLPMFGCTDASQVLKELQEAKTAYPNGFIRIIGFDNVRQVQCISFIAYKPPSF

SEQ ID NO: 1174 - protein, 492 aa, Brucella suis 1330
MQDKIDRLRQQAVPPQSLFINGRWQPAADGNVMAVISPIDGTQLTTIAAATAIDVDRAAAAARHSFEKGTWAKAAPAERRKVLLKIAELIERNALELAVLGVRDNGTEISMALKAEPGSAANSFRYYAEAIDKVYGEIAPTAENILGLVHRAPVGVVGAIVPWNFPMMIGAWKIAPALAAGNSIVLKPAEGASLSLLRLAELCAEAGLPEGVLNVVTGAGPVTGEALGLHPDIDVLAFTGSGFVGRKLLEYSARSNLKRVHLELGGKSPNIVFADAPDLAQAAKVSAYGIFRNSGQVCVAGSRLLVERSIAGEVAEKVSTIAAAIKGGDPLGLTTEAGAISSEAQLRKNLDFAEQALSEGAGLRTGGKRILEETGGFYMQPTVFNVEPGMTLAREEVFGPILSIIPFDNEEDALKIANDSDYGFASAVWTSNLSRAHRMVRGIRAGVVHVNTYGGADNTVPLGGVKQSGNGHDKSLHALDKYIDLKTAWIQL

SEQ ID NO: 1175 - protein, 154 aa, Crocosphaera watsonii WH 8501
MPLPTSLVTLEGTALPLSELENKVILFVNVASKCGLTPQYSGLVQLDKKYGERGFKVVAVPCNQFGEQEPGTPAEIKEFTSTKYDVEFTLLEKQDVNGSNRSPLYQFLVKDGEDIAWNFGKFLVGRDGEVVARFEPATAPDDAQLEAAIDKALG

SEQ ID NO: 1176 - protein, 156 aa, Saccharomyces cerevisiae
MWGKKFIRSQENVKFLCSVAVADESLTAFNDLKLGKKYKFILFGLNDAKTEIVVKETSTDPSYDAFLEKLPENDCLYAIYDFEYEINGNEGKRSKIVFFTWSPDTAPVRSKMVYASSKDALRRALNGVSTDVQGTDFSEVSYDSVLERVSRGAGSH

SEQ ID NO: 1177 - protein, 93 aa, Zea mays
  misc_feature (23)..(23): Xaa can be any naturally occurring amino acid
  misc_feature (38)..(38): Xaa can be any naturally occurring amino acid
  misc_feature (85)..(85): Xaa can be any naturally occurring amino acid
MKDQFQLAGLQGLGCHQDPQVLXRCIDCLPRQTLRSSXINSRMRDGSIRYEKFSKGDMLISLARRHSMPSSCLSQCLRACGDSRXCRRAIAKE

SEQ ID NO: 1178 - protein, 416 aa, Alternaria brassicicola
MGDLANRKVFKVFNQEFIVDERYNVTKELGQGAYGIVCAATNNQTGEGVAIKKVTNVFSKKILAKRALREIKLLQHFRGHRNITCLYDMDIPRPDNFNECYLYEELMECDLAAIIRSGQPLTDAHFQSFIYQILCGLKYIHSANVLHRDLKPGNLLVNADCELKICDFGLARGFSMDPEENAGYMTEYVATRWYRAPEIMLSFQSYTKAIDVWSVGCILAELLGGKPFFKGRDYVDQLNQILHYLGTPNEETLSRIGSPRAQDYVRNLPYMQKISFQSLFKNANPDALDLLDRMLAFDPSSRISVEEALEHRYLQIWHDASDEPSCPTTFDFQFEVVEEIPEMKKMILDEVSRFRQMVRVQPGAGAGANQAPQVPIPNNYDRAGYEDPRPQEAFNQGGWNGSDLERDLQGLDGRMR

SEQ ID NO: 1179 - protein, 152 aa, Glycine max
MQHRKLTSGRPSGTDGSDYSYRMVVDSRYQLVAKGKKYLSLHFITEAVLLLIGATLAYLPGIEADAPNTVAYSSVIVSVVSLIIGNIGRRRSRSGLLRFYAVVSSIVMLLLIASLATQHLLLKAIQDSKLWRKGSMMSMIYRIFKLVCCYTW

SEQ ID NO: 1180 - protein, 485 aa, Oceanobacillus iheyensis HTE831
MNTREPTQLRYPEDYLQIIDNGIEEKSNPKRMIIIGAGLAGLVAGHLLKAAGHDVVILEANKRIGGRVYTIRKPLTEGNYLDVGAMRIPNYHRLVHAYIKKFNLRIHPFINKTPEDIIFVNNVRTTREAYEANPDILNFPLPEHEKGKTAEQLLQEAIDPFVELYTNSDEQEQRLLEEKYKGYSIGEFLQKNPLGPSLSPYAIRLIGIISGLEGFPQGSFVDVITDILEPLTVENVYFDAINNGNDRLPYSISKQLEENIKIEQRVISIRQSSSHITVQTDKKQTYKGDYVINTSPFSVFQFIDVIPYESISFQKWQIIRQLLHIPSVKIGIEFKERFWEDLKMGNAISDLPSRFSYIPSYGKGTKGPAVLLASYSWGEDALLWTSTTPTLMVQMILKDLAKIYGNIVYKQFSRSIYFNWSLNPFSAGCFTLLSPLLGAAVTEDFIRQPEGRIHFAGEHTSDFNGWMEGAIQSGIRAAMEVNQRE

SEQ ID NO: 1181 - protein, 196 aa, Cichorium intybus x Cichorium endivia
GHNNLNAKFVLLGDMGAGKSSLVLRFVKGQFLEFQESTIGAAFFSQTLAVNDATVKFEIWDTAGQERYHSLAPMYYRGAAAAIIVYDITSADSFTRAKKWVQELQKQGNPNMVMALAGNKADLEDKREVTAEEARVYAEENGLFFMETSAKTAANVNDVFHEIAKRLPRAQPTQNPAGMVLVDRPAEGARAASCCS

SEQ ID NO: 1182 - protein, 200 aa, Cichorium intybus x Cichorium endivia
MATIGHNNLNAKFVLLGDMGAGKSSLVLRFVKGQFLEFQESTIGAAFFSQTLAVNDATVKFEIWDTAGQERYHSLAPMYYRGAAAAIIVYDITSADSFTRAKKWVQELQKQGNPNMVMALAGNKADLEDKRKVTAEEARVYAEENGLFFMETSAKTAANVNDVFHEIAKRLPRAQPTQNPAGMVLVDRPAEGARAASCCS

SEQ ID NO: 1183 - protein, 200 aa, Cichorium intybus x Cichorium endivia
MATIGHNNLNAKLVLLGDMGAGKSSLVLRFVKGQFLEFQESTIGAAFFSQTLAVNDATVKFEIWDTAGQERYHSLAPMYYRGAAAAIIVYDITSADSFTRAKKWVQELQKQGNPNMVMALAGNKADLEDKRKVTAEEARVYAEENGLFFMETSAKTAANVNDVFHEIAKRLPRAQPTQNPAGMVLVDRPAEGARAASCCS

SEQ ID NO: 1184 - protein, 446 aa, Mycobacterium tuberculosis CDC1551
MRALPAGRHFFRGSDGYEAARRGTVWHRRVPDRYPEVIVQAVSADDIVSAIRYATVNGHKVSVVSGGHSFAASHLRDGAVLLDVSRIDHASIDADKGRAVVGPGKGGSVLMAELEAQGLFFPGGHCRGVCLGGYLLQGGYGWNSRIYGPACESVIGLDVITADGAQIHCDADNHADLYWAARGAGPGFFGVVTSFYLKLYPRPATCGTSVYVYPFDLADEVFTWARAVSAEVDPRVELQALASRGEPSMGIDVPVISLASPAFADSPEEAEQALALFGTCPVVEQALVKVPYMPTDLPAWYDVAMTHYLSDHHYAVDNMWTSASAEDLLPGIRSILDTLPPHPAHFVWLNWGPCPPRQDMAYSIEADIYLALYGSWKDPADEAKYADWARSHMAAMSHLAVGIQLADENLGARPARFASDAAMAKLDRVRAEYDPDGLFNSWMGRI

SEQ ID NO: 1185 - protein, 197 aa, Triticum aestivum
MSAVNLTNVAVLNNPTSFVNPFQFEISYECLVALEDDLEWKLIYVGSAEDENYDQQLESVLVGPVNVGTYRFVLEADPPDPSKIREEDIIGVTVLLLTCSYMGQEFIRVGYYVNNDYDDEQLREEPPAKLLIDRVQRNILTDKPRVTKFPINFHPETSGGQQQDQPQSAVPENHTSKGSKAKRRSLTGSGNLGMPKF

SEQ ID NO: 1186 - protein, 79 aa, Zea mays
  misc_feature (27)..(27): Xaa can be any naturally occurring amino acid
LGSVTSRACRDVMTHSFGEGYSTRSYXEGFGGVYGGNYPVEHPGAQIHPSHSEYDTWQGSEVKEKEKARHLKDEKHATA

SEQ ID NO: 1187 - protein, 417 aa, Anaplasma centrale
MVEKAILECGDCKVSLPVMRGNDGTLAIDVTGLYKDAKILTYDPGFLSTAACRSEITFIDGDKGILRTRGYDIADLVTTGGGFCSVAHLLLHGALPQGRELDDFASAVGNECHVPAQVVNVIKSLPSSAHPMAILIASFVTLAACYHAENSIDPLKSAIVAISKVPGIVAAIYRHTSGMPAVEADPNLGYVQNFVKMMFGDLGSTRQSVICRALESIFIMHADHEQNASTATVRVTGSAGANLFACLSAGAATLWGPAHGGANEAVVRMLEEIGSPERVGMFIQRVKDKKDGVRLMGFGHRVYKNYDPRALIIRDICKETLHELGTSDPLLDVAFELERVALQDEYFVKRFLYPNVDFYSGIVLKAIGVPVNMFTAFFALARTTGWSAQWYEMVTEHGDSNRICRPRQLYVGNMNAK

SEQ ID NO: 1188 - protein, 599 aa, Zea mays
  misc_feature (18)..(18): Xaa can be any naturally occurring amino acid
  misc_feature (328)..(328): Xaa can be any naturally occurring amino acid
GLDAHAGKEVIYFVGWSXFHTIHLVRDGTQAPSLGDLLKMKSQEGVRVLLLVWDDPTSRSILGYKMDGFMGTRDEETRRFFKHSPVQVLLCPRSAGKRHSWVKQQETGTIFTHHQKTVIVDADAGNYRRKIVAFVGGLDLCGGRYDTPWHPLFRTLQNEHKEDYYNPNFNTVDARGPREPWHDLHSKIDGPAAYDVLQNFQERWLKAAKRHGIKKLAKSYDDALLTIERIPEIININDAIYFSDNDPETWHVQVFRSIDSNSAKGFPKDPRAATMKNLVCGKNVLIDMSIHTAYVHAIRSAQHYIYIENQYFIGSSFNWDSNKDLGKXLVANNLIPIEIALKIANKIKANERFSAYIVVPMWPEGNPTGAATQRILYWQNKTMQMMYETIYRTLKEEGLDDMYEPQDYLNFFCLGNREVADSTSTSNASNTANNPQEQARKNRRFMVYVHSKGMIVDDEYVIIGSANINQRSMEGIRDTEIAMGAYQPQYTWANKLSAPRGQIYGYRMSLWAEHIGSIEEDFNYPESLECMRRVRHLGEENWKQFVADEVTEMRGHLMKYPVSVDRKGKVKPLPGCTTFPDMGGNICGSFVAIQENLTI

SEQ ID NO: 1189 - protein, 417 aa, Triticum aestivum
  misc_feature (40)..(40): Xaa can be any naturally occurring amino acid
  misc_feature (308)..(308): Xaa can be any naturally occurring amino acid
NPTPTTAKKIHRSIDLGARRTATRSDHIQRRKIKPPPPPXMKLQTEAAAAGGEGRLMIRQVWANNVESEFQAIRQVAERFPYVSMDTEFPGVIHCPSKHHATLTPSERYAALKANVDALHLIQVGLAFAASPDAAPAVAFEINLREFDPRVHRHNPSSVALLAGHGLDFAKQRREGVDARVFAALLMSSGLVCSGASAPTWVTFHSAYDFGYLVKLLMGRKLPRTLPEFLGLVRVFFGDQVYDARHVMDSCAGLYGGLDALAAQLGVERAAGMSHQAGSDAALTWDVFRRIREVYFAGHSRQGRASAXAGVLYGLDLELDLAGPRARETGTEREQEHRTLGRGTGRGRGKNRRAGGLNYRPTHPPPINCLAVNLVTSETPPADSLAPCFSMSVVVHRVSGLIRDVLMGINIMFLFVG

SEQ ID NO: 1190 - protein, 433 aa, Ehrlichia chaffeensis
MLYKQDMCGVIINLGRIMVKEAVLELDGQRIKLPVLYDTHGNKAVDITSLYKNTGILTYDPGFMSTAACESRITFIDGNKGILCYRGHDIVNLVNNNKSFIEIVYLLFYGVLPGLEDLQNFISQISQEYNPPKIVHDVIKSFPRDSHPMSILMACFSALASCYHNQDNSADQLKCAKLAVAKVASIIALIYRYITNQDFVESDTKLSYSENFVHMMFDISSYKFTQVVAKALDIIFVLHADHEQNASTATVRLSGSSGADLFACLVAGTATLWGPAHGGANEAVINMLMAIEKPSNVKQFIQKVKDGNKSTRLMGFGHRVYKNYDPRAKIMYKICREVLNNLNVNDPLLEIALELENIALQDSYFIDRNLYPNVDFYSGIVLKAIGIPVRMFTTLFALARTSGWSAQWYEMVAEENYKICRPRQLYTGNIAEC

SEQ ID NO: 1191 - protein, 267 aa, Salmonella enterica subsp. enterica serovar Typhi Ty2
MTIPAFGLGTFRLKDDVVIASVKTALELGYRAVDTAQIYDNEAAVGQAIAESGVPRNELYITTKIWIENLSKDKLIPSLKESLKKLRTDYVDLTLIHWPSPGDAVSVEEFMQALLEAKKQGLTREIGISNFTIPLMEKAIAAVGADHIATNQIELSPYLQNRKVVDWAKAHGIHITSYMTLAYGKALKDEVIARIAVKHNATPVQVILAWAMGEGYSVIPSSTRRENLASNLLAQDLHLDAEDKNAIAALDCNDRLVSPEGLAPAWD

SEQ ID NO: 1192 - protein, 497 aa, Oryza sativa
MATCLDSLGPLLGGAANSTDAANYICNRFTDTSSAVDATYLLFSAYLVFAMQLGFAMLCAGSVRAKNSMNIMLTNVFDAAAGALFYYLFGFASRRTPSKGFIGKQFFGLKHMPQTGYDYDFFLFQWAFAIAAAGITSGSIAERTRFSAYLIYSAFLTGFVYPVVSHWFWSTDGWASAGRLTGPLLFKSGVIDFAGSGVVHLVGGIAGLWGAFIEGPRIGRFDAAGRTVAMKGHSASLVVLGTFLLWFGWFGFNPGSFTTISKIYGESGTIDGQWSAVGRTAVTTSLAGSVAALNHAVRQEMADGALERDRRLQRSPRRVRAITAGCSVVDPWASVICGFVSAWVLIGCNKLALMLKFDDPLEATQLHGGCGAWGIIFTALFARKEYVELIYGVPGRPYGLFMGGGGRLLAAHIVQILVIVGWVSATMGTLFYVLHRFGLLRVSTSTEMEGMDPSCHGGFGYVDEDEGQRRVRAKSAAETARVEPRKSPEQAAAGQLV

SEQ ID NO: 1193 - protein, 335 aa, Triticum aestivum
  misc_feature (221)..(221): Xaa can be any naturally occurring amino acid
  misc_feature (243)..(243): Xaa can be any naturally occurring amino acid
  misc_feature (251)..(251): Xaa can be any naturally occurring amino acid
  misc_feature (282)..(282): Xaa can be any naturally occurring amino acid
  misc_feature (294)..(294): Xaa can be any naturally occurring amino acid
MGSIAAGADEDACMYALQLVSSSILPMTLKNAIELGLLETLMSAGGKFLTPAEVAAKLPSAANPEAPDMVDRMLRLLASYNVVSCRTEEGKDGRLSRRYGAAPVCKYLTPNEDGVSMSALALMNQDKVLMESWYYLKDAVLDGGIPFNKAYGMSAFEYHGTDLRFNRVFNEGMKNHSIIITKKLLELYKGFEGLNTLVDVGGGVGATVAAITAHYPAIKGXINFDLPHVISEAPPFPGVTHVXGGDMFQKXVPSGDAILMKWILHDWSDEHCAKLLKNCYDXLPAHGKVVLVDXILPVNPKARLKRRSVPVDLSSPPTRVQGRSKGLSLARARSP

SEQ ID NO: 1194 - protein, 416 aa, Ehrlichia muris
MIKEAVLELDDQRIKLPVLYDTNGNKAVDITSLYKDTGVLTYDPGFMSTAACESKITFIDGNKGILCYRGHNIVDLVNGNKSFVEIIYLLFYGVFPSSEDLQNFTLQISQEYTPPQVVYDVIKAFSQDSHPMAILMACFSALAAYYHDREADKDELKCAKLAVAKIASIVALIYRYITNQDFITADTKLSYSENFVHMMFDISSYKFTQVVAKALDIIFVLHADHEQNASTATVRLAGSAGADLFACLVAGTATLWGPAHGGANEAVINMLMTIEKPSNVKQFIQKVKDGSKTTRLMGFGHRVYKNYDPRAKMMCEICREVLNDLGIDDPLLEVAVELENIALQDSYFIERNLYPNVDFYSGIVLKAIGIPVKMFTTLFALARTSGWSAQWYEMVANKNYKICRPRQLYTGHITKI

SEQ ID NO: 1195 - protein, 495 aa, Oryza sativa
MATCADTLGPLLGTAAANATDYLCNQFADTTSAVDSTYLLFSAYLVFAMQLGFAMLCAGSVRAKNTMNIMLTNVLDAAAGALFYYLFGFAFAFGAPSNGFIGKHFFGLKQVPQVGFDYSFFLFQWAFAIAAAGITSGSIAERTQFVAYLIYSAFLTGFVYPVVSHWIWSADGWASASRTSGSLLFGSGVIDFAGSGVVHMVAACRTLGRPHRGPPHWRFDHAGRSVALRGHSASLVVLGSFLLWFGWYGFNPGSFLTILKSYGPPGSIHGQWSAVGRTAVTTTLAGSTAALTTLFGKRLQTGHWNVIDVCNGLLGGFAAITAGCSVVDPWAAIICGFVSAWVLIGLNALAARLKFDDPLEAAQLHGGCGAWGVIFTALFARKEYVDQIFGQPGRPYGLFMGGGGRLLGAHIVVILVIAAWVSFTMAPLFLVLNKLGLLRISAEDEMAGMDQTRHGGFAYAYHDDDASGKPDRSFGGFMLKSAHGTQVAAEMGGHV

SEQ ID NO: 1196 - protein, 409 aa, Ehrlichia sp. Yamaguchi
MIKEATLELDGQKIKLPVLYDTNGDKAVDITSLYKNTGILTYDPGFMSTAACESKITFIDGNKGILCYRGHNIVDLVNKNKSFVEIIYLLFYGVFPSAEDLQNFTLQISQEYMPPQVVYDVIKSFSQDSHPMSILMACFSALASYYHDQEADKDELKYAKLAVAKIASMVALIYRYITNQDFITADTKLSYSKNFVHMMFDISSYKFTQVVAKALDIIFILHADHEQNASTATVRLAGSSGADLFACLVAGTATLWGPAHGGANEAVINMLMTIEKPSNVKQFIQKVKDGSKTTRLMGFGHRVYKNYDPRAKIMCKICREVLNDLGIDDPLLEVAQELENIALQDSYFIERNLYPNVDFYSGIILKAIGIPVRMFTTLFALARTTGWSAQWYEMVANKNYKICRPRQLY

SEQ ID NO: 1197 - protein, 347 aa, Pseudomonas fluorescens
MARSPETNSAMPQQIRQLLYSQLISQSIQTFCELRLPDVLQAAGQPTSIERLAEQTHTHISALSRLLKALKPFGLVKETDEGFSLTDLGASLTHDAFASAQPSALLINGEMGQAWRGMAQTIRTGESSFKMYYGISLFEYFEQHPERRAIFDRSQDMGLDLEIPEILENINLNDGENIVDVGGGSGHLLMHMLDKWPESTGILFDLPVAAKIAQQHLHKSGKAGCFEIVAGDFFKSLPDSGSVYLLSHVLHDWGDEDCKAILATCRRSMPDNALLVVVDLVIDQSESAQPNPTGAMMDLYMLSLFGIAGGKERNEDEFRTLIENSGFNVKQVKRLPSGNGIIFAYPK

SEQ ID NO: 1198 - protein, 137 aa, Glycine max
LALHYRNADHPSRVDTDVDGLLGRLRFIQGLKFQVDVTYMEFLLRVKRVEEHAKGNGTWDAPHPWLNLFVSKSHIVDFDREVFKKILKDGVDGPILVYPLLRNNYIVRKISSQVKLICKGFGLSPSLIMIDGRIPSK

SEQ ID NO: 1199 - protein, 501 aa, Saccharomyces cerevisiae
MTKLHFDTAEPVKITLPNGLTYEQPTGLFINNKFMKAQDGKTYPVEDPSTENTVCEVSSATTEDVEYAIECADRAFHDTEWATQDPRERGRLLSKLADELESQIDLVSSIEALDNGKTLAFKARGDVTIAINCLRDAAAYADKVNGRTINTGDGYMNFTTLEPIGVCGQIIPWNFPIMMLAWKIAPALAMGNVCILKPAAVTPLNALYFASLCKKVGIPAGVVNIVPGPGRTVGAALTNDPRIRKLAFTGSTEVGKSVAVDSSESNLKKITLELGGKSAHLVFDDANIKKTLPNLVNGIFKNAGQICSSGSRIYVQEGIYDELLAAFKAYLETEIKVGNPFDKANFQGAITNRQQFDTIMNYIDIGKKEGAKILTGGEKVGDKGYFIRPTVFYDVNEDMRIVKEEIFGPVVTVAKFKTLEEGVEMANSSEFGLGSGIETESLSTGLKVAKMLKAGTVWINTYNDFDSRVPFGGVKQSGYGREMGEEVYHAYTEVKAVRIKL

SEQ ID NO: 1200 - protein, 379 aa, Hordeum vulgare subsp. vulgare
IPWERLQITRKDYRKARLEQYKNYENFPQSGELMDKLCKQVESSSKYYEFQYNTRIVKPSILHFQLRNLLWATSKHDVYFMSNSTVGHWSSLSHKMTDVLDFSGHVAPAKKHPGCALEGFTGVQVSTLAVNEGLLVAGGFQGELVCKSLGERDVKFCTRTTLSDNAITNAMDIHRSTSGSLRITVSNNDSGVREFDMERFQLLNHFRFNWPVNHTSVSPDKKLLAVVGDDRDALLVDSRNGKVTSTLVGHLDYSFASAWHLDGVTFATGNQDKTCRVWDIRNPSTSLAVLRGNIGAIRCIRYSSDGRFLLFSEPADFVHVYSTAECYRKRQEIDFFGEISGISLSPDDESLFVGVCDRVYASLLNYRLVHANGYLDSYM

SEQ ID NO: 1201 - protein, 130 aa, Bacillus cereus ATCC 10987
MSLTSLKDYTTLHNGVKMPWFGLGVFKVEDGSEVIESVKAAIKNGYRSIDTAAIYQNEEGVGQAIRESGVSREELFITSKVWNSDQGYETTLQAFETTLEKLGLEYLDLYLVHWPVKGKYTESWKALEKL

SEQ ID NO: 1202 - protein, 381 aa, Xylella fastidiosa Dixon
MPLLAEHGTTIIEAMYHRLFEDPQIEALFNQANQKNGTQIHALAGAILAYARNIDNPGVLASAIERISQKHVGYAIHPEHYPHVATALLGAIKQVLGDVATSEVLEAWGEAYWFIANLLKDREAVIREGIMTKNGGWIHWRRFVISKRIPESETITSFMLHPEDGGPVVPHQAGQYLTFRFDAAGMPGMKRNYSISCGPNSDYYRITVKREHGTGASAFLHDQAKVGTIIECTPPVGDFFLPSVIERPIVLLSGGVGLTPMVSMMEQIAEAHPDAQVWYVHGTQNRETHAMDAHIRALVSRHKHMKATTFYTQRSEADDAEAGFITIDWLRANTPFQKADFYLCGPRPFLRTFVRDLIGAGVPAAQVHYEFFGPMDEEMAA

SEQ ID NO: 1203 - protein, 229 aa, Glycine max
SLTRGRTRGHAVKQNYGEKVLIQFEDFANHNAFDLLEKYSSSHLGFNDDIQGTASVVLAGLLASLKLVGGTLVDHTFLFLGAGEAGTGIAELIALEISKQTKAPVEETRKKIWLVDSKVKMPGWFYSYFTFYSFFFPNLHNKLVLFQGLIVSSRLESLQQFKKPWAHEHEPVKSLLDAVKAIKPTVLIGSSGAGKTFTKEVVETMASLNEKPLILALSNPTSQSECTAE

SEQ ID NO: 1204 - protein, 346 aa, Bordetella bronchiseptica RB50
MSASLTADRTPPLTTAALPYPLDPQIQRFVERMQADSAAHPRRDLVPVEQARAISEAVRRPWAEGGPQMARTREIHAPTPHGPVRLRVYTPRAARPGPALLYVHGGGWVLFSLDTHDRLMREYAERAGLTVIGVDYTRAPEARYPRAIEEIVGVIDWLDANGAELEVDRARLCIGGDSAGANLSVAACLTLRERGAAPLAGMVLNYGVYDANLFRDSTVKYGGGEYLLSTQQMVWFYWNYLRAGDDPRDPRISPVHADLRGLPPAFMAITELDLLHDANQDMAARLREAGVDVQAKVYPGTVHSFLEAVSLAQVSVAAFDDTAAWLRAVLRPAAAAAAIHTGEHQP

SEQ ID NO: 1205 - protein, 487 aa, Triticum aestivum
  misc_feature (95)..(95): Xaa can be any naturally occurring amino acid
MGDRPKLPARYEQVKLLGEGNFAKVYLARHMDTKEEVAIKVMDKEKLIKLGAVQQIKREIAVMRRLRHPNIVQLHKVMACKSRIFVVMEYVRGGXLYRHIPANSGLKEDETRRIFQQLVSALTFCHAQGVYHRDIKPDNLLVDEHGNLKVADFGLSAHADTARREALLHTVCGTPLYVPPEVFARRGYDGAKADAWSCGIVLFVLAAGRKPFRDDDFITLYRTICRGDYRCPRTFSPELVRIVRRLLQPNPAHRITLLQIKETDWFKKGFKEISFYIDNKDCLRSLDGSEEPDLCDSDSEDETAMSSSSSGSSSPVAHGDGGGMHTSVSAPSLVNLEKMHIAAARAPEPRIRRIKSMNAFDIIASSPSFDLSGLFEERGEQLRFVSSAPVNTIIKKLEEIAGQVSFTARTKDCQVSFEATRNGHKGALAISTKIFQLTPELVMVQVCKKAGDTAEYRQFCGSELKPGLRGLVDGLPEDGLPPTLNVA

SEQ ID NO: 1206 - protein, 437 aa, Rubrivivax gelatinosus PM1
MTPSDVKATLSFSDGSPSMDLPIYKGSVGPDVIDIRKLYAQTGKFTYDPGFLSTASCQSAITYIDGDKGELLYRGYPIEQLAENCDFLETCYLLLNGELPNVTEKAKFVKTVNGHTMVNEQMQFFLRGFRRDAHPMAVLTGLVGGLSAFYHDSTDVQNPEHRAIAAIRLIAKMPTLVAMAYKYSIGQPYIYPRNDLSYTSNFMRMMFGTPCEEYVPNDVLVRAMDRIFILHADHEQNASTSTVRLCGSSGTNPFAAIAAGVACLWGPAHGGANEACLNMLEDIQKMGGVAKVGKFIEQVKDKNSGVRLMGFGHRVYKNYDPRAKLMRETCHEVLAEMGLQNDPLFKLAMELEKIALEDDYFVSRKLYPNVDFYSGIVQRAIGIPVSLFTAIFALARTVGWIAQLNEMIGDPEYKIGRPRQLFVGATARDVTPIAERA

SEQ ID NO: 1207 - protein, 112 aa, Bartonella sp. CL1281co
NEACLKMLQEIGSVKRIPEFIARAKDKNDPFRLMGFGHRVYKNYDPRAKIMQQTCHEVLKELNIQDDPLLDIAIELENIALNDEYFVEKRLYPNVDFYSGITLKALGFPTEM

SEQ ID NO: 1208 - protein, 316 aa, Glycine max
MGGGGAMRSAAKIAGIGVSKAALRPSALPTEQTVRNASRPTAVSGVSSQSAKSAEVAPLHTAAAWDDWDFAEDGELVVPRMVFGSVPTLDEAKEATAELKDAIDQVYLCPETSQYSSPGGQVSALSPTLYGPVNRSCVIDAISDPTAPKHAIQAFHLLSTSREAQAVVASLACDPNVWNAVMENSAVSSFFQSQQSVAGFGAAENTEEVDKLSSCASETVESPEKLEVSAESHPGNMIFDFMDLLQNVKLTVIELVSRLSGFLQNIFPTPDAMKEKMSGDADGNTKASFMDSKISMGGTFIGLAVLVIMVIVTKRA

SEQ ID NO: 1209 - protein, 254 aa, Neurospora crassa
MMSGPETTRAVRWALGAGYRGFDSAQWYYNEREAGQAILSFLSSPENTAGLTRKDVHFTSKLRDNSTNYDAVRASISKSVKASGLGYIDLFLLHSPLGGREARLTSWKAVEDAVLAGEVKMAGVSNYGVKHLDEVMSAPFKIKPLVNQIECHPFNTQPEIRAACEKYGIVIEAYAPLARGMRMKHPVLTAVAKKYGVTPAQVLVRWSVQHGFVTLPKSTKKERLVENADVGRFELAEEDMEKLDGLDEKLVTDW

SEQ ID NO: 1210 - protein, 377 aa, Thermus thermophilus HB27
MEVARGLEGVLFTESRMCYIDGQQGKLYYYGIPIQELAEKSSFEETTFLLLHGRLPRRQELEEFSAALARRRALPAHLLESFKRYPVSAHPMSFLRTAVSELGMLDPTEGDISREALYEKGLDLIAKFATIVAANKRLKEGKEPIPPREDLSHAANFLYMANGVEPSPEQARLMDAALILHAEHGFNASTFTAIAAFSTETDLYSAITAAVASLKGPRHGGANEAVMRMIQEIGTPERAREWVREKLAKKERIMGMGHRVYKAFDPRAGVLEKLARLVAEKHGHSKEYQILKIVEEEAGKVLNPRGIYPNVDFYSGVVYSDLGFSLEFFTPIFAVARISGWVGHILEYQELDNRLLRPGAKYIGELDVPYVPLEARE

SEQ ID NO: 1211 - protein, 233 aa, Crocosphaera watsonii WH 8501
MSDPVVMMKQEVGKAAAARVKSDSIVGLGTGSTTAYAIQYIGERLQSGDLKNIIGVTTSFQAEVLARKYNIPLSTLDVVDRIDIAIDGADEVDPQKNLIKGGGAAHTQEKIVDSLAEQFIVVVDGGKLVDKLGSTFLLPVEVIPKAVVPVMRKLEQLGGKPDLRMGVKKAGPVVTDQGNLVVDVKFDSIDDPATLEKTINNIPGVLENGLFVGVTDVVLVGEIIDNKPVVREI

SEQ ID NO: 1212 - protein, 118 aa, Brassica napus
MAESQTKSPGDHVSGGDQSPRSSSHVREQDRFLPIANISRIMKRGLPANGKIAKDAKEILQECVSEFISFVTSEASDKCQREKRKTINGDDLLWAMATLGFEEYIEPLKLYLTRYREM

SEQ ID NO: 1213 - protein, 371 aa, Agrobacterium tumefaciens str. C58
MDGTPISPTARAKASSSDCNRGILLKTHRIALIPGDGIGQSVTDAAWQVLNAVAKTSGFVLEGTEFPWSCAFYKETGAMMPKDGIETLRGFDAIMLGAVGWPAEVPDSVSLHGLLLPIRKAFVQYANIRPHRLLSGVQGPLKADGFDILCIRENTEGEYSGAGGRVHQGTEDEVAVETSIFTRKGVERILRFGFEQAQKRRGKLASITKSNAQKYSMVFWDEVTHKLAAEYPDVEVSSYHIDAMAARMVMAPESLDVVVASNLFGDILTDLGAAIQGGLGFAASANINPDRSAPSMFEPVHGSAPDIAHLGIANPIAAIWSGAMMFEHLGEKDAAAKIMAALETATGRGIGTVPGKDKTDTITAAVLAALA

SEQ ID NO: 1214 - protein, 99 aa, Glycine max
  misc_feature (43)..(43): Xaa can be any naturally occurring amino acid
MAPSTISNPGAGFVDRAVPSMIATITGLRIMAGFPTRKTNKDXTFIDCNGGRVHCMHVWPPVGKKKCENLSYLTDLEDAQWAKEAEYLVREGMDINARN

SEQ ID NO: 1215 - protein, 484 aa, Agrobacterium tumefaciens str. C58
MIKLKNAALLRDACLVNGRWLKAADGKTIAVENPANSMIIGHVPSLSADEVKAAVESAGKAFSEWSRRSAKDRAAILRRWFDLMVANADDLGALMTAEQGKPFAEAKGEALYAASFVEWFAEEAKRVYGDTIPSPTTDKRITILKQPIGVCAAITPWNFPAAMITRKAAPALAAGCAMIVKPAEQTPLTALALGVLAEEAGVPAGVFQVVTGAARDIGKVFTESDTVRKISFTGSTEVGRLLMAQSAPTIKKLSLELGGNAPFIVFDDADLDAAVEGAIVSKYRNAGQTCVCSNRIYVQDGVYDAFAEKLVKRVESLSVGEGTEPGVLIGPLIDQEAVAKVEDHVADALGKGAKIVIGGKRHALGGTFYEPTVLTGATQAMKVAREETFGPVAPLFRFGTEDEAVAMANDTEFGLAAYFYTENVRRTWRVAEALEYGMVGHNTGLISNEVAPFGGVKQSGLGREGSHYGIDEYLEIKYLCSAIG

SEQ ID NO: 1216 - protein, 197 aa, Zea mays
  misc_feature (169)..(169): Xaa can be any naturally occurring amino acid
MATSFQGTTTKCTACDKTVYLVDKLTADNRVYHKACFRCHHCKGTLKLANYNSFDGVLYCRPHFDQLFKRTGSLDKSFQGTPKVVKPERNVGNENATKVSSAFAGTREKCVGCSKTVYPIERVTVNNTMYHKCCFKCCHGGCTISPSNYIAHEGKLYCKHHHVQLIKEXGTSASSRMTTRRHRRLGRWRTTKKKSIN

SEQ ID NO: 1217 - protein, 96 aa, Glycine max
VLEATMICIDNSEWMRYRDYSPSRFQAQTDAANLICGAKTHSNPYYTAGVLTMAGTGTRVTATHPSDLGRILSGLHGLEMGAKLNLSDRMQEAQLG

SEQ ID NO: 1218 - protein, 398 aa, Neorickettsia risticii
MNSEKVKVNVEEFLKSTAGPSGVSASLEPRGFFYDPGYAKTAPCKSSITFIDGENGILLHRGYPIEELAQTSDFLQVGYLLINGKLPDSIATREFEEKIKHVPQLPECVLKNIRSFPTSAHPMAVLISALASLASVYGEMDFHEKKLLLVAYTPWLVAYIYRHINSQEFIEPDIRLPYTENFLYMMFGEKKPKDAEILDKIFILHADHGQTASTSVARMVVSSGASPIVACSAATASLWGPLHGGANERVLEMLRGIIESGENVENFIERVKRKEERLMGFGHRVYKNYDPRAAILKQKAHDVLKADSPILKTAGKLETIATREEYFLSRKLYPNVDFYSGIVLDALGIPSCMFTPIFALARTVGWVAQIAEFLSDSEQKLCRPRQIYVGEPRRSVHG

SEQ ID NO: 1219 - protein, 483 aa, Hordeum vulgare subsp. vulgare
  misc_feature (396)..(396): Xaa can be any naturally occurring amino acid
MERYNIITEVGDGTFGSVWRAINKESGEVVAIKKMKKKYFSWEECINLREVKSLRRMNHPNIVKLKEVIRENDMLFFVFEYMECNLYQLMKSKGKPFSETEIRNWCFQVFQALSHMHQRGYFHRDLKPENLLVTKELIKVADFGLAREIISEPPYTEYVSTRWYRAPEVLLQSSVYSSAVDMWAMGAIIAELFSHRPLFPGSSEADEIYKICNILGTPNQHTWAGGLQLAASIHFQFPQSGSINLSEVVPTASEDALNLISWLCSWDPRKRPTAVEVLQHPFFQPCFYVPPSLRYRSTGYATPPPSVGAKGAMDQKNARRYPVGTLSNGRPAVNNSYLSTNAPARAAGVQRKLELDHQVKPEGNHKLTTKENAMNQPWSRLPPAPVRNNMNYLAAXEQIPRGGAPDIAEKLSQLSMSSTTNRAPIMPSDRFVDLKATTRAHGEPVRRPVPLGPRDTWHARNDPFRRTYEMPGERALLQRKLVS

SEQ ID NO: 1220 - protein, 398 aa, Neorickettsia sennetsu
MNSEKVKVNVEEFLKSTAGPFGVSASLEPKGFFYDPGYAKTAPCKSSITFIDGENGILLHRGYPIEELAQTSDFLQVGYLLIDGKLPDSAATREFEERIKHVPQLPECVLKNIRSFPTSAHPMAVLISALASLASVYGEMDFNQKKLLLVAYTPWLIAHIYRHINSLEFVEPDIRLPYTENFLYMMFGEKKPKDAEILDKIFILHADHGQTASTSVARMVVSSGASPIAACSAATASLWGPLHGGANERVLEMLRGIVESGEKVENFIERVKRKEERLMGFGHRVYKNYDPRAAILKQKAHDVLKADSPILKTAGELETITAREEYFLSRKLYPNVDFYSGIVLDALGISSCMFTPIFALARTVGWVAQITEFLSDSEQKLCRPRQIYVGEPRRNVHG

SEQ ID NO: 1221 - protein, 473 aa, Salmonella typhimurium LT2
MPTHLVWFRRDLRLQDNLALAAACRDASARVLALYISTPAQWQAHDMAPRQAAFISAQLNALQTALAEKGIPLLFHEVADFNASIETVKNVCRQHDVSHLFYNYQYEFNERQRDAAVEKTLPSVICEGFDDSVILAPGAVMTGNHEMYKVFTPFKNAWLKRLKEDIPPCVPAPKIRVSGALSTPLTPVSLNYPQQAFDAALFPVEENAVIAQLRQFCAQGADEYALRRDFPAVDGTSRLSASLATGGLSPRQCLHRLLAEQPQALDGGPGSVWLNELIWREFYRHLMTWYPALCKHQPFIRWTKRVAWQENPHYFQAWQKGETGYPIVDAAMRQLNATGWMHNRLRMITASFLVKDLLIDWRLGERYFMSQLIDGDLAANNGGWQWAASTGTDAAPYFRIFNPTTQGERFDRDGEFIRQWLPALRDIPGKAIHEPWRWAEKAGVVLDYPRPIVEHKQARIATLSAYEAARKGA

SEQ ID NO: 1222 - protein, 159 aa, Chromobacterium violaceum ATCC 12472
MTTLYDFSAQRADGAEQALSAYEGRVALLVNTASECGYTRQYAGLQELQDYFAGQAFVVLGFPCNQFGGQEPGGEDEIVDFCRSRFGVSFPLFAKLQVNGDGAHPLWRWLTQADSDRPHPIKWNFTKFLVDGRGRVVKRYEPAVEPHELVDDIKALLAR

SEQ ID NO: 1223 - protein, 403 aa, Neorickettsia helminthoeca
MDTDEVTIKIQATVKSSGGPNGILISSEPRSFIYDPGYVSTASCKSEITFVDGEEGVLLYRGYPVDELATQCDFLRVVYLLLYGELPDPVRAKEFRTFIQNFPQLPDCVLENICSFPRDAHPMVILISAFAALASAHHDSDFETHKEVLIANVPRLVAYIYRYITSQDFIPPDACLSYVGNFFYMMFGEKKPDYESILDKILILHADHEQNASTSTARMVVSSGASPIAAVSAATATLWGPLHGGANEKVLHMLGEIEKQGGSVEEFIERVKRKEERLMGFGHRVYKNYDPRAVILKSTAQDILKGSSSILSIASKLESIASNDEYFISRKLYPNVDFYSGIILNALGIPTYMFTPIFALARTSGWVAQIKEFLSDKEQKIARPRQIYIGKPFRKVASQSEKL

SEQ ID NO: 1224 - protein, 250 aa, Glycine max
MGKSYPTVSADYQKAVEKAKKKLRGFIAEKRCAPLMLRLAWHSAGTYDVSSKTGGPFGTIKHPSELAHGANNGLDIAVRLLEPLKAEFPILTYADFYQLAGVVAVEVTGGPEVPFHPGREDKPEPPPEGRLPDATKGSDHLRDVFGKAMGLSDRDIVALSGGHTIGAAHKERSGFEGPWTSNPLIFDNSYFKELLSGEKEGLLQLPSDKALLSDPVFRPLVEKYASDEDAFFADYAEAHQKLSELGFAEA

SEQ ID NO: 1225 - protein, 177 aa, Glycine max
PPHPPAEPEKPFPNFLERPKQTTTPYKETRKKIWLVHPKGLIVGSRKASLQHFKQPWAHEHEPVGSLLEAVKVIKPTVLIGSSGVGKTFTKEVIEAVTSINEKPLVLALSNPTSQSECTAEEAYQWSEGRAIFASGSPFDPVEYKGKVYYSGQANNAYIFPGFGLGLVISGAIRVHD

SEQ ID NO: 1226 - protein, 502 aa, Mentha x piperita
MYSIAFMLVLRKMDEIISHTLAFQALVSLILLISITKWLSNSPKNKNSSPPSPRKLPILGNLLQLGSLPHHNLRSMARKHGPIMLLHLGSVRPVSSRRRPRGNHENSRSRLRRPRGSRSAALQLQGRVGGYGEYWRQLKTICVVQLLSNKRVQSFRSVREEETELLMKKIGDSSGNVNLSHMFTQLTNDVVCRSAIGRKYGAGDENGEKFLEILREFLELLGAISIGDFVPSLWWINRINGFDRRVDRIAKEMDEFLEKVIHERLENPAAKAEENFVDILLEIYRNNSAGVSIDRDSIKAIILDVFAAGTDTTAVVLEWAMTELLRHPEIMKKLQSEVRQVVKDKHNITDDDIEKMHYLKAVMKETMRFHTPIPLLVPRVARNDVEVMGYDVPVGTMVMINAWAIGRDPTSWDEPEKFRPERFLNSSVDFKGLDFELIPFGAGRRGCPGTTFPMATLEFTLANLMQKFDWELPHECRELDMSERPGVAIRRVIPLLAIGTKM

SEQ ID NO: 1227 - protein, 244 aa, Triticum aestivum
MFGYRKAPDLDLEAGGSAPLYPGMTEDVELRWAFIRKIYVILSVQLAMTAAVAGFVVKVPAVSDFFVSSNAGLGLYIFLLVLPLIVLCPLRYYHQKHPVNLILLGVFTVSISFAVGMTCAFTSGKIILEAAILTAVVVISLTAYTFWAAKRGHDFNFLGPFLFGALMVLLVFSLIQIFFPLGKISTMIYGAVASIIFCGYIIFDTDNIIKRHTYDEYIWAAVSLYLDIINLFLNLMQILRAADS

SEQ ID NO: 1228 - protein, 485 aa, Oryza sativa (japonica cultivar-group)
MATTTGRHRHDRLSALPDGILVRVLSHLGSVDAASTAALSHRWRHIHAAVPVVDLVDPESDQISSAIVAKNSAAPIRTLRLVDLWPPHDALHQAVATATAAGLQEFDVKLRHGDCSNRKLCPFRRHPDASADFDDSMRGSFTATPPHIFRCDTLRRLRLTNFQLDVPEGGVSMPSLEILSLKRIMATTDEAVQQLVSGCPNLADLTLEQCPSVADLVVASPRLESFAMICCHNAAHVVLHTQRLRTLRYKDGLPAGENFLMIADCTNVLAMTIDICESLVGKSAPAVVPITKLITRCASLTFLHLHLRPAMAYHSGAFTRALRHHPHLRQLALKGLLKDDQTIRSVSTLLRNTPELDVLSLFPLRTQPAKPYYLGVDSDDDYDSEEEEEEDGGASDDNQGVRVPLSLWESNIECLHKLRKIKLHNYKGKPNERLLAKYLLSKATSLEQFFVTLPAKTTADRQLKLTNELKYWRANKRAIVSCTLL

SEQ ID NO: 1229 - protein, 491 aa, Pseudomonas putida
MSQRLAAYENMSLQLIAGEWRVGKAGRDLDVLDPFTQEKLLQIPLANREDLDEAYRSARQAQVAWAACGPSERAQVMLNAVRIFDERRDEIIDWIIRESGSTRIKAQIEWGAARAITQESASLPSRVHGRILASDVPGKESRVYREPLGVIGIISPWNFPLHLTARSLAPALALGNACVIKPASDTPVTGGLLLAHIFEEAGLPKGVLSVVVGSGSEIGDAFVEHEVPGFISFTGSTQVGRNIGRIAAGGEHLKHVALELGGNSPFVVLADADLDQAVNAAVVGKFLHQGQICMAINRIIVEDSVYDEFVNRYAERVKSLPYGDPSKPETVVGPVINAKQLAGLQDKIATAKSEGARVMVEGEAQGNVLPPHVFADVTADMEIAREEIFGPLVGIQRARDEAHALELANSSEYGLSSAVFTSSLERGVKFARGIRAGMTHINDIPVNDEPNAPFGGEKNSGLGRFNGDWAIEEFTTDHWITVQHAPRRYPF

SEQ ID NO: 1230 - protein, 206 aa, Triticum aestivum
  misc_feature (171)..(171): Xaa can be any naturally occurring amino acid
MATSFQGTTTKCNACDKTVYLVDKLTADNRVYHKACFRCHHCKGTLKLANYNSFEGVLYCRPHFDQLFKRTGSLDKSFEGTPKVVKPERNVGNENATKVSSAFAGTREKCFGCSKTVYPIERVTVNNTMYHKSCFKCCHGGCTISPSNYIAHEGKLFCKHHHTQLIKEKGXSASSRTTTTRHHRVPGQWMMKTRSISQSLRISRDE

SEQ ID NO: 1231 - protein, 244 aa, Triticum aestivum
MFGYRKAPDLDLEAGGSAALYPGMTEDVELRWAFIRKIYVILSVQLAMTAAVAGFVVKVPAVSEFFVSSNAGLGLYIFLLVLPLIVLCPLRYYHQKHPVNLILLGVFTVSISFAVGMTCAFTSGKIILEAAILTAVVVISLTAYTFWAAKRGHDFNFLGPFLFGALMVLLVFSLIQIFFPLGKISTMIYGAVASIIFCGYIIFDTDNIIKRHTYDEYIWAAVSLYLDIINLFLNLMQILRAADS

SEQ ID NO: 1232 - protein, 226 aa, Triticum aestivum
MATMAPSPALLPLLLLLPLLLLSVACTAGAAPAATATVPTIPSQPGKPNSNNKQKQGGAPLGPAVRALVQSTCNATTYYDLCVAALVADPASSTADLRGLCAIAVSAAAANASATASALANTTWAASGAPETGSDGRAQQVPALLMRTCAGKYGEAREALLEARESVGEEAYDYAFVHVGAAAEYPAVCRTLFRRKRVPYPVELARREQALEHLCTVVIDIITLLA

SEQ ID NO: 1233 - protein, 62 aa, Triticum aestivum
  misc_feature (17)..(17): Xaa can be any naturally occurring amino acid
AAKAWARTPRSWVAVKXKEAEEDLVFRMHRLVGNRWELIAGRIPGRTAEEVEMFWAKRHQDQ

SEQ ID NO: 1234 - protein, 50 aa, Lactobacillus crispatus
  misc_feature (2)..(2): Xaa can be any naturally occurring amino acid
  misc_feature (46)..(46): Xaa can be any naturally occurring amino acid
GXGFITPDDGSKDVFVHFSAINGYKSLDEGQKVSFTIESGAKGPAXANVT

SEQ ID NO: 1235 - protein, 215 aa, Clostridium acetobutylicum ATCC 824
MKLFIDTANVEEIKEVNDMGVICGVTTNPSLVAKEGRDFNEVIREITSIVDGPISGEVIALDAEGMIKEGREIAKIHKNMVVKIPMTEEGLKAVKVLSSEGIKTNVTLIFSAGQALLAARAGATFVSPFLGRLDDIGADSIGLIESIVNIFDIHDIRTEIIAASIRSPKHVIDSAEAGAHIGTVPYKVLKQLIKHPLTDIGIERFMKDWKEAFNK

SEQ ID NO: 1236 - protein, 312 aa, Bradyrhizobium japonicum USDA 110
MTTSDSLRDTRIPTHESVTIPAVGFGTLIPDPLVTRQAIRAALEAGFRHLDCAERYRNEAAVGDAMQDAFKAGKLRREELFVTTKLWNTNHRPERVKPAFDASRRRLQLDEIDCYIIHTPFAFQPGDEQDPRDASGRVIYDSGVTLVETWHALERLVDEGHCKSIGLSDITLEKLREIVAVARIRPAMVQVESHPYLPEWDLLDFCREHGIVLQAFAALGHAMEPRVLEDPVITAIARRVQKTPAQVCLAWAVQRGTAFLTTSTNPARIRENFDISALPEDAMREIRDGITTNVRFNAVVETGVPGFIPRAR

SEQ ID NO: 1237 - protein, 383 aa, Corynebacterium glutamicum ATCC 13032
MSSATTTDVRKGLYGVIADYTAVSKVMPETNSLTYRGYAVEDLVENCSFEEVFYLLWHGELPTAQQLAEFNERGRSYRSLDAGLISLIHSLPKEAHPMDVMRTAVSYMGTKDSEYFTTDSEHIRKVGHTLLAQLPMVLAMDIRRRKGLDIIAPDSSKSVAENLLSMVFGTGPESPASNPADVRDFEKSLILYAEHSFNASTFTARVITSTKSDVYSAITGAIGALKGPLHGGANEFVMHTMLAIDDPNKAAAWINNALDNKNVVMGFGHRVYKRGDSRVPSMEKSFRELAARHDGEKWVAMYENMRDAMDARTGIKPNLDFPAGPAYHLLGFPVDFFTPLFVIARVAGWTAHIVEQYENNSLIRPLSEYNGEEQREVAPIEKR

SEQ ID NO: 1238 - protein, 370 aa, Desulfitobacterium hafniense DCB-2
SGDRVLTFDYLGALAVSLVFPLVLAPRLGLSRTGFLFGMLNVAVALFTLRIFRDEVSRTTLRTLRAGMVLAVLTVGFAGSNYLTHWAERGLFGDEIIHSETTPYQRLVITRWKDDLRLYINGNLQFSSRDEHRYHEALVHPVLQALPWARRVLVIGGGDGLALREILKYRNIEHVTLVDLDPAMTTLFSRSEPLRALNHGSLTDQRVTVVNADAAQWLEQNQDSFDAIIVDLPDPSNFGLGKLYSVPMYRLMSRHLAEKGYAVVQSTSPYYAPRSFWDIDATLREAGLHTWPYHTYVPSFGEWGYILVGKRNDYTPPTRYDVPMKFLDGDTTALMFRFPADMAPRQGEPNRLNEQTLVHDFERDWRNVIR

SEQ ID NO: 1239 - protein, 124 aa, Triticum aestivum
LFCSLLCVCCQMLEWFADIRLINGEAIHASPRKTGAIILGGGLPKHHICNANMFRNGADYAVYINTAQEFDGSDSGAHPDEAVSWGKIKGSAKPVKVHCDATIAFPLLVAATFARRSHGANSTN

SEQ ID NO: 1240 - protein, 365 aa, Medicago sativa
MGSTGETQITPTHISDEEANLFAMQLASASVLPMILKSALELDLLEIIAKAGPGAQISPIEIASQLPTTNPDAPVMLDRMLRLLACYIILTCSVRTQQDGKVQRLYGLATVAKYLVKNEDGVSISALNLMNQDKVLMESWYHLKDAVLDGGIPFNKAYGMTAFEYHGTDPRFNKVFNKGMSDHSTITMKKILETYTGFEGLKSLVDVGGGTGAVINTIVSKYPTIKGINFDLPHVIEDAPSYPGVEHVGGDMFVSIPKADAVFMKWICHDWSDEHCLKFLKNCYEALPDNGKVIVAECILPVAPDSSLATKGVVHIDVIMLAHNPGGKERTQKEFEDLAKGAGFQGFKVHCNAFNTYIMEFLKKV

SEQ ID NO: 1241 - protein, 505 aa, Oryza sativa (japonica cultivar-group)
MAAPSAIPRRGLFIGGGWREPSLGRRLPVVNPATEATIGDIPAATAEDVELAVSAARDAFGRDGGRHWSRAPGAVRAKYLKAIAAKIKDKKSYLALLETLDSGKPLDEAAGDMEDVAACFEYYADLAEALDGKQRAPISLPMENFESYVLKEPIGVVGLITPWNYPLLMATWKVAPALAAGCTAVLKPSELASLTCLELGGICAEIGLPPGVLNIITGLGTEAGAPLASHPHVDKIAFTGSTETGKRIMITASQMVKPVSLELGGKSPLIVFDDVDIDKAVEWAMFGCFANAGQVCSATSRLLLHEKIAKRFLDRLVAWAKSIKISDPLEEGCRLGSVVSEGQYQKIMKFISTARCEGATILYGGARPQHLKRGFFIEPTIITNVSTSMQIWREEVFGPVICVKEFRTEREAVELANDTHYGLAGAVISNDLERCERISKAIQSGIVWINCSQPCFVQAPWGGNKRSGFGRELGQWGLDNYLSVKQVTKYCSDEPYGWYRPPSKL

SEQ ID NO: 1242 - protein, 325 aa, Aspergillus oryzae
MSNGKTFTLSNGVKIPGVGFGTFASEGSKGETYQAVTKALETGYRHLDCAWFYLNEDEVGDGIHDFLKKNPSVKREDIFVCTKVWNHLHRPEDVQWSVDNSLKRLRLDYVDLFLVHWPIASEKEDQEKPKIGPDGKYVILKELTENPEPTWRAMEKIYRDGKAKAIGVSNWTIPGLEKLFKFAEIKPHVNQIEIHPFLPNNELVQFCFKNDILPEAYSPLGSQNQVPTTGERVSENKTLNEIAQKGGNTLAQVLIAWGLRRGYVVLPKSSNPARIESNFKSIELTDEDFEAVNKVAEGRHFRFVNMKDTFGYDVWPEETAKNLSA

SEQ ID NO: 1243 - protein, 469 aa, Neurospora crassa
MVLIKLNPTVGATDAVASSKHSAVLHRHLDTTFLNMTRSEGNFLILEDDRKIFDASGGAAVGCLGWGDQRVAQAVTNQVLAAPYCATIFYTTRVQEELCRDLVQSTNGAMARAYIVNSGSEAMEAAVKLARQYFLEIDQPQRTRFISRKQSYHGITLGALSVGGHEVRRAKFEPLLIKNVSRVSPCNAFRGKAPGESDEEYAERLAKELDDEFQQVGPENVCAFVAEPIVGAALGCVPAVKGYFKAVRDVCDKYGALLILDEVMCGMGRSGTLHAWEQEGIVPDIQTIGKALGGGYQPVAGLLAGHRVVNALEKGSSVFVHGHTYQGHPAACAAALEVQRIVREENLLSNVRAMGDLLSSRLREILASHPNVGDIRGRGLFWGIEFVADKENMAPFPSEDHVCMEICQLGLTDKYGINVYPGGGSVDGITGDHIIISPAFNISREDVEWIAATVGRLVSDYFAAKAGTQ

SEQ ID NO: 1244 - protein, 368 aa, Nicotiana tabacum
MGIQHNEHNQDQTQSFLLDALYCEEERWEETIEDEILEKEATLPLPLPLLEQDLFWEDEELLSLFTKEKETISNFETIKTDPLLCLSRKEAVKWILKVNAHYGFSTFTAILAINYFDRFLSSLHFQKDKPWMIQLVAVTCLSLAAKVEETQVPLLLDFQVEDAKYVFEAKTIQRMELLVLSSLKWRMNPVTPLSFVDHIIRRLGLKSHIHWEFLKQCERILLLVIADCRFLSYMPSVLATATMLHVIHQVEPCNAADYQNQLLEVLNISKEKVNDCYELITEVSYNSISHKRKYESPINSPSAVIDTFYSSENSNESWDLQTSSSIPSTYSPRDQFLPLFKKSRVQEQQMRLTSLSRVFVDYAVGSPR

SEQ ID NO: 1245 - protein, 277 aa, Yersinia pestis KIM
MTMQPLIKLYDGRLMPQLGLGVWQASIQETELAVSKALEVGYRSIDTAAIYKNEEGVGKALKAAAVARDELFITTKLWNDDQHNPQQALETSLQKLQLDYVDLYLIHWPDPKQDHYVSAWRELVTLKEQGLIRSIGVCNFHIPHLQRLIDETGIAPTVNQIELHPLLQQRQLHAWNATHHIATESWSPLAQGGKGVFDQEIIRKLAQQYNKTPAQIVIRWHLDSGLIVIPKSVTPARIRENFEVFDFKLQKEELLAITKLDCGKRLGPDPEVFGSDR

SEQ ID NO: 1246 - protein, 299 aa, Glycine max
MVLRKVGKYEIGRTVGEGTFAKVKFAQNTESGESVAMKVLDRSAIIKHKMVDQIKREISIMKLVRHPYVVRLHEVLASRTKIYIILEFITGGELFDKIIHHGRLSENDSRRYFQQLIDGVDYCHSKGVYHRDLKPENLLLDSLGNIKISDFGLSAFPEQGVSILRTTCGTPNYVAPEVLSHKGYNGAVADVWSCGVILYVLLAGYLPFDELDLTTLYSKIERAEFSCPPWFPVGAKMLIHRILDPNPETRITIEQIRNDEWFQRSYVPVSLLEYEDVNLDDVNAAFDDAEEPRADQQCD

SEQ ID NO: 1247 - protein, 207 aa, Triticum aestivum
  misc_feature (106)..(106): Xaa can be any naturally occurring amino acid
  misc_feature (117)..(117): Xaa can be any naturally occurring amino acid
  misc_feature (129)..(129): Xaa can be any naturally occurring amino acid
  misc_feature (138)..(138): Xaa can be any naturally occurring amino acid
MSDTDEHHFESKADSGASKTYPQQAGAIRKGGHIVIKARPCKVVEVSTSKTGKHGHAKCHFVAIDIFNGKKLEDIVPSSHNCDVPHVDRQDYQLIDITDDGMSASXLESGNTKDDLXLPTDDVLLGQIXDGFADGKDXILSVMSAMGEDNMPVKESVGAITLSVVATCKLDQCSGVENHHRIRYRWVNSCQIGVLPARRALNSTPPP

SEQ ID NO: 1248 - protein, 54 aa, Brassica napus
  misc_feature (23)..(23): Xaa can be any naturally occurring amino acid
MGSETFVEILLAILLPPVGVFLXYGIGVEFWICLLLTILGYIPGIIYAVNVLVA

SEQ ID NO: 1249 - protein, 259 aa, Helianthus annuus
MAAASSPREENVYLAKLAEQAERYEEMVEFMEKVVAAADGGEELTIEERNLLSVAYKNVIGARRASWRIISSIEQKEESRGNEGHVSTIRDYRSKIESELSSICDGILKVLDSKLIGSASGGDSKVFYLKMKGDYYRYLAEFKTGDERKLAAENTLSAYKAAQDIANAELAPTHPIRLGLALNFSVFYYEILNSPDRACNLAKQAFDEAIAELDTLGEDSYKDSTLIMQLLRDNLTLWTSDMQDDTAEEVKEAPKPDDQ

SEQ ID NO: 1250 - protein, 197 aa, Zea mays
ISSALCTWLLPLPLTKEKAAFSPSDPAMQRHVASGRPSGTDGSDFSYRMVVESRYQRVAEGRSRLARLILVQALHLVAGGLLLLLSLSKGAAVNKFAVLSMAAGFLAIVVGELGRMRTMSVLLRLYTSLSSIAVAFSVTCIIRSELFLKVMKQNTEAITSYEMLDAVRVALGILLQMVVIATTTRLLQNMSPPKRAS

SEQ ID NO: 1251 - protein, 297 aa, Helianthus annuus
MGFVKVVKNKQYFKRYQVKFKRRREGKTDYFARKRLIAQDKNKYNTPKYRLVVRFSNRDITCQVAYSRIEGDKILCAAYAHELPQYGVKVGLTNYAAAYCTGLLLARKLLSQLGLDKLYIGSTEVTGEEFNVKPVEDGPGAFRCYLDVGLMRTTTGARVFGAMKGAVDGGLNILHSTKRFPGFDSESKEFNADVHRQHIFGQHVAEYMRQLAEEDDEAYKRQFSQYIKLGLNADAIEGLYKKAHEAIRANPARKTVAKKAHPKKRWTEKKLTREQRQGKVAAAKAEWLKKIEAGEVE

SEQ ID NO: 1252 - protein, 78 aa, Triticum aestivum
MGLWSFLEGVLLIANALAILNEDRFLSPRGWSFADARGVQGANTFKGQMIGLIYAAQYMRFPLILLNGITILVKFVSF

SEQ ID NO: 1253 - protein, 93 aa, Glycine max
PGGALGPDSLGLPTRPLVGEDDRRGFLGNLFPTPGAIREKMSIDAGGNTKASFMDSKISMGGTFIGLAALVIMVIVTKRAYTLTSKTTICRLF

SEQ ID NO: 1254 - protein, 490 aa, Crocosphaera watsonii WH 8501
MVTATRPENKVKIGPTQLLINNKWVESASGKRFETINPSTGEVICDVAEADAADVDKAVIAARNAFNQGDWPKLSATQRGQLLYKLADLIEANIEELARLETLDNGKPYQDSLNADLQLVIACYRYYAGWADKIQGKTIPINGPYFCYTRHEPVGVVGQIIPWNFPLLMQAWKLAPALAAGNTVVMKTAEQTPLSALRLGELILEAGFPPGVVNLLSGYGPTAGQAIARHHDIDKVAFTGSTEVGHLIMEAAAQTNLKRVTLELGGKSPNIVFADANLEQAIEGAHFGLFFNQGQCCCAGSRLFVEEKCYDEFVAKSVERAKQRIVGDPFDDNTAQGSQVDRTQFDKVMEYIESGQREGAKLLCGGGRVGDRGYFIEPTVFAEVKDNMKIAQEEIFGPVMSIIKFKDMDEVIQRTNDTVYGLAAAVWTQDISKGHAIANALRAGTVWVNCYDVFDAAAPFGGFKQSGMGRELGEYGLQQYTEIKTVTVKL

SEQ ID NO: 1255 - protein, 113 aa, Glycine max
  misc_feature (28)..(28): Xaa can be any naturally occurring amino acid
MASSMIWSAAVTTVNRAGAGMVAPFTGXLKSLLGFPTGRPTIAFTSMVGTVGGVHCLQVWPPIARKKFGTLSYLPDLDDAQLAKEVEYLLRKGWIPRLEFELEHGFVYREHNR

SEQ ID NO: 1256 - protein, 316 aa, Glycine max
  misc_feature (180)..(180): Xaa can be any naturally occurring amino acid
MALSHQFSYLLFLLLILLSSLPNISQATSRAPNRMLALVQKQPLVLKYHKGPLLKGNITLHLLWYGTFTPTQRSIVIDFLESLTSTSSPESPSVSTWWKTTESYRGGPCTLVVGNQILDENYSLGKSLKNDNLVALASNPKLNSAPGDRVVHVILTAADVAVEDFCMKVCGTHGRGKKRXSEKIAYAWVGNSVTQCPGPGAWPFHQPLYGPQTPPLVAPNGDVGVDGMVINLATVLAGAVTNPFEDGYYQGPASAPLEAVSACTGIFGKGAYPGYAGDVLAENATGVSYNAVGMRGRKFLLPAMWDPLTSTCKTLV

SEQ ID NO: 1257 - protein, 74 aa, Brassica napus
MAFVPVCVQCGTRSNPCRCKVVGPTLGFVAFVVAGVIEWPLGAAVYLFRHRKGRRIMAHPATVVYPRVTRAIPI

SEQ ID NO: 1258 - protein, 305 aa, Corynebacterium efficiens YS-314
MSIVGTGNFFGSPEEERDRLVQALQGGKRQTTKPAEIPTVRLNDGNKIPQLGFGVFKVDPAETERVVSEALEAGYRHIDTAAFYNNEEGVGRAIAASGIPREELFVTTKLWPTRFDDAEAGFNESLEKLGMEYVDLFLLHWPAPRNNNFVQAWKVLEQLGERARSIGVCNFLPEHLRQLIDETTIVPAVNQFELHPALQQRDIQEASKAAGIAIESWGPLGQGKYDLSKEAPIAAAARSHGKTLAQVVIRWHLQHGFIVFPKTVNPERMRENLDVLDFELTAEEMVAIDNLERGARGGSHPNDIN

SEQ ID NO: 1259 - protein, 435 aa, Photorhabdus luminescens subsp. laumondii TTO1
MTISRTQQIAQLEQEWKSDRWNGIIRPYSAEDVVKLRGSVNPEHTLAQLGAKKLWELLHGMAKKGYVNSLGALTGGQALQQAKAGIEAVYLSGWQVAADANTASSMYPDQSLYPVDSVPAVVKRINNSFRRADQIQWANGIGTDHQEYIDYFLPIVADAEAGFGGVLNAFELMKAMIEAGAAAVHFEDQLAAVKKCGHMGGKVLVPTQEAIQKLVAARLAADVSGVPTLLIARTDADAADLLTSDSDAYDSEFITGERTFEGFFRTRAGIDQAISRGLAYAPYADLIWCETSTPDIEMARRFAEAIHAKYPGKLLAYNCSPSFNWKKNLDDKTIARFQDELSAMGYKFQFITLAGIHSMWFNMFDLAHAYAQGEGMKHYVEKVQEREFESINRGYTFSSHQQEVGTGYFDKVTTIIQGGTSSVTALTGSTEEQQF

SEQ ID NO: 1260 - protein, 192 aa, Glycine max
MRFMPLSRLIFRLPRHYTHGPLQSRALQTDSVLKDPQAKPIKYKIPQFYDPYGPRPPPSEKIVQLAEQIEALSEEERGQIMPTLSERLKLPKLQPISTDGMDMGTEGGGAAGLKVEEKKAEKTAFDVKLEKFDAAAKIKVIKEVRAFTNLGLKEAKDLVEKVPVVLKQGVTKEEANEIIEKIKAAGGVAVME

SEQ ID NO: 1261 - protein, 377 aa, Ferroplasma acidarmanus
MLVSMVNLMYIEFTDSGMVVPDILTIGYIDGDGIGPEITGAMIGVVNSAIELAYQGSRSIEWHKILIGTEAYEKFGTYVPEDSIKEIQKMYIAMKSTLNFMPDKRDLNTILRKRLGLYSNIRILKYIEGMDIPVNTFNRLNLTIIRDSTPNSHIFYHSSESTDDLIRFISDNYGLNITPDSGIYMMPQSKFRTRKIAKQAVRYSRRNGKKKITILESQQNHEFANWCIEEASAQEDVGYEVLKTREFMKRLISSPEDFEVILVDNVLSQTLVDYLAGTINIEYGSSIGDECAVFEAVQSSLPSEAGYDAADPLSFILSGCEMLMHIGWVEAAQIIENAISAAFRDNKIPKDINTRPDISPIKCSEFSSEIIKRMNGV

SEQ ID NO: 1262 - protein, 135 aa, Methanocaldococcus jannaschii
MIIMPGTKQVNVGSLKVGQYVMIDGVPCEIVDISVSKPGKHGGAKARVVGIGIFEKVKKEFVAPTSSKVEVPIIDRRKGQVLAIMGDMVQIMDLQTYETLELPIPEGIEGLEPGGEVEYIEAVGQYKITRVIGGK

SEQ ID NO: 1263 - protein, 447 aa, Clostridium acetobutylicum ATCC 824
MKDIERDDLKYIWHPCTQMKDYEKMPPIVIDKGEGCYLYDVNGNSYLDCISSWWTNIFGHSNKRINKAIEKQLNEIEHVIFAHFSNKPAVEFSKSLIQIAPEGLDKIFFSDNGSSAVEIALKMSFQYYQQTGKVKKTKFAALTNAYHGETIGALSVGDLDLYSKIYKPLLIDTLRIQGPDCYRCKYNKERHSCEAECFEEMEKSLKKHNSELCAIIIEPMIQGAAGMKMYSPKYLKKLRYACDYYDISVIFDEIAVGFGRTGKMFACENADISPDIMCLSKGISAGYMPMSVVLTTSKIYNAFYDDYVNLKAFIHSHTYAGNALACAAAIESLKIFKEESIIEKNIGKSKLIEKLTKNRARNNKFIGDIRSLGMVTAIELVKDKDTKESFDWKSRVGYEIYKIALKKGLLLRPIGDVLYFMPPYSIGEKDIEFMVEKCFESIEQYLE

SEQ ID NO: 1264 - protein, 182 aa, Triticum aestivum
MAGVGRNMVAPLLVLNLIMYIVVIGFASWNLNHFINGLTNRPGVGGNGATFYFLVFAILAGVVGAASKLAGVHHVRTWRGDSLATSASSALVAWAITALAFGLACKEIHIGGYRGWRLRVLEAFVIILMFTQLLYVLALHSGLFGNQFGNHAGAGGYGAEHGAYGAGDPHNKGMGTGGVARV

SEQ ID NO: 1265 - protein, 452 aa, Triticum aestivum
  misc_feature (254)..(254): Xaa can be any naturally occurring amino acid
MGEQKGNILMGKYEMGKMLGQGTFAKVYHARNIETSQSVAIKVTDKEKVLKGGLTDQIKREISVMKLVKHPNIVQMYEVMATKTKIYFVLEHVKGGELFNKVQRGRLKEDAARKYFQQLICAVDFCHSRGVYHRDLKPENLLLDENSNLKVSDFGLSTISECRRLDGLLHTSCGTPAYVAPEVINRKGYDGAKADIWSCGVILFVLLAGYLPFQDKNLMNMYKKIGKAEFKCPSWFSSDIRRLLLRILDPNPAXRISIERIMEHPWFRKGLDAKLLRYNLQAKDAVPAADMTATSDPLSCSNSATEGKEQEAKKLSNLNAFDIISLSTGLDLSGMFEDNDKKRESKFTSTNSASTIVSKIEDIAKCMRLKLVKKDGGMMRMESFKPGRKGVMSIDAEIFEVTPDFHLVELKKTNGDTIEYQKVLNQEMRPALKDIVWAWQGEQQPQPQQQPC

SEQ ID NO: 1266 - protein, 211 aa, Carica papaya
MSYDYLFKYIIIGDTGVGKSCLLLQFTDKRFQPVHDLTIGVEFGARMVAIDGRPIKLQIRDTAGQESFRSITRSYYRGAAGALLVYDITRRETFNHLASWLEDARQHANPNMSIMLIGNKSDLSHRRAVSKEEGEQFAKEHGLLFLEASARTAQNVEEAFIRTAAKILQNIQEGVIDVSNESSGIKFGYGRPQGTAGARDGAVAQRSGCCG

SEQ ID NO: 1267 - protein, 447 aa, Arabidopsis thaliana; identical to SEQ ID NO: 370

SEQ ID NO: 1268 - protein, 427 aa, Salmonella typhimurium LT2
MADTKAKITLTGDTTIELDVLKGTLGQDVIDIRSLGSKGVFTFDPGFTSTASCESKITFIDGDEGILLHRGFPIDQLATDSNYLEVCYILLYGEKPTQEEYDEFRTTVTRHTMIHEQITRLFHAFRRDSHPMAVMCGITGALAAFYHDSLDVNNPRHREIAAFRLLSKMPTMAAMCYKYSIGQPFVYPRNDLSYAGNFLNMMFSTPCETYEVNPVLERAMDRILILHADHEQNASTSTVRTAGSSGANPFACIAAGIASLWGPAHGGANEAALKMLEEISSVKHIPEFVRRAKDKNDSFRLMGFGHRVYKNYDPRATVMRETCHEVLKELGTKDDLLEVAMELEHIALNDPYFIEKKLYPNVDFYSGIILKAMGIPSSMFTVIFAMARTVGWIAHWNEMHTDGMKIARPRQLYTGYDKRDFKSALKR

SEQ ID NO: 1269 - protein, 123 aa, Saccharum hybrid cultivar SP-80-3280
MIQPQTLLNVADNSGARKLMCIRVIGAAGNQRYARIGDVIIAVIKDAVPQMPLERSEVIRAVIVRTRKEFKGDDGIIIRYDDNAAVIIDQKGNPKGTRVFGAVAEELRELNYTKIVSLAPEVL

SEQ ID NO: 1270 - protein, 185 aa, Zea mays
LARVFSPLLEHARARGCSRGGDERGNITNVAVLDNPTAFINPFQFEISYECLVPLDDDLEWKLIYVGSAEDENYDQQLESVLVGPVNVGTYRFVLQEFMRVGYYVNNDYGDEQLREEPPAKVLIDRVQRNILADKPRVTKFPINFHPEPSTGTGRQQQQQEPQTASPEKHAGSGEGNGSKPEADQ

SEQ ID NO: 1271 - protein, 197 aa, Brassica napus
MSASRFVKCVTVGDGAVGKTCLLISYTSNTFPTDYVPTVFDNFSANVVVNGATVNLGLWDTAGQEDYNRLRPLSYRGADVFILAFSLISKASYENVSKKWIPELKHYAPGVPIILVGSKLDLRDDKQFFVDHPGAVPITTAQGEELRKLIDAPTYIECSSKSQENVKAVFDAAIRVVLQPPKQKKKKSKAQKACSIQ

SEQ ID NO: 1272 - protein, 345 aa, Desulfitobacterium hafniense DCB-2
MTNTVRKIAVLTSGGDAPGMNAAIRAVVRKGIYHGLEVFGIRKGYEGLIHGEFITMHLGAVADIIHRGGTMLMTARSQEMLTPEGQKNAAAQLRYRGIDALIVIGGDGSFRGAQTLSAQGIAIVGIPGTIDNDITGTDLTIGFDTAVNNVVQAVSKIRDTATSHDRTFLVEVMGRDCGNIALQSGVACGAESILVPEIEPDLDDIVAKLERGHQRGKHHSIIMVAEGAMSAWNLGEELRQRTGFETRVTILGHIQRGGNPSALDVVLASQMGGKAVEILCAGETDRMTACVNQEIQSCLWRWLMVSANPSTKFSMIWPINWLSEQKKSAVYRGNQEAQVEFLPLR

SEQ ID NO: 1273 - protein, 358 aa, Streptomyces coelicolor A3(2)
MSAGERVPEEFVPGCVIHGAGDLRVTDVPVRPPGPGEALVAVRYGGVCGSDLHYWRHGGVGDFHLREPMLLGHEVVGTVVAYGSPDTPGPAAGTSVAVHPATPCGVCPECVDRRRNVCRDTRYLGSAARFPHVQGGFAARIVVPAGQLRPLPAGLDPRRAALAEPLSVALHAVRRAGDPAGRHVLVTGAGPIGCLVVAAAKAAGAAHVTVTDLLPAALEYARAAGADTLVRADDPDDAGWPVEVDTAVEASGVAAGLDTCLRLVRRGGVVVQLGMLPPGQSPFAGNLLVSREIELRGAFRFDGEFDDALRLLAAEPAFDALVSAVVPVRDAASAFELAADRSRSCKVLLDFGAAPAAV

SEQ ID NO: 1274 - protein, 219 aa, Oryza sativa (indica cultivar-group)
MPDSDNDSGGPSNYAGGELSSPREQDRFLPIANVSRIMKKALPANAKISKDAKETVQECVSEFISFITGEASDKCQREKRKTINGDDLLWAMTTLGFEDYVDPLKHYLHKFREIEGERAAASTTGAGTSAASTTPPQQQHTANAAGGYAGYAAPGAGPGGMMMMMGQPMYGSPPPPPQQQQQQHHHMAMGGRGGFGHHPGGGGGGSSSSSGHGRQDRGA

SEQ ID NO: 1275 - protein, 450 aa, Pyrococcus horikoshii OT3
MARGDEGGENMIKIYTLGGYEEVGKNMTAVEYEGEVVIIDMGIRLDRVLIHEDVEFQKMSSKDLRKLGAIPDDRPIRDKKVVAIALSHGHLDHIGAVGKLAPHYPDVPIYGTPYTIRLAKSEIKGEEYFEVTNPLYETNYGEIVQVSENLAIEFVQVTHSIPHSSIVVIHTPEGAVVYACDYKFDNNHPYGEKPDYKRLKELGKEGVKVLIAESTRVAEETKTPSEAVAKMLLEDFFLYEGMEADGLIATTFASHIARLQELIEIANKMGRQAIFIGRSLAKYTGIAKQLGLIKMKGSRVLRSPNAVSKVLKEVSQARENYLLIVTGHQGEPGAILTRMANGELYDIGPRDTVVFSAGVIPNPLNIAQRYALETKLKMRGVRMIKDLHVSGHASKEDHRYLIRMLNPEYIVPAHGEFRMLTHYAELAEEEGYRIGKDVFISRNGHIVEII

SEQ ID NO: 1276 - protein, 506 aa, Brassica juncea
MTSINVKLLYHYVITNLFNLCFFPLTAIVAGKAYRLTIDDLHHLYYSYLQHNLITIAPLFAFTVFGSVLYIATRPKPVYLVEYSCYLPPTHCRSSISKVMDIFYQVRKADPSRNGTCDDSSWLDFLRKIQERSGLGDETHGPEGLLQVPPRKTFAAAREETEQVIIGALENLFKNTNVNPKDIGILVVNSSMFNPTPSLSAMVVNTFKLRSNVRSFNLGGMGCSAGVIAIDLAKDLLHVHKNTYALVVSTENITYNIYAGDNRSMMVSNCLFRVGGAAILLSNKPGDRRRSKYELVHTVRTHTGADDKSFRCVQQGDDENGKTGVSLSKDITDVAGRTVKKNIATLGPLILPLSEKLLFFVTFMGKKLFKDKIKHYYVPDFKLAIDHFCIHAGGRAVIDVLEKNLALAPIDVEASRSTLHRFGNTSSSSIWYELAYIEAKGRMKKGNKVWQIALGSGFKCNSAVWVALNNVKASTNSPWEHCIDRYPVKIDSDSGKSETRVQNGRS

SEQ ID NO: 1277 - protein, 246 aa, Zea mays
MDMGRHQLQLQHAASSSSTSASSSSEQDKPLCCSGPKKRPAGRTKFRETRHPVFRGVRRRGAAGRWVCEVRVPGRRGARLWLGTYLGAEAAARAHDAAMLALGRGAACLNFPDSAWLLAVPPPPALSGGLDGARRAALEAVAEFQRRRFGAAAADEATSGTSPPSSSSSATKPAPAIERVPVEASETVALDGAVFEPDWFGDMDLDLYYASLAEGLLVEPPPPPPPAAWDHGDCCDSGADVALWSY

SEQ ID NO: 1278 - protein, 506 aa, Brassica juncea
MTSINVKLLYHYVITNFFNLCFFPLTAIVAGKASRLTIDDLHHLYYSYLQHNLITIAPLFAFTVFGSVLYIATRPKPVYLVEYSCYLPPTHCRSSISKVMDIFYQVRKADPSRNGTCDDSSWLDFLRKIQERSGLGDETYGPEGLLQVPPRKTFAAAREETEQVIIGALKNLFENTKVNPKDIGILVVNSSMFNPTPSLSAMVVNTFKLRSNVRSFNLGGMGCSAGVIAIDLAKDLLHVHKNTYALVVSTENITYNIYAGDNRSMMVSNCLFRVGGAAILLSNKPRDRRRSKYELVHTVRTHTGADDKSFRCVQQGDDENGKTGVSLSKDITDVAGRTVKKNIATLGPLILPLSEKLLFFVTFMAKKLFKDKVKHYYVPDFKLAVDHFCIHAGGRAVIDVLEKNLGLAPIDVEASRSTLHRFGNTSSSSIWYELAYIEAKGRMKKGNKVWQIALGSGFKCNSAVWVALSNVKASTNSPWEHCIDRYPVKIDSDSAKSEVRVQNGRS

SEQ ID NO: 1279 - protein, 364 aa, Thalictrum tuberosum
MGSTENNHNLTPAEEEEEEAYLHAMQLASASVLPMVLKAAIELDVLEIIAKAGKGAYVAPSEIASQLSTSNSQAPTVLDRMLRLLASYKVLTCNLRNLEDGGVERLYGLAPVCKFLVKNEDGVSMAPLVLMNQDKVLMESWYHLKDAVLDGGIPFNKAYGMTAFEYHGTDPRFNKVFNRGMADHSTITMKKLLELYKGFEGLKSVVDVGGGTGATVNMIVTKHPTIKGINFDLPHVIDDAPAYPGVEHIGGDMFVSVPKGDAIFMKWILHDWSDEHSVKFLKNCYESIPADGKVIIVESVLPVFPETNLAAHTCFQLDNIMLAHNPGGKERTEKDFKALSVKAGFTGFKVVCGAFGSWVMEFCK

SEQ ID NO: 1280 - protein, 211 aa, Neurospora crassa
MATNITWHPSLSRHERNQLRGQRGFTIWFTGLSASGKSTVATALEQHLLHIGLAAYRLDGDNVRFGLNKDLGFSEKDRNENIRRIAEVAKLFADSATIALTSFISPYRADRQIARDLHANATQAGDDVLPFIEVFVDVPLAEAEKRDPKGLYKKARAGEIKDFTGISAPYEAPESPEITIRTDLLSVEECVKKIVDYLAEAGLISGTKETR

SEQ ID NO: 1281 - protein, 375 aa, Corynebacterium diphtheriae NCTC 13129
MARDYYAILGVERDATDNEIKKAYRKLARKYHPDVNDTEEAAEKFSKISIAQEVLLDAEKRRIVDMGGDPMAQGGGDAGYGAGGGLGDIFEAFFGGGGGSRGPRSRVQPGSDALLRTTLTLEEAYLGTKKPITIDTAILCDRCEGTGSKSKSKPNVCSTCNGSGEIQQMQRSFLGNVMTSSPCPTCRGTGEVIPDPCDKCGGDGRVRTQRDLIVNVPAGIADGMRIRMAGQGEVGPGGGPAGDLYIEVMMQQHPVFQREGNDLHMSVHVPMVDAALGATTSVESLSGDAIDFEIPAGVQPAETIVIEGKGMPQLRGEGFGNMIAHVDVSIPTQLDEKSKELLNKLRDHRSDESSVRTADDSDDSLFGRLRNRFRR

SEQ ID NO: 1282 - protein, 364 aa, Escherichia coli CFT073
MMSKNYHIAVLPGDGIGPEVMTQALKVLDAVRNRFAMRITTSHYDVGGAAIDNHGQPLPPATVEGCEQADAVLFGSVGGPKWEHLPPDQQPERGALLPLRKHFKLFSNLRPAKLYQGLEAFCPLRADIAANGFDILCVRELTGGIYFGQPKGREGSGQYEKAFDTEVYHRFEIERIARIAFESARKRRHKVTSIDKANVLQSSILWREIVNEIATEYPDVELTHMYIDNATMQLIKDPSQFDVLLCSNLFGDILSDECAMITGSMGMLPSASLNEQGFGLYEPAGGSAPDIAGKNIANPIAQILSLALLLRYSLDADDAASAIERAINRALEEGIRTGDLARGAAAVSTDEMGDIIARYVAEGV

SEQ ID NO: 1283 - protein, 446 aa, Burkholderia cepacia R18194
MSYNEAKFWHPMVHPNEMKQRKPIRIVRGDGCYVFDEEGRKLVDGVAGLWNVNVGHNRQEVKDAIVRQLDELEYFQLFDGISHPRAEELSKKVIDMLEPEGMRRVLYSSGGSDSIETALKIARQYWKVRGQADRTKFISLKQGYHGTHFGGASVNGNTVFRRNYEPNLPGCFHVETPWLYRNPFTQDPEELGRICAEMLEREIQFQSPDTVAAFIAEPIQGAGGVIVPPANYWPLVREVCDRYGVLLIADEVVTGFGRSGSMFGSRGWGVRPDIMCLAKGISSGYVPLGATVVNARIEDAFAANADFGGAIMHGYTYAGHPVACAAAIASLDIVVKEDLPANAAKQGAYLLEALKPFAERFAAVGEVRGKGLMLALDLVANKDTREPIDPLSGYANAVAEVARENGVLVRPVGTKIILSPPLVIQREQLDRIVDALAAGFEAVPFA

SEQ ID NO: 1284 - protein, 485 aa, Mesorhizobium sp. BNC1
MLKKTSHFLREANFIAGEWVNADSGATIEVINPATRQTIGTVPKCGRAETRRAIEAAQEAFQSWKKTSANDRAKLLRKLHDAIMDNQDALAELLVMEQGKPLAEAKGEVGTSAAYILWFAEEGRRIYGDIVPAPWTDRRILVTKEPVGVIGAITPWNFPSSMLARKLGPALAAGCTTVAKPASQTPYSGLAWGVLAEEAGFPKGVVNIVTGSASEIGDELTENPLVRKITFTGSTEIGKLLMEKAAGTVKKVSMELGGNAPFLVFDDADLDRAVKGAMIAKYRNAGQTCVCTNRFFVQDGIYDRFLEKFVEASRKLKVGSGLDEGVEQGPLIDGGAVEKVEELIADAVSKGGKVVTGGKRHALGGSYFEPTVIAEATPQMRFMEEEIFGPVAPVFRFKDEADGIRMANDTSFGLACYFYTSDLGRAFRVMEGLKYGLVGVNEGLITTVEAPFGGLKESGLGKEGGRQGIEDYLDTKYVCIGGLGL

SEQ ID NO: 1285 - protein, 362 aa, Thalictrum tuberosum
MGSTQKNHNLTPEEEEEACLHAMQLASASVLPMVLKAAIELSVLEIIAKAGQGAYVAPTEIASQLSTSNSQAPIILDRILRLLASYKVLTCNLRTLEDGGVERLYGLAPVCKFLVKNEDGVSIAPLVLMNQDKVLMESWYHLKDAVLDGGIPFNKAYGMTAFEYHGTDPRFNKVFNRGMADHSTITMKKLLELYKGFEGLKSVVDVGGGTGATINMIVTKHPTIKGINFDLPHVIDDAPAYPGVEHIGGDMFVSVPKGDAIFMKWILHDWSDEHSVKFLKNCYESIPADGKVIIVESILPVYPETNLASNACFQLDNIMLAHNPGGKERTEKDFEALSAKAGFTGFKIVCGAFGSWVMEFCK

SEQ ID NO: 1286 - protein, 312 aa, Glycine max
  misc_feature (284)..(284): Xaa can be any naturally occurring amino acid
MTSPSGQGSRRGGSSRTRVGKYELGRTLGEGNFAKVKFARHVETRENVAIKILDKEKLLKHKMIAQIKREISTMKLIRHPNVIRMYEVMASKTKIYIVLEFVTGGELFDKIARSGRLKEDEARKYFQQLICAVDYCHSRGVFHRDLKPENLLLDANGVLKVSDFGLSALPQQVREDGLLHTTCGTPNYVAPEVINNKCYDGAKADLWSCGVILFVLMAGYLPCEETNLSALYEKMFNADFTCPPWFSSSAKKLCTEILDPNPATRITFAEVIENDWFKKGYKPXVFEQANVSLDDLDSIFSDSTDAQNLVER

SEQ ID NO: 1287 - protein, 500 aa, Burkholderia cepacia R18194
MSTTNFVAVSDTVRTFVARDFGLFIDGEMQPAHAAARLDVYDPATGERLATVADADERDVDRAVASAKHAFDTRVWSGLRPADRERILLKLADLIERDAETLAQLETLNQGKSIHVSRAIEVGASVEYVRYMAGWATKITGQTLDVSIPFPPGARYTAYTRKEPVGVVAAIVPWNFPLMIAVWKLIPALAAGCTIVLKPSPETPLTALRLAELALEAGVPPGVFNVVTGGRVCGAALASHPSIAKISFTGSTATGKLVGAAAVQNMTRFSLELGGKNPIVMLDDIDVAQALDGVAAGAFFNQGQVCAAASRIYVHRSKFAQLADGLAGVAQSMKLGAGLDTTAQINPLVSAHHRDKVVQHIEGARRAGLTFLAGGTPADDLPGYYVKPAVIADPHPDSAIVRDEVFGPVIVVVPFDDAADAVRLANASPYGLAASIWSNDLKRVMNLVPQIEAGTVWVNCHIPLDPSMPFGGYKQSGIGREFGQYAIEGFTETKSVCIAH

SEQ ID NO: 1288 - protein, 45 aa, Zea mays
SEKLAEGIAGFTKALEVLEHLLEERLKVLDGQEHIKHGAEEIFHA

SEQ ID NO: 1289 - protein, 506 aa, Rubrivivax gelatinosus PM1
MRYAPPGSSDSKVAFKAQYDNFIGGKFVAPVKGQYFDVITPITGKTYTRAARSGPEDIELALDAAHAAADKWGRTSAAERANVLLKIADRIDANVELLAYAESVDNGKPMRETLNADIPLSADHFRYFAGCVRAQEGGVSEIDETTVAYHFHEPLGVVGQIIPWNFPILMAAWKLAPALGAGNCVVLKPAESTPVSILVLAELIADLLPPGVLNIVNGLGREAGMPLATSKRIAKIAFTGSTSTGRVIAQAAANSLIPATLELGGKSPNVFFADVMDKDDAFLDKAIEGLVLFAFNQGEVCTCPSRALIHESIYDKFMERALKRVAAIKQGSPLDTDTMIGAQASKEQLTKILSYLDLGKQEGAQVLIGGQQAQMSGDLDGGYYVQPTIFKGHNKMRIFQEEIFGPVLAVTTFKDEAEALAIANDTLYGLGAGVWSRNGNVAYRMGRAIKAGRVWTNCYHAYPAHAAFGGYKESGIGRENHKVMLDHYQQTKNLLVSYSENKLGFF

SEQ ID NO: 1290 - protein, 455 aa, Bacillus megaterium
TIKEMPQPKTFGELKNLPLLNTDKPVQALMKIADELGEIFKFEAPGRVTRYLSSQRLIKEACDESRFDKNLSQALKFVRDFAGDGLFTSWTHEKNWKKAHNILLPSFSQQAMKGYHAMMVDIAVQLVQKWERLNADEHIEVPEDMTRLTLDTIGLCGFNYRFNSFYRDQPHPFITSMVRALDEAMNKLQRANPDDPAYDENKRQFQEDIKVMNDLVDKIIADRKASGEQSDDLLTHMLNGKDPETGEPLDDENIRYQIITFLIAGHETTSGLLSFALYFLVKNPHVLQKAAEEAARVLVDPVPSYKQVKQLKYVGMVLNEALRLWPTAPAFSLYAKEDTVLGGEYPLEKGDELMVLIPQLHRDKTIWGDDVEEFRPERFENPSAIPQHAFKPFGNGQRACIGQQFALHEATLVLGMMLKHFDFEDHTNYELDIKETLTLKPEGFVVKAKSKKIPL

SEQ ID NO: 1291 - protein, 362 aa, Thalictrum tuberosum
MGSTQKNHNLTPEEEEEACLHAMQLASASVLPMVLKAAIELDVLEIIAKAGQGAYVAPTEIASQLSTSNSQAPIILDRVLRLLASYKVLTCNLRTLEDGGVERLYGLAPVCKFLVKNEDGVSIAPLVLMNQDKVLMESWYHLKDAVLDGGIPFNKAYGMTAFEYHGTDPRFNKVFNRGMADHSTITMKKLLELYKGFEGLKSVVDVGGGTGATINMIVTKHPTIKGINFYLPHVIDDAPAYPGVEHIGGDMFVSVPKGDAIFMKWILHDWSDEHSVKFLKNCYESIPADGKVIIVECILPVYPETNLASNACFQLDNIMLAHNPGGKERTEKDFEALSAKAGFTGFKIICGAFGSWVMEFCK

SEQ ID NO: 1292 - protein, 500 aa, Pseudonocardia sp. K1
MTVIAKPDHLLRDDVQKFIDRPKKLFINGQWHDSIKGETLEVYDPAVGTKICTVAAGDAEDVDRAVAAARHAFDEGPWSKLNPSERGRLVWRLADLLEEHADEFAQIDALDNGKPVTDARAVDVAFSIELLRYMAGWSNKIYGETIPLTNPADFHAYTLREPVGVVGQIVPWNFPLMMAVWKVAPALAAGCTVILKPAEQTPLSALRLAELTEEAGFPPGVFNVITGFGETAGAAIAAHDNIDKVAFTGSTEVGRLIAQAASGNLKKVSLELGGKSPVIVFGDSDIEQAVAGASSAIFYNNGQTCTAGSRLYVHRKVYDKVVEGIASEASALPIGHGLDPATRIGPLISAEQRDRVTGYIAQGREAGAEVIVGGDTVGDGGYFIQPTILTKTDPSMSVVREEIFGPVLCAMAFDEDTIDSVVREANNSVYGLAASIYTRDISVAHRVAKRLKAGTIGINTHHVVDVALPFGGFKQSGYGRDMGRDAIDQYTEVKSIGIAL

SEQ ID NO: 1293 - protein, 364 aa, Thalictrum tuberosum
MGSTENNHNLTPAEEEEEEACLHAMQLASASVLPMVLKAAIELDVLEIIAKAGKGAYVAPSEIASQLSTSNSQAPTVLDRMLRLLASYKVLTCNLRNLEDGGVERLYGLAPVCKFLVKNEDGVSMAPLVLMNQDKVLMESWYHLKDAVLDGGIPFNKAYGMTAFEYHGTDPRFNKVFNRGMADHSTITMKKLLELYKGFEGLKSVVDVGGGTGATVNMIVTKHPTIKGINFDLPHVIDDAPAYPGVEHIGGDMFVSVPKGDAIFMKWILHDWSDEHSVKFLKNCYESIPADGKVIIVESVLPVFPETNLAAHTCFQLDNIMLAHNPGGKERTEKDFKALSVKAGFTGFKVVCGAFGSWVMEFCK

SEQ ID NO: 1294 - protein, 216 aa, Triticum aestivum
MAPTMAITTATLVLLVATLLAPSALGSRSGPSSHHGHGGHAKHSPPPSPPPAPAAPVAAALVRTTCNSTAYYDLCVAALAADPSSTTADVRGLSAIAVSAAASNASASAAALGANVTAQGGAAVDGTVQALLRTCSAKYGEARDALAAARGSIAQQDYDYAAVYVGAAAEYPQVCKALFRRQRPGAYPADLAAREEALKQLCSVSLDIISLLSATS

SEQ ID NO: 1295 - protein, 174 aa, Glycine max
MVCTANDLQEWKDFPKGLRVLLLEGDSSSAAEIREQLEAVDYNVSTFYDENEALSALSSSPEGFHVAIVEVSTSCSLGGFKFLENSKDLPTIMTSKDQCLNTMMKCIALGAVEFLSKPLSEDKLKNIWQHVVHKAFNAGANVLSESLKPVGESVESMLQLQTDIGPDKGGISMD

SEQ ID NO: 1296 - protein, 490 aa, Magnaporthe grisea 70-15
MKIEKIAATFFIGSGVLFGTITAWSLSDLQVPSALGGPLPNSTKVVGPNTSDFREATERWDTYLAPNIEMVVEPGHEDDIPKIVKYCNKHDIDFLAYSGGHGSTTTLGSFDGIQISMARLRNVTIDPKGKTAWVQGGSTGGSVINHLWDHGYVTPTGAAACVGYMGLALGGGHGRLEGLYGMVSDNILQFNLVTANGTAIRVNKTDHSDLYWAMKGAGHNFGIVTSAQVKIYPRGPDKWYHKAYTWRGDKLDAVFNALNQFHGNGTTPVGMGVNTGTFLMMPNITKEEPVIFWLFEYRGTAEQAKPLLAPFDSIEAVAVDARESTYPQLADTPWICTAAQRIITTAGLQTYNLTAEHQIWDGFKRRLSKNPKLTHKTIIIHEGYATEGVESIDRASSAYPFRGDRHLMQFQGTIEESNLEADMWEWANEVRNQWNAGQPQRTPSAYVNYANGRETKEDWYGHQPWRLAKLRDLKARYDPLNRFRFYNPIV

SEQ ID NO: 1297 - protein, 925 aa, Zea mays
MSYTISGGGTAPAAWAWLHGDLELTIHEARGLPNMDLLSTLLRRLCLCPPLAGITPARRRSLSDDDDDSAHAHAHTHPHHHHLRGRLHRRPRRRHEPQPHGHLLLPTSDPYAAVVVAGPHETTVARTYVFRNSEAPRWEASFLLPLAHAATGLEFHVKDADPFGSDLIGVAWLPAAAVLASAAAPIESQWLDLARPDARGPPAPGGGSAIRVSAAFVPAAASRGRSGVGVPAYFPLRRGCDVRLYQDAHVAAGELEGVGVVPGFLPGRCWEDLCMAVLGAQRLVYVAGWSVHTTVRLTREAMSPEMAAKVAELEELGGEPVEHMSLGELLKYKSQEGVRVLLLVWDDRTSHNNFFVKMKGVMQTRDEETKKFFKHSSVICVLSPRYPSSKLGLVKQKASEIVVGTLYTHHQKCVLVDTPASESTRRITAFLGGLDLCAGRYDTPSHRLFRDLQTVFHGDVYNPTFGGDVNGPRQPWHDLHCRLDGPAAYDILKNFEQRWRKATKLREMFGGKAAHRKDDALLKLERIPWILSPTKPKQQPPSAAADTGAADHDDDERDQPALHVLPDGDPERWHAQVFRSVDAGSVKRFPRPWERAEMARRHLVGDKNLAVERSIHAAYVAAIRSAERFVYVENQYFIGGSYAWPSYRNGGACNLVPMEIALKVASKVRAGEPFAAYVVLPMWPEGNPGSGPAQEILFWQNQTMEMMYSVVAAALEGKGGHPQEHLNFYCLGNREPAEDAGDGNKWAPADPLDDATTSSAAAHARRHRRFMVYVHSKGMIVDDEYVIIGSANINQRSLAGSRDTEIAVGAYQPDHTGACPRGKVHGYRMSLWEEHLGKEAVRRPEVLRPESPRCVKLVNRIARDNWRRYAADDDKLGPLQGHLLRYPVHVRADGRVEPLPGNELFPDVGGRVVGAPNNLPDYLTM

SEQ ID NO: 1298 - protein, 446 aa, Ralstonia metallidurans CH34
MLVIGGALVTPNGVERADVACAAGRIVALGDLQCSWTADATLDAKGLHVLPGVIDSQVHFREPGLTHKETLEAGTRGAALGGVTAVFEMPNTQPLTLRAEDLRAKLDAAQGRAWCDHAFYIGGSSVNAEHLEYLESLPGCAGVKIFMGSSFGDLLADDDEVLCRILAHGRRRMAVHAEDEARLRERRIIAESSGDVRQHPVWRDARSALLATQRIVKLAGDTGRRLHILHVSTAEEIAFLADRKDRVTVEVTPHHLTLEAPECYERLGTLAQMNPPVRERCHRNALWQAIREGVGDVIGSDHAPHTPKEKSRPYPASPSGMTGVQTLVPVMLDHVHRGQLSLQRFVDLTSAGPARIFGVEGKGRIALGYDADLTLVDLAARRTIRNDWIASVSGWTPYDGIGVTGWPIHTVVRGHIVVRDEALVGTTPLGRPLRFLEAPPRVPAGV

SEQ ID NO: 1299 - protein, 358 aa, Zea mays
MVGGGGGGPLRRVGKYEVGRTIVEGTFAKVKFAQNTETGESVAMKVLDRSSILKNKMAEQIKREISIMKLVRHPNVVRLHEVLASRKKIFIILEFITGGELFDKIIRHGRLSEADARRYFQQLIDGVDFCHKKGVYHRDLKPENLLLDSQGNLKISDFGLSAWPAQGSFLLRTTCGTPNYVAPEVLSHKGYNGALADTWSCGVILYVLLAGYLPFDEVDLTTLYGKDDNEDAFEDETGPLTLNAFDLIILSQGLNLAALFDRRQDCDKLQNRFLSRNPAKVILSSMEVVAQSMGFKTHIRNYKMRVEGLNADKTSHLSVMVEVFEVAPSIFMVELQRAAGDTSEYNTIHPKGQIYIGQ

SEQ ID NO: 1300 - protein, 141 aa, Triticum aestivum
  misc_feature (58)..(58): Xaa can be any naturally occurring amino acid
  misc_feature (99)..(99): Xaa can be any naturally occurring amino acid
  misc_feature (117)..(117): Xaa can be any naturally occurring amino acid
  misc_feature (131)..(131): Xaa can be any naturally occurring amino acid
MAPTVMASSATSVAPFQGLKSTAGLPVSRRSNGASLGSVSNGGRIRCMQVWPIEGIKXFETLSYLPPLSTEALLKQVDYLIRSKWVPCLEFNKVGFIFXVEHNASPGVLTMAGTGQXGTAMFRMHRRHQVXNEVEEVKKDT

SEQ ID NO: 1301 - protein, 175 aa, Glycine max
  misc_feature (84)..(84): Xaa can be any naturally occurring amino acid
ASSMISSPAVTTVNRAGARMVAPFSALKNMDGFPTTNTNNDITSIGINGGTPQCMQEWPTLGYKKYDTLSYLPDLDDALLTKEXKYLLKNGWIPCLEFQLEHGFAYRDHDRSPRYYDGRYWTMRNLPMFGCTDAYHVIKDLQEVNTVYPNGFIRIIEFNNFLQEQRISFIAYKTP

SEQ ID NO: 1302 - protein, 222 aa, Triticum aestivum
  misc_feature (153)..(153): Xaa can be any naturally occurring amino acid
  misc_feature (158)..(158): Xaa can be any naturally occurring amino acid
  misc_feature (160)..(160): Xaa can be any naturally occurring amino acid
  misc_feature (174)..(176): Xaa can be any naturally occurring amino acid
  misc_feature (191)..(191): Xaa can be any naturally occurring amino acid
  misc_feature (195)..(195): Xaa can be any naturally occurring amino acid
  misc_feature (210)..(210): Xaa can be any naturally occurring amino acid
  misc_feature (217)..(217): Xaa can be any naturally occurring amino acid
MKTFLIFVLLAMAMNIATAARQLNPSNKELQSPQQSFSHQQQPFPQQPYPQQPYPSQQPYPSQQPFPTPQPQFPQQSQQPFPQPQQPIPLQPQQPFPQQPQQPQQPFPQPQQPFPWQPQQPFPQTQQSFPLQPQQPFPQQPQQPFSQPQLQFXQQPFXQXQQLIPMQPQQPFPXXXQQSQQPFAGPQQLFXELQXPIPQQPQQPFPLQPXQPFPQAXQQPFP

SEQ ID NO: 1303 - protein, 481 aa, Rubrobacter xylanophilus DSM 9941
MEAIPSASYSMTLRVEFPHRAGALGRILTTIGDAGGMVGAIDIVRMGQERSIRDITVNARDSEHGQRIVRAVGALPEVRVVNVSDRTFLLHLGGKIEVHSKIPVRTRDDLSMAYTPGVARVCRAIAQEPERAFNLTIKRNSVAVVTDGTAVLGLGDIGPYAAMPVMEGKAMLFKEFAGVDAFPVCLDTKDPEEIVRTVKYVAPAFGGINLEDISAPRCFEIEERLKQELDIPVFHDDQHGTAVVVLAALINALRIVGKRMEELKVVVCGVGAAGVACAKILLAAGVKNIVGCDRYGVVYRGRGDADTSRGWFAENTNPENIRGTLADAIRGADVFIGVSAPDVLTVEHIESMADEPIVFAMANPDPEIRPEIAYGHARIIATGRSDYPNQINNVLCFPGVFRGALDIRAREINEEMKLAAARAIAGVIPEESLSEDYIIPSVFDERVVPAVAGAVAEAGVESGVARRVRERSETDFSAASF

SEQ ID NO: 1304 - protein, 290 aa, Oryza sativa (indica cultivar-group)
MKSRKSYGLLLSPVGSPPSDNESGAAAAAAAAGGGGCGSSAGYVVYGGGGGGDSPAKEQDRFLPIANVSRIMKRSLPANAKISKEAKETVQECVSEFISFVTGEASDKCQREKRKTINGDDLLWAMTTLGFEAYVGPLKSYLNRYREAEGEKAAVLGGAGGAAAARHGEGGCCGGGGGADGVVIDGHSPLAGGLSHSHHGHQQQDGGGDVGLMMGGGAAGVGYNAGAGSTTTAFYAPAATAASGNKAYCGGDGSRVMEFEGIGGEEESGGGGGGGGGERGFAGHLHGVQW

SEQ ID NO: 1305 - protein, 181 aa, Chromobacterium violaceum ATCC 12472
MRTTLLIASLLALPLAAHADAFRLSSDSMADGKPLSLKQVYRGFGCEGGNVSPQLSWSGAPLGTKSFAITAYDPDAPTGSGWWHWTVANLPASVHSLPEGAGSQGGSLPPGAVQGRTDYGESRFGGACPPAGDKPHRYQFTVWALKIDKLPIDANASGALVGFMLNANALGKAQLTATYGR

SEQ ID NO: 1306 - protein, 405 aa, Shewanella oneidensis MR-1
MEMAIGIGMFTLVVCLLVIVILIAKKKLVTTGEITIGINDDAEKSIKVAAGDKLLGALASKNIFIPSACGGGGTCGQCRVKVKSGGGDILPTELGHITKKEAKEGCRLACQVAVKTDMELELEEEIFGVKKWQCEVISNDNKATFIKELLLKLPEGEDVHFKAGGYIQIEAPAHVVKYADFDIPAKYRDDWEKYGLFDLVSTVNEDVLRAYSMANYPDEKGRIMLNVRIATPPSANVPPGKMSSYIFNLKAGDKVTISGPFGEFFVKDTDAEMVFIGGGAGMAPMRSHIFDQLKSKKTKRKMSFWYGARSTREVFYQQDFDTLAAENDNFVWHVALSEPLPEDNWTGYTGFIHNVLYENYLKNHKAPEDCEFYMCGPPIMNSSVIKMLESLGVEPENILLDDFGD

SEQ ID NO: 1307 - protein, 363 aa, Catharanthus roseus
MGSANPDNKNSMTKEEEEACLSAMRLASASVLPMVLKSAIELDLLELIKKSGPGAYVSPSELAAQLPTQNPDAPVMLDRILRLLASYSVLNCTLKDLPDGGIERLYSLAPVCKFLTKNEDGVSMAALLLMNQDKVLMESWYHLKDAVLEGGIPFNKAYGMTAFEYHGKDPRFNKVFNQGMSNHSTIIMKKILEIYQGFQGLKTVVDVGGGTGATLNMIVSKYPSIKGINFDLPHVIEDAPSYPGVDHVGGDMFVSVPKGDAIFMKWICHDWSDAHCLKFLKNCHEALPENGKVILAECLLPEAPDSTLSTQNTVHVDVIMLAHNPGGKERTEKEFEALAKGAGFRGFIKVCCAYNSWIMELLK

SEQ ID NO: 1308 - protein, 1303 aa, Oryza sativa (japonica cultivar-group)
MAAAAWGGTTQKCDSCGRTVYPVEELAADGRVYHRPCFRCTHCKATLQFSNYSSVEGVLYCKPHYDQILKSTGSLEKSFEGTSKSAKAEKSNGNKGQPNRFSSMFVGTQDKCVVCNKTVYPLEKVNLNGSSYHKSCFRCTHGGCTLSPSNNVTHEGKLYCKTHHSQLFMVKGNFSNFEDSTPNAKVDIEKQPEHEDATKNPGGPGQGDGLTEKPLESELTPEKPSQDDIVAEKQSQSSVDVPKQSESSTTVQRSEEGERVTKGESNSHVVSKKPLESSVEKPFQSSAVNLQPSGSSAAVRKPWQRNLPTDKPLLSNTTTEKSTPSSAAIEESLPSNGVDAKQPESSTASTVVKRPWQRRVATENLPQSISPSDKPSSTSADDVKPSENSKLIRKPWQRAVAAEAQIQNSGPTEKSSLTNDTKPSESTTSIKRPWEHKVVNEKPLQNNIDTEKPLQNNTDTEKSSSSAIDVKLAETSTTPTVPQEHSGITEKPSQTSADDVKPSESTAAVVKKQWQRNIGFQKQPQSSVTDAKTPESRGMGKRLWQRNVPTEKQSQSGASVVTPSQVSVASTNPLQSSVVVKKPWQRSVSREKEPEKDISSNKPLQNRVLAEEAEKTNVTADNKSQIIQDKKNNGATTENSSQISESAKKLPLTANKSQADTSTEKLSESDILAVASSQITEPSKKPSENTAENEKPSQTDIATDELPLTQSVEAMSEPSPSDAAHQEISEREILTDKLPESTMAVEKLSQTATLTEKPSKEDAAEKLPQTNEPSEQPHESEETAEKPLQNEANAESTTKQSDLSLEKPPQVDANVGNPTEPESDATSGVNSSDAQIRPTAEQLVGPQGIVSAEKTSDQILEANTDPAADQSSESQDVAPAKVATEQPLENQKAAASEQPLEPQHEAYEENPQEHNSDATAKESSEPERDTASDQLAEQPSESRTAGEKATLRESDVVTEDPAEPQIDAAAERSAEVLSESQTGVETPVLHQSDRTNEVPSEPQTDEASDKSTEQPLEPENDASVEDEKPPEIESDDVHDKPSESTPDTETLPHNTPKSSISISEAADGNVSEEAPPQSSASIETPSESAIAVEEPKHDDEASIKPSEDSSALEEPPQDDSASVEPSENTITLEKASEEDEGSVKPSEGNDALEKTLEEDEASAKLPEDSTTFEKPSEKDDAGTKQTEDPVTLEKEPEEDKGSVEPTQDNAGLEKPLEEDEASAKPSEDSVVLDKPSVEDDDSAKPSEDSMDLEKPEAHKPSEEEDGATKSSPEDAAVEEAPLQGDTETATDKPSLEADTTETA

SEQ ID NO: 1309 - protein, 440 aa, Mesorhizobium sp. BNC1
MTYILHRQIHGQLPVAAGGRGVKLFDSAGKEYIDASGGAAVSCLGHNHPDVVAALKRQAEKLAYAHTSFFTNEPAEALAERLVKAAPEGISHAYLVSGGSEANEAALKMARQFFVEKGEAQRRHIIARRQSYHGNTLGALAAGGNEWRRAQFRPLLIETHHIDPCYAYRYRQQGESDEEYGLRAAQQLEDKILELGPDTVMAFIAEPVVGATAGAVPAVSGYFKRIRDICDRYGVLLILDEVMCGMGRTGTLFACEEDGVSPDLVSIAKGLGGGYQPVGAVLLSRQIFDAFAQGSGLFQHGHTYICHPMACAAALAVQEVIERDNLLANVREMGSYLRARLEARFGNHAHVGDIRGRGLFLGLELVADRATKEPFDPARKIHAGVKKEAMARGLMVYPAGGTIDGARGDHVLLAPPFILDKETADTIVDRLGEAIDAALG

SEQ ID NO: 1310 - protein, 431 aa, Mycobacterium bovis AF2122/97
MADTDDTATLRYPGGEIDLQIVHATEGADGIALGPLLAKTGHTTFDVGFANTAAAKSSITYIDGDAGILRYRGYPIDQLAEKSTFIEVCYLLIYGELPDTDQLAQFTGRIQRHTMLHEDLKRFFDGFPRNAHPMPVLSSVVNALSAYYQDALDPMDNGQVELSTIRLLAKLPTIAAYAYKKSVGQPFLYPDNSLTLVENFLRLTFGFPAEPYQADPEVVRALDMLFILHADHEQNCSTSTVRLVGSSRANLFTSISGGINALWGPLHGGANQAVLEMLEGIRDSGDDVSEFVRKVKNREAGVKLMGFGHRVYKNYDPRARIVKEQADKILAKLGGDDSLLGIAKELEEAALTDDYFIERKLYPNVDFYTGLIYRALGFPTRMFTVLFALGRLPGWIAHWREMHDEGDSKIGRPRQIYTGYAERDYVTIDAR

SEQ ID NO: 1311 - protein, 101 aa, Nicotiana tabacum
MASSVLSSAAVATRSNVAQANMVAPFTGLKSAASFPVSRKQNLDITSIASNGGRVQCMQVWPPINKKKYETLSYLPDLSQEQLLSEVEYLLKNGWVPCLEF

SEQ ID NO: 1312 - protein, 362 aa, Thalictrum tuberosum
MGSTQNNHNLTPEEEEEACLHAMQLASASVLPMVLKAAIELDVLEIIAKAGQGAYVAPSEIASQLSTSNSQAPIILDRILRLLASYKVLTCNLRTLEDGGVERLYGLAPVCKFLVKNEDGVSMAPLVLMNQDKVLMESWYHLKDAVLDGGIPFNKAYGMTAFEYHGTDPRFNKVFNRGMSDHSTITMKKLLELYKGFEGLKSVVDVGGGTGATVNMIVTKHPTIKGINFDLPHVIEDAPAYPGVEHIGGDMFVCVPKGDAIFMKWILHDWSDEHSVKFLKNCYESIPADGKVIDVESILPVCPETNLAANACFQLDNIMLAHNPGGKERTEKDFEALSVKAGFTGFKVVCGAFGSWVMEFCK

SEQ ID NO: 1313 - protein, 479 aa, Streptomyces coelicolor A3(2)
MTDTPTQLFLGGAWADAADGAVMPVDDPATGEILAHVADAGPKDARLAEEAAVQAQEEWARAAPRARSEILRRAYEIVLERTDALARLMTSEMGKPLAEARGEVAYAAEFFRWFSEEAVRIDGGHGVLPDGRNRMLLSRRPVGPCLLITPWNFPLAMGTRKIGPAVAAGCTMVLKPAPQTPLSSLALAAILKEAGLPDGVLNVVTTSRAGEVCEPLLRGGRIRKLSFTGSTAVGRLLLAQCADTVVRTSMELGGNAPFVVFDDADLDAAVDGAMVAKMRNMGEACTAANRFFVHRSVAGEFADRLARRMGALVVGPGTGDGVDVGPLIDAAGRAKVEELVADAVERGARVLVGGTTPEGPGCFYPPTVLTDVAPESRLMATEIFGPVAAILTFDDEDEVVRRANDTPWGLVGYVFTEGLDRALRVSERLDVGMVGLNTGLVSNPAAPFGGVKQSGLGREGGRVGIEEFLEYQYVALPTG

SEQ ID NO: 1314 - protein, 450 aa, Bacillus sp. KSM-K16
MNTGMEPTLAKKDGQYVWHAMQRPGAAPLIADSGEGSWFTDTNGNRYMDGVSGLWCLNLGHGQTEIIEAATEQMNKLAYFPLSLGHQPAIALAEKLAALLGGGFRTFFANGGSDANETAFKIARQYHKQTGSPEKQKIISRYRGYHGNSLGALAATAQANRKIKYDAALPGFLHIPPPYAYRSSFGSAAEDDQQAADFLEQTILWEGPETIAAFIMEPIISGGGVIYPQSNDYYKRVRDICDRYQVLLILDEVVSGFGRTGKLFGFMHGDDDFKPDIITLAKGLTSGYLPLGATCVAENVYQAFDGKGETSHFRHISTYGGHPASCAVALKAIDIIEREQIVNRVETLGHTVLGKLKQLEQLSIVGEVRGIGFLYGIELVQDKQTKEPADDDTMKAVVTACQKQGLIIGKNSDTIPGGGNVLIIAPPLTSSEEDLAFLVDTVSSVLRTFA

SEQ ID NO: 1315 - protein, 294 aa, Saccharomyces cerevisiae
MKTLVHVASVEKGRSYEDFQKVYNAIALKLREDDEYENYIGYGDDLVRLAWHISGTWDKHDNTGGSYGGTYRFKKEFNDPSNAGLQNGFKFLEPIHKEFPWISSGDLFSLGGVTAVQEMQGPKIPWRCGRVDTPEDTTPDNGRLPDADKDAGYVRTFFQRLNMNDREVVALMGAHALGKTHLKNSGYEGPWGAANNVFTNEFYLNLLNEDWKLEKNDANNEQWDSKSGYMMLPTDYSLIQDPKYLSIVKEYANDQDKFFKDFSKAFEKLLENGITFPKDAPSPFIFKTLEEQGL

SEQ ID NO: 1316 - protein, 488 aa, Streptomyces coelicolor A3(2)
MSRAARCSLGDMNESPRTPFPTPSHWIDGRAVTGSGPLIDVVNPADESVIAHLHEATADDVDMAVDAAVAAIPGWAATPPRHRADVMRRLAEGLQKRSEELAATITLEMGAPIAFSRQAQVGFPVASTLAAIAAAERFEWSERIENSLVVREPVGVVGAITPWNFPLQQLVTKVVPAMLAGNTVVLKPSELSPLSARMFAEIATEAGLPNGVFNVVQGTGPVVGEALSRHPKIDMISFTGSTRAGKSVSSAASVTVKRVALELGGKAAHIVLPEADLDSAVARGLAFAWANAGQACGAYVRMLVPEDLQTAVVDRLRTAAQEYVVGDPADEATRIGPLASETQRRRVDDYIRRGIADGATLVTGGPGRPEGFETGAYVRPTIFSDVAPESVIAQEEIFGPVLVVIPYTDDEHAVEIANGTVYGLNAAVTGDEDHAMAIAVRLRVGQVDVNGGRHNFQAPFGGYKQSGNGREMGRAGLEEFLETKAITS

SEQ ID NO: 1317 - protein, 448 aa, Oryza sativa (japonica cultivar-group)
MTTPLPYAAAATAATGEDPDQIGRLPDCLLTTILSLLPLDAAARTTALSRRWRSLWPSAPLRLHDSDLPSRSQYLSAAISGILASHRGDAVSFRLSSGRPSSADLDTWLRILAGKRLQELLLQPPSEPLPLPPSLLGCHSLRSADLTNCRLPAAAAATASFPHLHELTLRYCFASSRALHGLLAGCPALAALSLDRVFGCRSLRVRSRTLRSLTVSVSLRRRDEVGDELQDLAVEDGPLLERLLGHDVNWGPSIHVLHAPRLEMLGYLGVGIPSLQIGAALFHSMRAVRLAAEFRCLKTLALEMVDPQVKPVVDFLRCFPCLEALYITSHMFEPRSMETLKCDNMDYPIECLNRHLKKVVLAGYEGRRRELQLARFLVSNARVLQVMKFLCANDCKPTWLASQKRQLCWESRLSLGPQVIFEVYRKSHTRFRKHASNITLVDPFDVKT

SEQ ID NO: 1318 - protein, 212 aa, Bacillus halodurans C-125
MKFFIDTANINEIREANDLGILAGVTTNPSLVAKEGVDFHERLREITSLVKGSVSAEVVALDAEGMIKEGKELAAIAPNITVKVPMTTEGLKAVHAFHQEGITTNVTLVFSAVQALLAARAGATYVSPFLGRLDDIGHDGLDLISQIAEIFHVHDLDIQIIAASIRHPQHVTEAALRGAHIATIPFKVISQLSKHPLTDKGIEQFLKDWNNR

SEQ ID NO: 1319 - protein, 1123 aa, Bordetella bronchiseptica RB50
MEQVTGYCTLCRSRCGSVNHVENGRLVAVTPLAGHPTGGALCAKGRAAPEMMAESHRLLRPLRRTNPRGAADPGWREIEWSEALDEVAARLAVARRRDGAESVAFAVTTPSGTPMVDSFEWVERFVRVFGSPNLIYAVEVCGWHKDYAHALTFGRGIGVPDLEHTDTMLLWGHNPARTWLAQAARIAAARQRGARVVVVDPNREGSSQQADLWLRVRPGADGALALGAIRHLLHTGRFDHGFVARWSNGPYLVDGASGALLRAADLWPDADPAARVVMLDGRPAASGRGADTARAELFGSWTLRLHDGRACEAVTVMHALRVAVERYTPDEVARLAWLDEAELAQFNAIFENAPRLSYHSWTGVGQHTNATQTDRAIATLYALTGACDRKGGNLWTVAPPYRAVNGYRELLSPVQRAKALGLDELPLGPPSLGWITARDFCRAVLQQDPYPVRTLVSFGTNLLVSQAETARNLEALQALDFHVHVDMSMNPTAMNADIVLPANMPWEREALKLGFEITQAAVEHVQLRPRMVEPAGESRADYEIVLELARRLGLRDAFFGADMDACWNHQLAPLGIDVQALRRQPEGIRFPQPFAHEKYKTLRDGQPVGFPTHDGRVQIHCAALHDIGQPALPSHVEPADTPARHAGAYPLVLSTAKSGWFVHSSHRYVASLRRKSPDPQVYLSTEAARDRGIASGDWVRVRTPYGEVALRAKINADLHANVAIAEFGWWQGCEGLGRADGAIVGPASSNINAIMTDRHRDPVSGSVPLRATVCDIVRDDARNRGSWSGAREFVLARKRGIAHDVAEFRLLACDAQALPDFLPGQHVIVSMPGGAVRRAYSLTGPNRAPAHLSIAVRRVRDGDGPAGLMSNALHALDEGARVLLSAPAGVFTPPLRTARPVILMASGIGITPFHGYLEALAQDAGPAPSVLLVHACRDGSSHPYGAELKRLAQRIGSVRTLTVYAEPASHDVPGRDYQQRGRLDFAWLSPETVAARPLVYLCGSPGFLALCTDALAARGIPRFDIFSETFTSEKRVPDTLAPQPIEIEAEQGGFTWDPAAGTLLDAAERAGLSLPSGCRVGQCESCAMHIVSGQVAHLIDFDGSADTCLTCQAVPITPLTLRR

SEQ ID NO: 1320 - protein, 458 aa, Bacillus megaterium
TIKEMPQPKTFGELKNLPLLNTDKPVQALMKIADELGEIFKFEAPGRVTRYLSSQRLIKEACDESRFDKNLSQALKFVRDFAGDGLFTSWTHEKNWKKAHNILLPSFSQQAMKGYHAMMVDIAVQLVQKWERLNADEHIEVPEDMTRLTLDTIGLCGFNYRFNSFYRDQPHPFITSMVRALDEAMNKLQRANPDDPAYDENKRQFQEDIKVMNDLVDKIIADRKASGEQSDDLLTHMLNGKDPETGEPLDDENIRYQIITFLIAGHETTSGLLSFALYFLVKNPHVLQKAAEEAARVLVDPVPSYKQVKQLKYVGMVLNEALRLWPTAPAFSLYAKEDTVLGGEYPLEKGDELMVLIPQLHRDKTIWGDDVEEFRPERFENPSAIPQHAFKPFGNGQRACIGQQFALHEATLVLGMMLKHFDFEDHTNYELDIKETLTLKPEGFVVKAKSKKIPLGGI

SEQ ID NO: 1321 - protein, 487 aa, Deinococcus radiodurans R1
MTTTDLRTTYSSVTRSQAYFDGEWRNAPRNFEVRHPGNGEVIGEVADCTPTDARQAIDAAEVALREWRQVNPYERGKILRRWHDLMFEHKEELAQLMTLEMGKPISETRGEVHYAASFIEWCAEEAGRIAGERINLRFPHKRGLTISEPVGIVYAVTPWNFPAGMITRKAAPALAAGCVMILKPAELSPMTALYLTELWLKAGGPANTFQVLPTNDASALTQPFMNDSRVRKLTFTGSTEVGRLLYQQAAGTIKRVSLELGGHAPFLVFDDADLERAASEVVASKFRNSGQTCVCTNRVYVQRGVAEEFIRLLTEKTAALQLGDPFDEATQVGPVVEQAGLDKVQRQVQDALTKGAQATTGGQVSSGLFFQPTVLVDVAPDSLILREETFGPVAPVTIFDTEEEGLRLANDSEYGLAAYAYTRDLGRAFRIAEGLEYGIVGINDGLPSSAAPHVPFGGMKNSGVGREGGHWGLEEYLETKFVSLGLS

SEQ ID NO: 1322 - protein, 181 aa, Paenibacillus polymyxa
MSIYDYSAIAMNGKEIVLSDYKDKVVLIVNTASQCGFTFQYQDLQRLYDQFKDRGLVILGFPCNQFADQEPDSNESVQTFCTLNYGVAFPMFQKVNVRDEQAHPLFTYLASSLPFEGFDETHSVAKILIPLIHERHPEYLPGDSIKWNFTKFLIDRNGKVIKRFEATTDPLDMEEYIEALL

SEQ ID NO: 1323 - protein, 109 aa, Triticum aestivum
  misc_feature (31)..(31): Xaa can be any naturally occurring amino acid
VTCSLEVERAPTPADMYVLGWWSIQFFKGSXLKWPVGVIRYEYDQLQAPVGGRVYFTGQYTSEHYNGYVLGAYLSGMNSADIIMIKVLINVEFKVPFQVQRVAHTCRIN

SEQ ID NO: 1324 - protein, 487 aa, Neurospora crassa
MARLTSLLTAVAAGVGTARAILPTDWTPICKQIESKISSTSDVIYPLQAVSFTSATAHWFWSSDEQPSCVFEPGSAEDVSVALRIIGATKTPFAVQSGGHTSNPGFSSTKGVHISLKRLNQVKLSADKSVAEIGFGNIWTDVYKALDGTGRNVVGGRVPGPGVGGLTLGGGYSWKTNQYGMTCDTVKSYELVLPNGTITRVSKTENPDLYFALKGGLNRFGIVTSAEFYTHEQPGKVYGGLGIYPTTAVDQILNATSQFSYLNKDPRTQIITTLDGGPLGTTAEVLFFHDGPDKPASFELFDNIAPLVKTVSSQSFVDFVQSIPAQVPELTNIRGAFITFATSELSQTFLEAVRQETDDIGKIMSLHGGITVSYDLEPFTKYGEHATESAFPHTESPLPLFIYFAWFLPENDEFWYARMKQTVEALKKVAMDDGIYNSDAFTYYPNYSLFDATPEQLYGKENAARLARIRDQVDPDRIMELAGGFKI

SEQ ID NO: 1325 - protein, 196 aa, Triticum aestivum
MAQEGLRLVCPPVSAHEGRLPRQYTLEGQGAKKDISPPLEWYGVPDGTRSLAVVVQDIDADERVPWTHWVVANISPEEKGLPEGFSGAGGNANAGGGAGGVQEGVNDWKQPGWRGPVPDSHGHRIQFRLYALDDLLSLGNKVTVDKVMEAIEGHVLRGGRRSRPSSKELLWILALGSVCLWTFLLLLLGNRVWSVL

SEQ ID NO: 1326 - protein, 254 aa, Oryza sativa (indica cultivar-group)
MEAATRARRRNGAAADGNGGAQQAAAAPAIREQDRLMPIANVIRIMRRVLPAHAKISDDAKETIQECVSEYISFITGEANERCQREQRKTITAEDVLWAMSRLGFDDYVEPLGVYLHRYREFEGESRGVGVGVGAARGDHHHGHVGGMLKSRAQGSMVTHHDMQMHAAMYGGGAVPPPPHPPPHHHAFHQLMPPHHGQYAPPYDMYGGEHGMAAYYGGMYAPGSGGDGSGSSGSGGAGTPQTVNFEHQHPFGYK

SEQ ID NO: 1327 - protein, 420 aa, Psychrobacter sp. 273-4
MQNQIFELQYALDTFYLLMCGALVMWMTAGFTMLEAGLVRSKNTVEILTKNIALFATACTMYMICGYAIMYDGNLFLSGIAGTESLVADALATSAENGFDGDAVYSSASDFFFQVVFVATCMSIVSGAVAERMKLWSFLLFAVVMTGVIYPLEGSWTWGGKAVFGLYSLGDLGFSDFAGSGIVHMAGAAAALAGVLLLGARLGKYGSKGEIRAIPGANLPLAALGTLILWMGWFGFNGGSVLKLGDIASANSVAVVFLNTNAAAAGGAIGALLIARLIFGKADLTMLLNGALAGLVAITAEPLTPSALQATLFGMTAGIIVVLSILLLDKIKIDDPVGAISVHGVVGLFGLLIVPLTNPAASLIGQLAGAATIFAWVFVSSLIIWSIIKFVIGLRISEEEEYQGADIAECGMEAYPEFIR

SEQ ID NO: 1328 - protein, 456 aa, Glycine max
MPEIGQAAVAAAADDTALFGKYELGRILGCGAFAKVHYARNVQTGQSVAVKIINKKKLAGTGLAGNVKREITIMSKLHHPHIVRLHEVLATKTKIFFIMDFVRGGELFGKISKGRFAEDLSRKYFHQLISAVGYCHSRGVFHRDLKPENLLLDENGDLRVSDFGLSAVRDQIRPDGLLHTLCGTPAYVAPEILGKKGYDGAKVDVWSCGVVLFVLAAGYLPFNDPNLMVMYRKIYKGEFRCPRWMSPELRRFISKLLDTNPETRITVDGMTRDPWFKKGYKELKFHEEDYHASGSGSFFGPKDERVVNLNAFDLISFSSGLDLSGMFGGEWGERLVTREPPERVLEAAEEAGAAAGMAVRWKKECGVELEGFNGRFGIGVEVYRLTAELAVVEVRKRGGDAAVRGVWEERLKPLLLGGATTSYSNSSEDEQQHQEEEQQHQEEKQEQEPESKVACE

SEQ ID NO: 1329 - protein, 380 aa, Cryptomeria japonica
FSIKGNGIGNGNGHCNGYSNGHGHCINGYSNGISASVSSNGVSHLPYSNGNTVHHSNSNGHIHTSPSFGDGRRRCFWYEEEIEDDLRWCFALNRILHTGVSEYQDIALIDTRPFGKALVIDGKMQSTEVDEFIYHESLVHPALVYHSQPKSAFIMGGGEGSTAREILRHKCVKKVVMCDIDKEVVDFCKKYLVVNREAFSNSRLELVINDARTELQSRQERFDVIIGDLADPVEGGPCYQLYTKSFYELVIKPKLNHQGIFVTQAGPAGVLTHTQVFSSIYNTLRQVFKHVMPYSAHVPSFADTWGWVMASDHPLTLEAGEIDDRIKQRIKGELQFLDGQTFLVAATLNKSVRKSLSKETHVYTEETARFIHGHGKASYQ

SEQ ID NO: 1330 - protein, 138 aa, Triticum aestivum
  misc_feature (58)..(58): Xaa can be any naturally occurring amino acid
  misc_feature (96)..(96): Xaa can be any naturally occurring amino acid
  misc_feature (101)..(101): Xaa can be any naturally occurring amino acid
  misc_feature (108)..(108): Xaa can be any naturally occurring amino acid
  misc_feature (110)..(110): Xaa can be any naturally occurring amino acid
  misc_feature (126)..(126): Xaa can be any naturally occurring amino acid
  misc_feature (131)..(131): Xaa can be any naturally occurring amino acid
  misc_feature (134)..(134): Xaa can be any naturally occurring amino acid
MAPTVMASSATSVAPFQGLKSTAGLPVSRRSNGASLGSVSNGGRIRCMQVWPIEGIKXFETLSYLPPLSTEALLKQVDYLIRFKWVLASSQQVGSXSVEHXRNSGYYXWXFWTMWKLPILGALTHXVLTKXEEXKKTL

SEQ ID NO: 1331 - protein, 423 aa, Oryza sativa (japonica cultivar-group)
MAGSRFGSFKSEKGDPAATAAQRRDPYEVLGVGRNATDQEIKSAFRRMALKYHPDKNGDDPVASDMFQEVTFSYNILSDPDKRRQYDTSGFEAIEADSQELELDLSSLNTVNTVFAALFSKLGVPIKTTVSATVLEEALNGSVMVSQLQLGNSVHRKVEKQSAHFYSVDITEKEAKMGLVCRVKSTDRSKFKLLYFELEENGGLSLALQEDSVKTGKVTSAGMYFLGFPVYRFEQNNLAAAAKDPDSAFFKRLDSFQPCDINELKPGTHFFAVYEVVCGESFPAEKEKLQSVEAKILTKRAELSKFETEYREVLAKFTEMTSRYTQEMQAIDNLLKERNEIHASYTNNSPLKRSSSRSKAKSPSKFSKGEEENSQRKEKKVKDQPTGGCRSADEDSNEKKTKERFPKKKWLNIPFKIDRRKPC

SEQ ID NO: 1332 - protein, 130 aa, Brassica napus
LDLVINLSHKMNVRPVIGLRAKLRTKHSGHFGSTSGEKGKFGLTTTQIVRVVRKLREACMLDCLQLLHFHIGSQIPSTSLLSDGVSEAAQFYCELIRLGANMKVIDIGGGLGIDYDGSKSGESGLSVAYT

SEQ ID NO: 1333 - protein, 87 aa, Glycine max
  misc_feature (52)..(52): Xaa can be any naturally occurring amino acid
MAALMISFPAVTTVNRAGAGMDVPFTGLKYMDGFPSMMSNIDITFIVSNGGXVQCMLDRSPYGKKKFETLFHLPDLDDAQLVKEVLF

SEQ ID NO: 1334 - protein, 484 aa, Acinetobacter calcoaceticus
MSIFTKELWDKKLFNGSWQSAQDTYSVIEVATGQVLGEIGYATAADVVSAAQQAKAAQQQWWALNYQERQAVFERAAALLTENQAEVIEWLVKESGSLQLKAGFEVSIAIQVLKHCIASPTNEQGTLLPTQNGKLSIAKRLPLGVVGVISPFNFPLYLALRAVAPALAFGNAVVLKPDERTAVCSGYVIARIFELAGLPKGLLHVLPGGVEVGEALTLDQNIASIQFTGSTQVGRIVGANAAKTLKKVSLELGGKNSLIILDDADIELAAENIAWGAFLHSGQICMTSGKILIHQKIYQQVKQRVIEKVQNFVVGNPCDKNVTIGPLINAKQAQRVEQLVSAAVNEGATLEIGGHADGVFFQPTVLTDVTANNSIFSEEIFGPVAVLIPFSSDEQAIELANDGDYGLSAGIITSNVGRGMQLGAQLKVGLLHINDQTVNDETVNPFGGFGSSGNGTRIGGPANADEFTQWQWITVQAQAPHYPF

SEQ ID NO: 1335 - protein, 489 aa, Bacillus cereus ATCC 10987
MNKELLADKLKVKDAKLFIDGKYVDSVCGETFDTFNPATNRKLASIAKANEEDTKRAIDVAERTFKSGIWSKMPVEERSNILCKMSDLIMERVDELAYIETLDVGKPIKESKGFDIPRSAHNFRFFAEMAKYIVHEHYDKHNFMSYAKYAPAGVTSLIIPWNLPFMQMTWKASAALASGNTVVVKPASYTPLSAVMLGEIANDAGLPPGVLNIITGPGSTVGTKMTTHPAVRRISFVGESNTGKTIMRNASENLIPVSLELGGKSANIVFEDADLDEAVQGSIEAIYRNQGEICLAGSRLLVQESVYEQFLEKFVAAVKRIKVGDPLSEDTDMGALVSKSHLETVDRYVELGISEGAKLAYGGKRVESLVEGNFYEPTILYDVDNSMRVAQEEIFGPVLVVIPFKTEEDAIRIANDSIYGLAGVVWTNDLRRAQRVVSQIDSGLLWINCWYVRDLRTPFGGSKASGIGREGGRHSFEFYTEAKTVTMKL

SEQ ID NO: 1336 - protein, 155 aa, Lycopersicon peruvianum
MDLRLLGIDNTPLFHTLHHMMEAAGEDSVNAPSKIYVRDAKAMAATPADVKEYPNSYVFVVDMPGLKSGDIKVQVEEDNVLLISGERKREEEKEGAKFIRMERRVGKFMRKFSLPENANTDAISAVCQDGVLTVTVQKLPPPEPKKPKTIEVKVA

SEQ ID NO: 1337 - protein, 206 aa, Triticum aestivum
  misc_feature (6)..(6): Xaa can be any naturally occurring amino acid
IRHQIXHQTFHHQPQQTYPHQPQQQFPQTQQPQQPFPQPQQTFPQQPQLPFPQQPQQQFPQPQQIPQQQQIPQQPQQFPQQQFPQQQQFPQQQEFPQQQFPQQQFHQQQLPQQQFPQQQFSQQQFPQQQQFPQQQQLTQQQFPQPQQSPEQQQFPQQQFPQQPPQQFPQQQFPIPYPPQQSQEPSPYQQYPQQQPSGSDVISICGL

SEQ ID NO: 1338 - protein, 413 aa, Triticum aestivum
MSVSSSSMCGGDAGMKCVVWFRRDLRVEDNPALAAAARTAGEVVPAYVWSPEEDGPYFPGRVSRWWLSQSLKHLEASLHRLGAAKLVTRRSPDSVAALLQLVRDTGATHLFFNHLYDPISLVRDHRLKEMMTAEGIVVQSFNADLLYDPWEVNDDKGQPFNMFMPFWNRCLSMPYDPPAPLLPPKRINSGDLSMCPSDDLIFEDESERGSNALLARAWSPGWQNADKALSAFLNGPLIDYSVNRKKADSANTSLLSPYLHFGELSVRKVFHLVRMKQLVWSNEGNHAAEESCTLFLRSVGLREYSRYLCFNHPCSHEKPLLAHLRFFPWVVDESTFKFWRQGRTGYPLVDAGMRELWATGWLHDRIRVVVSSFFVKVLQLPWRWGMKYFWDTLLDADLESDALGWQYLGRDHA

SEQ ID NO: 1339 - protein, 160 aa, Triticum aestivum
GSAVAGGVVVDMSRGGKAPSRALPVYSPELGGHYVDVWGGELWIDVLNWTLSHGGLAPRSWTDYLYLSVGGTLSNAGISGQAFHHGPQISNVYELDVVTGKGEAVTCSEAKNPELFFGALGGLGQLGIITRARIALEPAPRKVRWIRALYSNFTEFTADQ

SEQ ID NO: 1340 - protein, 236 aa, Zea mays
MTMESPTTAAGGELESYFSLGLTVSHSQKDNAEFPKVLLLLSAYLDKTVQQNEELLDSSKIKESTTIFHGQRVPELSIKLYAERIFKYAKCSPSCFVLALIYMERYLQQPNIYMTSFSVHRLLITSVVVAAKFIDDAFFNNAYYGRVGGISTREMNMLELDLLFGLDFRLKVDIETFESYCLQLEEALVLVLERPIQVQEANVTKHLICNSSADETCKHELGLERYSSQAVQGCSW

SEQ ID NO: 1341 - protein, 84 aa, Triticum aestivum
  misc_feature (26)..(26): Xaa can be any naturally occurring amino acid
  misc_feature (29)..(29): Xaa can be any naturally occurring amino acid
  misc_feature (35)..(35): Xaa can be any naturally occurring amino acid
  misc_feature (38)..(38): Xaa can be any naturally occurring amino acid
  misc_feature (40)..(41): Xaa can be any naturally occurring amino acid
  misc_feature (48)..(48): Xaa can be any naturally occurring amino acid
  misc_feature (50)..(52): Xaa can be any naturally occurring amino acid
  misc_feature (55)..(55): Xaa can be any naturally occurring amino acid
  misc_feature (57)..(60): Xaa can be any naturally occurring amino acid
MSDTDEHHFESKADSGASKTYPQQVXAIXKGGHIXIKXRXXCKVVEVXTXXXGKXWXXXXARNEKKPDFTPNYPRRKNQVAEPS

SEQ ID NO: 1342 - protein, 197 aa, Nicotiana tabacum
MSASRFIKCVTVGDGAVGKTCLLISYTSNTFPTDYVPTVFDNFSANVVVNGSTVNLGLWDTAGQEDYNRLRPLSYRGADVFILAFSLISKASYENVSKKWIPELKHYAPGVPIVLVGTKLDLRDDKQFFIDHPGAVPITTAQGEELRKTIGAPAYIECSSKTQQNVKAVFDAAIKVVLQPPKQKKKKGKAQKACSIL

SEQ ID NO: 1343 - protein, 503 aa, Burkholderia cepacia R18194
MYDTEPLAATRGPAGGQPEPRRVRNFIDGDYRAGDRWFDKRSPLDNAVIARVAEASRADVDAAVQAARAALSGPWGGLTVAQRVDILYAVADGITRRFDDFLEAEVADTGKPVSLASHIDIPRGAANFKVFADVVKNVPGETFEMATPDGAGALNYAIRRPVGVVGVICPWNLPLLLMTWKVGPALACGNTVVVKPSEETPQTAALLGEVMNAAGVPRGVYNVVHGFGPGSAGEFLTTHPGVNAITFTGETRTGAAIMKAAADGARPVSLEMGGKNAAIVFADCDFDAAVEGTLRSCFANAGQVCLGTERVYVERPLFERFVAALKAGAEQLRPGRPEADTTGIGPLISQEHRDKVLSYYRKAAELGATVVTGGGVPDMPADLRDGAWVQPTIWTGLGDDSPIARDEIFGPCTLVMPFDSEAEVIGRANANAYGLSTAIWTTHLARAHRVAASIDVGIAWVNSWFLRDLRTAFGGAKQSGIGREGGVHSLEFYTELRNVCIKL

SEQ ID NO: 1344 - protein, 326 aa, Glycine max
  misc_feature (260)..(260): Xaa can be any naturally occurring amino acid
MEQSVLDDIINRLLEVRTRPGKQVQLSESEIRQLCVVSREIFLQQPNLLELEAPIKICGDVHGQYSDLLRLFEYGGLPPEANYLFLGDYVDRGKQSLETICLLLAYKIKYPENFFLLRGNHECASINRIYGFYDECKRRFNVRLWKTFTECFNCLPVAALIDEKILCMHGGLSPDLLNLDQIRNLQRPTDVPDTGLLCDLLWSDPSKEVQGWGMNDRGVSYTFGADKVSEFLQKHDLDLICRAHQVVEDGYEFFANRQLXTIFSAPNYCGEFDNAGAMMSVDETLMCSFQILKPADKKAKLNFGSTTTAKPGNSPAGVKCFLGAKV

SEQ ID NO: 1345 - protein, 405 aa, Neisseria meningitidis Z2491
MEIILGIVMFTVIVLVLALMILFAKSKLVSEGDITIKVNGEKELTMPAGGKLLGALANEGIFIPSACGGGGSCGQCRVVVKSGGGDILPTELSHISKREAREGCRLSCQVNVKTDMDIEVPEEVFGVKKWECTVISNDNKATFIKELKLAIPEGEEVPFRAGGYIQIEAPPHTVAYKDFDIPEEYHEDWDKYNLWQYVSKVDEPILRAYSMASYPEEKGIIMLNVRIATPPPRVPDAPPGQMSSYIWSLKPGDKVTISGPFGEFFAKDTDAEMVFIGGGAGMAPMRSHIFDQLKRLNSKRKITFWYGARSKREMFYVEDFDQLAAEFPNFTWHVALSDPLPEDNWDGYTGFIHNVVYENHLKNHEAPEDCEFYMCGPPIMNQSVIKMLKDLGVEDENILLDDFGG

SEQ ID NO: 1346 - protein, 337 aa, Bacillus sp. KSM-K16
MRSIVCERPNVFKMTKEKAPSIRPGEALVRIKRIGICGTDLHAYKGNQPFFSYPRVLGHELSGVIEEVEHNPEGLQAGDRVAIIPYLSCGNCHACRNGKTNCCTKVNVLGVHIDGGMRELVAVPTKQLMKTTSLSYDEAALIEPLAIGAHAVNRAKPRRNEQVLVIGAGPIGLGVMLFAKEQGARVIAMDVNEERLEFCQQWAKVDAVVHALDNPLSELNDRLNDELPTIVFDATGNNDSMTEAFNYVAHGGKLVYVGLVNGMIQFDDPEFHKREMTLMASRNATKEDFNYVIQVLETGSIQLDSYITHRCSFREMVEQFDSWLLPESKVIKVVVEL

SEQ ID NO: 1347 - protein, 363 aa, Buchnera aphidicola str. APS (Acyrthosiphon pisum)
MKKNYRIAVLSGDGIGPEVMQEACKILNVLKKYFFLSLEIQKFNIGGIAIEREGVALPKTTLLGCENSDSILLGSVGGKKWDNLPVEQRPERAALLPLRKHFNLFSNLRPAKLYPELKCLSPLRSDIVKNGFDILCVRELTGGIYFGEPKGFVNKNNTKYAFDTEIYHEYEIIRIAHLAFKLARSRKKKVCSIDKSNVLQSSILWREVVESVSKKYPDVHLSHLYIDNAAMQIIKDPNQFDVLLCSNLFGDIISDECATITGSIGMLPSASFNEKNFGLYEPAGGSAPDIEGKNIANPIAQILSLSMLVRYGMNLNQIADKIDKAVNNVLKKGYRTSDISHDNNFLKTDEMGDLIVDSLINGE

SEQ ID NO: 1348 - protein, 454 aa, Xanthomonas axonopodis pv. citri str. 306
MSYDTVNPANGQVEHTQQTLDAAAIEARLAASAKAFPAWAALPLAERGALLRRIGEELTRRREDLQRIMTAEMGKLRREALAEIDKCAQACAYYAEHAADYLAPRDIPTEAQSSYVRYEPLGCVFAVMPWNFPLWQAFRFLAPSLMAGNVSLLKHASNVPRCADAMKEVLDAAGIPPGVFDVLHIDNDQAADVLRDDRIAAVTLTGSERAGRSLAANAGDQLKKCVMELGGSDAFVVLEDADLAHTVPSAVQSRFDNSGQTCIAAKRFIVVDAIADRFIERFVAAAAQRVVGDPQQDSTTLAPMARADLRDELHKQVQASVAKGAKVLLGGEPVAGSHAGYPATILDTVAPGMPAYDEEFFGPVASIIRVADEAEAVRVANDTTFGLGGSVWTADAKRGERVAQQLQCGAAFVNSVVKSDVRLPFGGIKRSGFGRELAEHGIHEFMNVKTIYVA

SEQ ID NO: 1349 - protein, 192 aa, Deinococcus radiodurans R1
MSASPSLPASQGPLPQGERVNKAGRVVWFTGLSGAGKSTLATALFEELSARGEAVELLDGDAVRENLSKGLGFSREDRDTNVRRIAFVAGLLAKHGVTVLVSAISPYADTRREVLASLPNALEVFVDAPLEVVTERDVKGLYLKALAGEIPHFTGVSDPYEAPENPDLHLRTDRISVEDGVQQLLGRLSDDR

SEQ ID NO: 1350 - protein, 507 aa, Ralstonia metallidurans CH34
MKAQEIAACWQAMDLPPPWTPAEGAAPGVLAVRSPIDGEVFGQLAMCDAALANARIARAHAAQTTWALTPAPARGEVVRRFGEALRANKDALGRLVSLESGKILQEGLGEVQEMIDICDFAVGLSRQLHGLTIASERPAHAMRETWHPYGLCGVISAFNFPVAVWAWNAALALVCGNGVVWKPSEKTPLCALAAQGLLDRVFERHAPQFDGLSCVLTGGRQLGEHLVQHPAVRLMSATGSTRMGREVGMACAAHFKRAILELGGNNAAIVTPSAELEMTIRAMTFAAAGTAGQRCTTLRRAFVHADLIETVTNRLRQVFARLPVGDPLEDGTLVGPLIDHAAGDTMANALASCRAQGNVVHGGERLLGDRYPHACYVRPALVLTDAQHDTMLTETFAPILYLMPYTSLDEAIALNNAASHGLSSCIFTESLREAERFLSSAGSDCGIANVNIGTSGAEIGGAFGGEKATGGGRESGSDAWKGYMRRATNTINYGDALPLAQGIRFDV

SEQ ID NO: 1351 - protein, 472 aa, Xanthomonas axonopodis pv. citri str. 306
MHRHVHEPEILADPAAAQTAEHWRQRDLAVVWHPCTQMREHPHTLPLVPIVGGEGAWLVGHDGRRYLDAVSSWWTNLFGHTEPRIGAAIARQAGELEQVMLAGFTHTPAVQLAEQLLAIAPRQAGRAPLSKVFYADNGSAGVEVALKMAFHYFHNRGDHRRTRFIALENGYHGETIGALSVGDIPLYRRVYAPLLLEAMFTPSPDAYLAEPGQSAEDHALQAADALQALFEHSPGEICALILEPRVQCAGGMRMYHPAYLRRARELCDAHGAFLIADEIATGFGRTGTLFACEQAGVMPDLLCLSKGLTGGFLPLSAVLATQQLYDAFLDDSRERAFLHSHSYTGNPLACAAALATLKIFADDDVIARNQPIAARMRALAAQIGEHPSVADVRQAGMIVAFELTQGGNKRTPFASAARVGLKAYRAALEKGVVLRPLGDVLYWMPPYCVDEAQLALLADTTRHAITEAVACA

SEQ ID NO: 1352 - protein, 181 aa, Coffea arabica
MASSMISSAAVATTTRASPAQASMVAPFNGLKAASSFPISKKSVDITSLATNGGRVQCMQVWPPRGLKKYETLSYLPDLTDEQLLKEIDYLIRSGWVPCLEFELEKGFVYREYHRSPGYYDGRYWTMWKLPMYGCTDATQVLNEVGECLKEYPNCWVRIIGFDNVRQVQCISFIAAKPKGF

SEQ ID NO: 1353 - protein, 238 aa, Triticum aestivum
  misc_feature (150)..(150): Xaa can be any naturally occurring amino acid
  misc_feature (216)..(216): Xaa can be any naturally occurring amino acid
MPSRPAPLVHRLRLLRSAVVCSSSALLPCSRPRLAIPFAQPPLRGPAFAAASSPLLRSVGARFSLFSSMAAAASSASSIHDFTVKDASGKDVDLSTYKGKVLLIVNVASQCGLTNSNYTELAQLYEKYKDQGFEILAFPCNQFGGQEPGXTNEEIVQFACTRFKAEYPIFDKVDVNGDNVAPVYKFLKSSKGSLFGDNIKWNFSKFLVDKEGHVVXRYAPTTSPLSIEKDIKKLLASS

SEQ ID NO: 1354 - protein, 368 aa, Arxula adeninivorans
MAAQVEEQVLNLRAQADHNPSFVLKKPLELGFEERPVPVITDPRDVKIQVKKTGICGSDVHFWQHGRIGDYVVEKPMVLGHESSGVVVEVGSEVTSLKVGDRVAMEPGVPDRRSKEYKMGRYHLCPHVRFAACPPTDGTLCKYYTLPEDFCVKLPENVDFEEGALVEPLSVAVHTARLLGIYPGSKVVVFGAGPIGQLCIGVCKAFGASIIGAVDLFEQKLETAKEFGASHTYVPQKGDSHDETAHKILELLPNKQAPDVVIDASGAEQSINAGIELLERGGTFGQVAMGRTDYIQFAVSRMAMKEIRFQGVFRYTYGDYELATQLIGDGKIPVKKLVTHRRPFEKAEEAYELVKSGVAVKCIIDGPE

SEQ ID NO: 1355 - protein, 570 aa, Glycine max
MPEYIVDEGARIEAEVAEVQAWWNSERFRLTKRPYTARDVVSLRGNLRQTYASNEMAKKLWRLLKNHQANGTASRTFGALDPVQVTQMAKHLDTIYVSGWQCSATHTTSNEPGPDLADYPYDTVPNKVEHLFFAQQYHDRKQKEERMRMSREERARTPYVDYLRPIIADGDTGFGGTTATVKLCKLFVERGAAGIHIEDQSSVTKKCGHMAGKVLVAISEHINRLVAARLQFDVMGVETVLVARTDAEAANLIQSNIDTRDHQFILGVTNPNLKGKSLATLMQQGMAAGKNGAELQALEDEWLSKAQLKTLSEAVVEAIERQNNIGEEEKRRKLNEWMHHSSYERCLSNEEGREIAEKLGVRNLFWDWDLPRTREGFYRFKGSVTASVVRGCAFSPHADVIWMETASPNVVECTEFSEGVRSKHPQMMLGYNLSPSFNWDASGMSDEQMKDFIPKIAKLGYVWQFITVGGLHSNALITSTFARDFANRGMLAYVERIQREERNNGVDTLAHQKWAGANYYDRYLKTVQGGVASTAAMGKGVTEEQFKESWTRSGAVNIDRGSIVVAKARM

SEQ ID NO: 1356 - protein, 226 aa, Glycine max
  misc_feature (78)..(78): Xaa can be any naturally occurring amino acid
ITRPPTRPPTRASTRPVNGDGGRDVNLGDSNYSFGEAEALSDEMEEESRYVAEILRIRDVLLNPEDESEAVLFDSLRXLQLMELTADCLKATEIGKAVNPLRKHGSKDIRQLSRTLIDGWKEMVDEWVKATTTTAITGSEEGTPDSVNPSVVDDDEEEGLPSPPLDEGALFVTQAGSMELSQFFDGMDDDGNPRPTGPFSKNREDGRKPAFDSHVVQMRKSQPSHD

SEQ ID NO: 1357 - protein, 285 aa, Saccharomyces cerevisiae
MELSSPSKKTTTSPINIPGGNRDNLIIGPHSHSFKTDPFSSNNSSLLSKISTNPSLESPFSSKSLLDCSPVQAVKKSLESEAKTHSLDEETNEQTDVKILNIADFPTDELILMISALLNRIITANDETTDVSQQVSDETEDELLTPILAFYGKNVPEIAVVQYLERIQKYCPTTNDIFLSLLVYFDRISKNYGHSSERNGCAKQLFVMDSGNIHRLLITGVTICTKFLSDFFYSNSRYAKVGGISLQELNHLELQFLILCDFKLLVSVEEMQKYANLLYKFWNDQ

SEQ ID NO: 1358 - protein, 462 aa, Streptomyces coelicolor A3(2)
MKAHDGMYIDGAWRPADGRDTIDVVNPVDEQVIGKVPAGSALDVDTAVRAARAALSGWAATPPAERAARLAALRDVLVARKDEIAETVTAELGSPLKFSQAVHAGAPIAVAGSYAELAATHAFEEKVGNSVVHHEPVGVVGAITPWNYPLHQIVAKAAPALAAGCTMVLKPAEDAPLVAQLFAEAVHEAGIPAGVFNLVTGLGPVAGQALVEHPGVDLVSFTGSTAVGRRIGATAGAAVKRVALELGGKSANVILPSADLAKAVNVGVANVMSNSGQTCSAWTRMLVHRDQYDEAVSLAAEAAAKYGDRIGPVVNAEQRERVRGYIGKGVAEGARLVAGGPEAPREQGYFVSPTVFADVTEEMTIAQEEIFGPVLSILRYEDEDDALRIANGTVYGLAGAVWAGDEADAVAFARRMDTGQVDINGGRFNPLAPFGGYKQSGVGRELGAHGLTEYLQTKSLQF

SEQ ID NO: 1359 - protein, 159 aa, Corynebacterium glutamicum
MTSIHDISVTLNDGTETTMADWAGHLLLIVNVASKCGLTPQYEGLQKLYEEYQDRGFFVIGVPCNQFNGQEPGTDAEVCAFAQNQYDVTFPLLSKTEVNGEGTHPLYKVLKEATDGSEIEWNFEKFLVDAEGNTIKRFAPRTEPSAAEVVEAIEENLPI

SEQ ID NO: 1360 - protein, 86 aa, Glycine max
  misc_feature (61)..(61): Xaa can be any naturally occurring amino acid
GKYERVGTTQKRARAGKVAPFTGLKYMAVVPTRKTNQELTFIDRNGGGVLCLQVWPRAGKXMRVTLFYVPDIDDAHVGDEVQYLLM

SEQ ID NO: 1361 - protein, 75 aa, Zea mays
  misc_feature (6)..(8): Xaa can be any naturally occurring amino acid
GCWRRXXXTVKWFNDTKGFGFISPEDFSEDLFIHQSSIKSEGFRSLAEGEEVEFSVSDGDDVLTKAHYMTSPYKS

SEQ ID NO: 1362 - protein, 483 aa, Haloarcula marismortui ATCC 43049
MEYTGPTDLYIGGEWREATNGDSIETEDPATERTYASVQKAEASDIDAAVEAAQAAVAEGSEWATMDPGTRRAKLHAMADAIEAMKDELSMVESHDNGKTPFEAGLEIDMVIDTFRHYAGWTDKVRGDEIPVENGRLNYTTREPVGVTAHIAPWNYPFQLAGRGLAPALATGNSVILKPSAMTPLSALYYAKAAEEAGLPDGVVNVVPGKGSEAGDALTGHEGVDHVTFTGSTGVGKTVQRTAADAVADVTLELGGKGPAVVFPDADLDAAARGIQYGIFMNAGQMCWANSRIVVHEDVYEEMVSRMAEIAENIPLGGGIDDDGQMGPVVSAGQQQEILDYIETGKEEGATVAAGGGVPGDKETGHFVEPTVFADVDNEMTIAQEEIFGPVLTAIEVSDEEAAIDVANDSPFGLTACVWTNDLTRAHTVTDRLDYGMVMVNETPNTWPQTPFGGTKQSGHGRAQGEQAIESYTEVKNVHINLG

SEQ ID NO: 1363 - protein, 203 aa, Yarrowia lipolytica
MSHSQRTYDLLIKLLLIGDSGVGKSCLLLRFCEDQFTPSFITTIGIDFKIRTIDIGNQRVKLQVWDTAGQERFRTITTAYYRGAMGILLVYDVTDEKSFNNIENWYQNVQTYANEGVELILVGNKCDLDEKRVVSTEQGQALADKFGIPFLEASSKTNINVEECFYSVATRIRDTVAKTKGNESGSGGINIAEGEENSASKCC

SEQ ID NO: 1364 - protein, 341 aa, Triticum aestivum
  misc_feature (293)..(293): Xaa can be any naturally occurring amino acid
  misc_feature (314)..(314): Xaa can be any naturally occurring amino acid
  misc_feature (327)..(327): Xaa can be any naturally occurring amino acid
MGSIAAGADEDACMYALQLVSSSILPMTLKNAIELGLLETLMAAGGKFLTPAEVAAKLPSAANPEAPDMVDRMLRLLASYNVVSCRTEEGKDGRLSRRYGAAPVCKYLTPNEDGVSMSALALMNQDKVLMESWYYLKDAVLDGGIPFNKAYGMSAFEYHGTDPRFNRVFNEGMKNHSIIITKKLLESYKGFEGLGTLVDVGGGVGATVAAITAHYPTIKGINFDLPHVISEAPPFPGVTHVGGDMFQKVPSGDAILMKWILHDWSDEHCATLLKNCYDALPGHGKVVLVEWIXPVNPEATPRGQGGFHVDMIMXPPNPGGRERYKKXSFEARAKGAGLPPG

SEQ ID NO: 1365 - protein, 560 aa, Triticum aestivum
DRATEEQLVTPWTVSVASGYNLLRDPRYNKGLAFTEKERETHYLRGLLPPTVISQELQERKIMHNIRQYQLPLQRYMAMMDLQEGNERLFYKLLIDNVEELLPIVYTRTRPPAVRKYGSIFSRPQGLYISLKEKGKILEVLKNWPERSIQVIVVTDGERILGLGDLGCQGMGIPVGKLSLYTALGGVRPSACLPITLDVGTNNEELLNDEFYIGLRQRRVIGQEYADFLHEFMAAVKQNYGEKVLIQFEDFANHNAFDLLARYGTTHLVFNDDIQGTASVVLAGLVAALKLVGGTLAEHTYLFLGAGEAGTGIAELIALEMSRQTKTPIDECRKKIWLVDSQASAHASGTRKESLQHFKKPWAHEHEHVGNLLDAVNAIKPTVLIGTSGKGQTFTQEVVEAISSFNEMPIILALSNPTSQAECTAEQAYTWSKGRAVFATGSPFDPVEYNGKTHVPGQANNAYIFPGFGLGVVMSGAIRVHDDMLLAASEALAQQVTQENFDKGLIYPPFSNIRKISAHIAANVAARAYELGLASRRPRPKDLVKYAESCMYSPIYRNYR

SEQ ID NO: 1366 - protein, 483 aa, Bacillus sp. KSM-K16
MVQTYLNYIDGEWKPSISGNVFYGRNPANYEEILGAYQASTAEDARLAIKSAAAAFPNWKNKSAIERADVLYQLMPLLAAEKEKLAAIITKEVGKTMAAARKEVDASIQALKHFSGAANRLAGETVPAGNPETFAYTIKEPLGPVGVITPFNFPLGIGIYKIAPALIAGNTVVYKPHNDTVQIAARLVELFIEAGTPKGVLNLVTGDGDKVGQELGENRTLKAISFTGSSDVGLRLGRSVTNRGGKMQAEMGGKNATVILEDADLDKAVSGIVISGLLNNGQSCTGTSRVIVPKNIAKTVTSKLVEKATAIRVGDGFNENVENGPVANEAQLQKYLHYVDIAVKEGAKLECGGKRLFGEGKDKGYFVAPTVLSGVTPEMTIAQEEVFAPVVAIMEVDSFDEAIAVANQTDFGLSSAIYTTNLQKAHEFVRRVETGVTHINIPSNHYENQLPFGGKKNSSIGPREQGSTALDFWVDTKAVYLKP

SEQ ID NO: 1367 - protein, 436 aa, Arabidopsis thaliana
MPGHRSKSEKKDADKQLRRDPYEVLGVLRNSTDQEIKSAYRKLALKYHPDKTANDPVAADMFKEVTFSYNILSDPEKRRQFDSAGFEAVEAESQELELDLSSLGAVNTVFAALFSKLGVPIKTSVSATILEEALNGRVSVDPLVLGQAVSKKVEKQCAHFYAVTISEEEVSAGLVCRVESSSKSKFKLLYFDQEANSGLSLALQEDSKRTGKITSAGMYFLGFPVYRLDHTINSMAQAKDPETAFFKKLDGFQQCEVTELKAGTHVFAVYGDNFFKNVSYTIQVLCAAAFTQEKEDLRSVEAQILTKRAELAKFETEYREVLVQFTDMTSRYAQEMQSIDELLKQRNEIHSAYTTIPLMKRSSSKNRMRKSSFKKAAAKAPAPTEQEEEEEEEEEEEEESSRQKNKKPSTCDKSETLKKKSKWFNLHLKLDKKKPC

SEQ ID NO: 1368 - protein, 455 aa, Xanthomonas axonopodis pv. citri str. 306
MDPSVLKALQQLDAAHHLHPFNDNAALAQKGTRILTRGEGVYVWDADGNQLLDAFGGLWCVNVGYGRKELAQAAARQMEQLAYYNSFFQCTTEPTIQLAAKLAELAPGDLNHAFFANSGSEANDTILRLVRHFWAVQGQPQKRIFIGRHDGYHGTTMAGASLGGMRGMHQQGGLPIADIHHVAPPYHFGDGGEMDPEEYGLLAARRLEDKILELGPDNVAAFIGEPIMGATGVYIPPRSYWPEIERICRRYDVLLVADEVICGFGRTGEWFGAEYFGFQPDVMTLAKGITSGYIPLAAAMFNDRVAGVLKTQGGELAHGGTYAGHPVCAAVALENLRLLQDEGIVETARTQVAPYLAQRWAALGEHRLVGEARIAGLVGALELVPDKQRRGAYFPRRGRVGAMCRDFALRRGLILRATYDAMLLSPPLIITPAQVDELFDKAWAALDDTAQALGR

SEQ ID NO: 1369 - protein, 494 aa, Photorhabdus luminescens subsp. laumondii TTO1
MKRLHDIEKEMLPVESYKMLIGGQWVDSVSKATTKSYNPATGELLAEYASGNAEDVDLAVSAAKKAFHAWSQTSAIERQSALLKIADLLEAEQKRFAILESLDTGKPLNESLYMDLPASIDQFRYFAGVIRSHTDEASVLDTNTLSLVIREPIGVVGQVIPWNFPLLMAAWKLAPALAAGNTIVINPATLTSITLLELGRILDKVLPAGVVNIVTGRGSVVGQAILDHEDVEKVAFTGSTKVGYTVAEAAAKKLIPATLELGGKSANIIFPDANMKKAVKYAAKAILLNQGQACESGSRLFLHKDIHDEFLKSLKTEFESIQVGDPLEKETQMGSQVSQEQMEKILEYVEIAKKEGATIFTGGKRITEKGYDEGFFIQPTIITDVTNDMRVAREEIFGPVLAVIPFSEEEDVIRMANDSDYGLAGAVWTQDIDRALRVAKAVRTGRMWINTYHELPAHAPFGGYKKSGIGRETHKMMLDAYTQVKNIYIKTSEE

SEQ ID NO: 1370 - protein, 275 aa, Bacillus halodurans C-125
MELWYTEKQTEHFGITAKIKRTLHTEKTDFQQLDVIETEEFGNMLVLDGMVMTTEKDEFVYHEMVAHVPLFTHPNPKHVLVVGGGDGGVIREVLKHPSVEKATLVEIDGKVIEYSKKYLPSIATALNDPRVDVQVDDGFLHIAKAESAYDVIMVDSTEPVGPAVKLFEKGFYQGIAKALKEDGIFVAQTDNPWFHGELIRKVYADVQEIFPITRLYTANIPTYPSGLWTFTIGSKTYDPLHVEPSRFYDIETKYFTKDLHKAAFALPRFVDDLIK

SEQ ID NO: 1371 - protein, 170 aa, Zea mays
MAPTVMMASSATAVAPFQGLKSAASLPVARRSTRSLGNVSNGGRIRCMQVWPAYGNKKFETLSYLPPLSTDDLLKQVDYLLRNGWIPCLEFSKLGFVYRENSTSPCYYDGRYWTMWKLPMFGCTDATQVYKELQEAIAAYPDAFHRVIGFDNVRQTQCVSFIAYKPPGSE

SEQ ID NO: 1372 - protein, 474 aa, Rhodococcus ruber
MTAGHFTELYINGSWVASTSKTVIEVLNPATEEVIGTVPDGTAADVDAAVAAARAAFDGWASTPVDKRAQYLRAIAAGIADRSDELARTISAEMGAPLSFAQAMQVPLPINSFSHAAAVAESFPFERTEGSSVIVREPIGVVGAITPWNYPLHQIAAKVAYALAAGNTIVVKPSEVAPLNAWMLAEIIDAAGVPAGVFNLVSGTGPVVGEALASHHEVDMISFTGSTNAGKRVSELAAQTVKRVALELGGKSANIVLDDADIDELMPNAVQWAMINSGQTCSALTRLLVPRAILTEAETAAKTIAEAYTVGAPDDPDTTLGPLVSATQLKRVRGYIDRGVQEGATLITGGSEPVEGLAVGYYVKPTIFSEVTPDMTIHREEIFGPVLSIAPYDTEEDAVRIANDSEYGLRGGVWSRDVDRARAVAARMRTGQVMINGGEFNPNAPFGGYKQSGTGREFGTHGLEEFLEIKSLQF

SEQ ID NO: 1373 - protein, 179 aa, Glycine max
MDNKATILMQKYEVGHFLGQGNFAKVYHARNLKTGQSVAIKVFNKESVIKVGMKEQLKREISLMRLVRHPNIVQLHEVMASKTKIYFAMEMVKGGELFYKVSRGRLREDVARKYFQQLIDAVGHCHSRGVCHRDLKPENLLVDENGDLKVTDFGLSALVESRENDGLLHTICGTPAYVA

SEQ ID NO: 1374 - protein, 163 aa, Triticum aestivum
MSDTDEHHFESKADSGASKTYPQQAGAIRKGGHIVIKARPCKVVEVSTSKTGKHGHAKCHFVAIDIFNGKKLEDIVPSSHNCDVPHVDRQDYQLIDITDDGDRYVSLLTESGNTKDDLKLPTDDVLLGQIKTGFADGKDLILSVMSAMGEEQICAVKEIGGGK

SEQ ID NO: 1375 - protein, 470 aa, Novosphingobium aromaticivorans DSM 12444
MLFATLAAGEGLDVLNPATQQRIATVKAYSTEEIARLIEAADAARGAWAARTAKERSVVLRRWYDLVMSHQEDLAALVTAESGKPLAEARGEVAYGAAFIEWFAEEGKRAYGDTIPTFANGKRVLTIRQGVGTCAAITPWNFPVAMITRKVAPALAAGCAMVVKPAEATPLSALALETLAHEAGVPAEVFRVVPTDDPAGVGTLFCTHPQVRKLSFTGSTRVGQLLMEQAAANVTRLSLELGGNAPFIVFDDADLDAAVDGLMASKFRNAGQTCVCANRILVQDSVHDAFLAKVQERVAALVVGDGAQPGTTIGPLINEAAVKKVGALVADACEAGARVLAGGGKSPVGTGFFEPTILADVTPDMAVASAEIFGPVVPVIRFADEPQAIRIANDTPYGLAAYFYARDVGRIWRVMEALEYGMVGVNDGIISTEVAPFGGIKHSGLGREGSRHGLDEYLELKYCLMGGIDR

SEQ ID NO: 1376 - protein, 380 aa, Pichia angusta
MKGLLYYGTNDIRYSETVPEPEIKNPNDVKIKVSYCGICGTDLKEFTYSGGPVFFPKQGTKDKISGYELPLCPGHEFSGTVVEVGSGVTSVKPGDRVAVEATSHCSDRSRYKDTVAQDLGLCMACQSGSPNCCASLSFCGLGGASGGFAEYVVYGEDHMVKLPDSIPDDIGALVEPISVAWHAVERARFQPGQTALVLGGGPIGLATILALQGHHAGKIVCSEPALIRRQFAKELGAEVFDPSTCDDANAVLKAMVPENEGFHAAFDCSGVPQTFTTSIVATGPSGIAVNVAVWGDHPIGFMPMSLTYQEKYATGSMCYTVKDFQEVVKALEDGLISLDKARKMITGKVHLKDGVEKGFKQLIEHKENNVKILVTPNEVS

SEQ ID NO: 1377 - protein, 534 aa, Zea mays
MGNCCAAPSTEGSGKTRPKKQKENPYNVAYNRGAAAPPPPPARPGLVVLRDPTGRDLGAEYELGGELGRGEFGVTYLCTEPATGARYACKSISKRKLRTPVDVEDVRREVDIMRHMPPHPNIVSLRAAYEDRDAVHLVMELCEGGELFDRIVARGHYTERAAAAVMRTIVEVVQKCHRHGVMHRDLKPENFLYASKDSSPLKAIDFGLSVFFRPGERFTEIVGSPYYMAPEVLKRNYGPEVDVWSAGVILYILLCGVPPFWAETEQGVAQAIIRSVVDFKREPWPRVSEPAKDLVRRMLDPNPLTRFTAAQVLEHPWLHDSKNTPDVSLGDTVRARLQQFAAMNKLKKKALRVIAEHLSAEEVADIKQMFDKMDVNKNGKLTFEEFKAGLRKLGNQMHDSDLQILMDAADVDRNGTLDYEEFVTVSVHVRKIGNDEHIQKAFAYFDRNKSGYIEIEELREALADELDGSDEDIIGGIIRDVDTDKDGKIGYDEFAAMMKAGTDWRKASRQYSRQRFSNLSLKLQKDGSLGADTR

SEQ ID NO: 1378 - protein, 159 aa, Shewanella oneidensis MR-1
MRTLTKIIGGLVLLLSMVTTVMATPVDTYEFKSPENQKRALELAHSLRCPQCQNQNLIDSNSPVASDLRLEVFKMVDEGKGDDEIIEFMTSRYGEFVLYKPKMETKTYILWLGPVGLLLLGLIVGFIFIRKQRITGAAGLEISAEDQKALDALLKRDSK

SEQ ID NO: 1379 - protein, 279 aa, Klebsiella pneumoniae
MTTDSILLNDGYYMPRPGCGLWLIDNRDVDSLIRQALKAGFRHFDTAQAYFNEDGVGRALRYTEVPREQLFITSKIRGRDMGYARTLVSFNETLERLGVEYLELFLIHWPIPAKNLYVETWEASIELEASGLIRSIGVSNFTCQHIERLIEDTGVVPAVNQLELHPHFQQCDVRDYHHEAGIAIQSYSPFGSNGAAVLRNAVVMVLARRHDHSPAQIVLRWHLQQGLTPLPRTTNGARFSENVDVWDFELSEEEMKLLASLNTRTGNTQPLPDAMNMSF

SEQ ID NO: 1380 - protein, 80 aa, Brassica napus
STHASGYRDWRLRSQSCPFCRGSLKRVNSGDLWVYTSSREIVELPEIYKENVKRLLMYIDKLPLVARDHPTLVPYSPVPR

SEQ ID NO: 1381 - protein, 135 aa, Triticum aestivum
  misc_feature (31)..(31): Xaa can be any naturally occurring amino acid
  misc_feature (52)..(52): Xaa can be any naturally occurring amino acid
  misc_feature (73)..(73): Xaa can be any naturally occurring amino acid
  misc_feature (85)..(85): Xaa can be any naturally occurring amino acid
  misc_feature (98)..(98): Xaa can be any naturally occurring amino acid
  misc_feature (112)..(112): Xaa can be any naturally occurring amino acid
MSDTDEHHFESKADSGASKTYPQQAGAIRKXVGHIVIKARPCKVVEVSTSKXLGKHGHAKCHFVAIDIFNGKXNLEDIVPSSHNXDVPHVDRQDYQLXIDITDDGYVSLLTXDGNTKDDLKLPPDDVLLGQIKTD

SEQ ID NO: 1382 - protein, 337 aa, Triticum aestivum
IIFDSVLGEGGFGMVYKGWVDEKTMQSTKSGTGMVVAVKKLNSESMQGYEEWQSEINFLGRLSHPNLVKLLGYCWEDKELLLVYEFMAKGSLENHLFRKGCAPLSWELRLKIAIGAARGLAFLHASEKQVIYRDFKASNILLDASYNAKLSDFGLAKLGPTGSNSHITTRVMGTYGYAAPEYVATGHLYVKSDVYGFGVVMLEMLSGKRARGPNRPNGQQSLVDWAKPYLADRRKLARLMDPQFEGQYNSKQSHQAAQLTLNCLAGEPRSRPSMKEVLEPLEQIEALKSRTREARGGSGTSSRDRGPRTLCCSAPTVVATWRQRCAPWFEGHQRPRH

SEQ ID NO: 1383 - protein, 152 aa, Oryza sativa (japonica cultivar-group)
MMWIQSMLYFAFYCTGKPLEMLLDRGTSKPDKYLKAKSDSDGAGLLILDPYGGKMVHVAPVVMSFPHRQALYNIQYYGFWSKSRAATEKHMGWIRGLYGEMEPYVSKNPRGGAAAIAAVTGSLAVCRSWRGGIWLQGQSCHFENFPPLLSRK

SEQ ID NO: 1384 - protein, 447 aa, Anabaena variabilis ATCC 29413
MSEQKIDAQGVNVIQDQSLVSSVITDFGNLIKGNTLGIIQPHNIEEISSAIEFAKQQNSRLKARGKGYTQSGQSVAQDAFTLDLTRLNHISKVDTVTQAIATEAGATWQDIVTTTMKFGMLPCVLPLNLEQTVGGLLSTGGIGSTSKTYGPVVANVIDLHIITGNGEHIQCSRTQAPELYHAVLGGLGGCGIIASATLALRKTKKYIRTFHLLYDSLKAWMDDHVLLSRNHQIEHLEGFCWTSAKGIRQTTNGKSFFAHWLYGLQVGIEYDEAAPSVSDVLQNLNYWQLFHTEDEETVSHVFRYQPRFEVMRASGGWNQAHPWIECFISAEALTEILPEILDMLPLSLGDGHRAIMVASDNLPSLFMMPPAKNILCFAILPMAVPVGDTKTFDVLAKVSQILLSAGGKRYLSGWLGKSDFDWQQHYGTSYETWETMKQRYDPSHILG

SEQ ID NO: 1385 - protein, 477 aa, Acinetobacter sp. ADP1
MNQLIWFRNDLRLNDHAALWHATQAGSTIAFVALSPLQWQQHDDAIIKIDFYMRQLTQLKQELNTINIPLIVQIIPLWKDIATEIISISDRYHIQDVYANIETGINEIERDHAVQEALSKIGKNLILFHDKTLFPLGSIRNKSQAPYQVFTPFKKTCYERLNIDIPKCFPYPHKQKQQPEIAKKEAAIPSLKQLGYSQIDQHIQNEWPIGETFALNLLEDFTQDKINRYHESRDYPAQDGTSHISAYLTIGILSIRQCIQAIFQKQHGQFFLNNKGQEIWLNELLWREFYQQLLFDFPKLSRHQPFQDHTKNIPWNENDEHFEAWIQGKTGIPIVDAGMRQLKATGWMHNRVRMICAMFLSKNLLIDWRKGEKWFMQHLIDGDLAANDGGWQWSASTGTDASPYFRIFNPVTQSQKFDPEGVFLKKWIPELKHLDSKHIHDPYAYQHKTELNYPKPIIDLKATRKNAIEVFKKSSSL

SEQ ID NO: 1386 - protein, 90 aa, Triticum aestivum
  misc_feature (24)..(24): Xaa can be any naturally occurring amino acid
  misc_feature (31)..(32): Xaa can be any naturally occurring amino acid
  misc_feature (44)..(44): Xaa can be any naturally occurring amino acid
  misc_feature (52)..(53): Xaa can be any naturally occurring amino acid
MSDTDEHHFESKADSGASKTYPQXAGAIRKXXHIGIKARPCKVXVEVSTSKXXKHVFVLWGGGLKLGYPLSSKLSPCSPNCCPSPAVPLF

SEQ ID NO: 1387 - protein, 74 aa, Triticum aestivum
MPFVPSCVQCGTRSNPCRCKVVGPTLGFVAFVVTGVVEWPLGAAVYLFRHRKGRRIMGHPARVVYPRVTRAIPI

SEQ ID NO: 1388 - protein, 414 aa, Arabidopsis thaliana
MATHSSRSENKDAGEEDELRRRNPYEVLGIPSNSTDQEIKSAYRRMALRYHPDKNPDDPVAADMFKEVTFAYEVLSDPENRRLYDTTGSEAVGPENEDLELDLSSLGAVNTIFAALFNKLGVQIKTTVSANLLGEALNGTVTTLPLMVGQVVSRKVEKQSAHFYSVTLTEEEAQDGLICKVHSSAKNKFKLLYFDQVENGGLSLALQEDSRKTGKLSTAGLYFFGFPVYRFDHRVNSRALSRDPETGFFKRLDAFQPFEITELKAGSHVFAVYGDNFFKSVSYTLEIFSSAPFGNEKESLRSTEAQIVSKRTELLKFESEYHEVFAQFTEMASKCTGEVQEIDELLKRRNEICAAYTIFPPTKQGSSKSRSWSKKKSSLLMEPREEGEVAVREEGGVKKKKWYNIQLRQDKKKN

SEQ ID NO: 1389 - protein, 162 aa, Oryza sativa (japonica cultivar-group)
MSDSEEHHFESKADAGASKTYPQQAGTIRKNGYIVIKNRPCKVVEVSTSKTGKHGHAKCHFVGIDIFNGKKLEDIVPSSHNCDVPHVDRTDYQLIDISEDGFVSLLTESGNTKDDLRLPTDDTLTNQIKNGFGEEGKDMILTVMSAMGEEQICAVKEIGAKN

SEQ ID NO: 1390 - protein, 1320 aa, Emericella nidulans
MGKTSAKDVAELKDYQLGDCLGRGAFGSVYRALNWNTGETVAVKQIKLADLPKSELRVIMLEIDLLKNLDHPNIVKYQGFVKSAETLNIILEYCENGSLHSIAKNFGRFPETLVGVYMSQVLHGLLYLHDQGVIHRDIKGANILTTKEGLVKLADFGVASRTTGLSESSVVGTPYWMAPEVIELSGATTASDIWSLGCTVIELLEGKPPYYNLQPMPALFRIVNDDHPPLPQGASPAVKDFLMQCFQKDPNLRVSARKLLKHPWIVNARRSDSVVPKKSTEYEEAVKSVQEWNEALRSPESNALRRGTRNENQNPPSLRLDTRHTPTKVTLPSPVSRIVADKFSSPSSGEEDNWDDDFATAISPSALQLPHLRPHDNFGGMLSSEKLKAFASLDGTVLKSDESFEESDDPFKGSLLAGEHDPLKTIRPPPSQQANSGTSQSQNGPYGAHMRRGPPLNTAITPVYGGQMLQNSSSPIRQQRPPLFYKENSVEDYSDLISANEDVLDRKISAFQVGPTLRTPEGSDHAADVHQESDEHKDLADTGRSREVIRYQSSYEQEDTPRIGRQISVKRYRGTVEIQQFAENEHDEDFSDILGVDGVTLDKAESDDGSNKSTLMLNTKLSNNSWLGDLDDEDDPFALLEEGLDETDLEANIARDKHARLRSQVEGLVGSLKTSQDEEVLGDISEQLLAVFCDFPETKNIIISAHGMLPILEILDLCRRRDITLCLLKIVNAIIYDDYEIQENLCFVGGIPIINEFAAKKYPREIRLEAAAFVQQMYQTSTLTLQMFVSAGGLNVLVEFLEDDYEDERDLVLVGVNGIWSVFELQGSTPKNDFCRILSRSSVLDPLSLVLSRVLDEEGELAEVVEGRIANIFFIFSQAENHVKEMVSERTVLHRVLKELKRMTPAHQITMLKFIKNLSMLSTTLDSLQNSNAIDVLTDLLRSTIKRPHFREVSNQILNTIYNMCRLNKSRQEDAALNGIVPLLQKIVKTERPLKEFALPILCDMAHSGKVGRRELWRNKGLAFYISLLSDPYWQVTALDAIFIWLQEETAKVEEHLLENRYDQPSFTDAIVRCLTLSKANAFENILEPLQKLLRLSPPIASTLARPDLFSRLGQKLHHSKAAVRLNLLRIISSICDSSEQQGGLLASYGLLDSIRELEHDPAILVRDMAGKLIQSSERNDSYGLCKLKPNVRRGSTSATSPGLLANQSAPVTPQLSRQNQSKGYYDSRETQRRPRSAISGSALALRPGSRDGPTPGIVGGANGSAGASRNRIARGVSNRLSHIELLPNDDDRIPSSITRRSSVLPRRRRLTQFEAERGS

SEQ ID NO: 1391 - protein, 86 aa, Zea mays
  misc_feature (35)..(35): Xaa can be any naturally occurring amino acid
  misc_feature (49)..(49): Xaa can be any naturally occurring amino acid
  misc_feature (51)..(51): Xaa can be any naturally occurring amino acid
MTSASELFSTRRSRPGRSDPALKSDTSSYRHHSHXHHHRRHGVHHHNQXHXSDGLRSSPGPTYPHPGGGGQRNTLIVRINDPGNLP

SEQ ID NO: 1392 - protein, 277 aa, Bacillus cereus G9241
MNLTSLKDYTTLHNGVKMPWFGLGVFKVEDGSEVIESVKAAIKNGYRSIDTAAIYQNEEGVGQAIRESGISREELFITSKVWNSDQGYETTLQAFETTLEKLGLEYLDLYLVHWPVKGKYTESWKALEKLYKDGRVRAIGVSNFHIHHLQDVFEIAEIKPMVNQVEYHPRLAQEELHAFCKEHNIQLEAWSPLMQGQLLDNPTLQDIATKYNKSTAQIILRWDLQNEVVTIPKSIKEHRIIENANIFDFELSADDMKAIQALNEDRRVGPDPDNFNF

SEQ ID NO: 1393 - protein, 436 aa, Acinetobacter sp. ADP1
MSFVAYIYSPVTKGSTCTMGYQKIVVPVDGDRIKVNADLSLNVPNHPIIPFIEGDGIGVDITPAMKAVVDAAIVKAYGGKRSIEWMEVYCGEKANTIYGSYMPEETFEALREFVISIKGPLTTPVGGGIRSLNVALRQELDLYVCVRPVRWFEGVPSPVQHPELTDMVIFRENSEDIYAGIEWKADSPEAKKVIQFLQEEMGVQKIRFPEHCGIGIKPVSKEGTQRLVRKAIQFAIDNDKPSVTLVHKGNIMKYTEGAFKEWGYELAIERFGGELIDGGPWVQIKNPKTGKDIVIKDVIADAFLQQILMRPADYSVIATLNLNGDYISDALAAEVGGIGIAPGANIGGAIAVYEATHGTAPKYAGQDKVNPGSIILSAEMMLRDMGWTEAADLIIKGISGAIEAKTVTYDFERLMPGATLLTCSEFGQAIIKHMDD

SEQ ID NO: 1394 - protein, 468 aa, Mesorhizobium loti MAFF303099
MRLSNLGTEQLREKDRSFVFHPSTHLAKHSRGETPNRIMAGAEGVYIWDTEGRKSLDGFGGLYCVNMGYGCTEIAEAIARQAHELPFAHVYASQGTEPVALLAEAVVEYFGQNMRRVFFGLSGSDANETNIKLVWYYNNILGRPEKKKIISRHRGYHGSGLVTGSLTGLAFFHNFFDLPLDLVRHTTTPHHYRQAHDGESEQAFSTRCADELEGLILAEGPETVAAFIGEPVLGTGGIVPPPKGYWTAIQGVLDKYDILLIADEVVCGFGRTGEQFGSHLYGMRPDFVTIAKGLSSAYLPISGSIIGDRVWSVLEQGTEKHGALGHGWTYSGHTLCAAAALANIRLLKERNILEHVRDVGPYWHARMNAELAGHPIVGEVRGVGILAAVELMRDPKQRIPFESDLQVGVRAAAALFENGVIGRAMPHGDILGFAPPLIITRKEIDIIVDATAKSVETTYRALKAEGAI

SEQ ID NO: 1395 - protein, 281 aa, Arabidopsis thaliana
MVLTHNVLAVTFGVLGNIISFIVFLAPVPTFVRICKKKSIEGFESLPYVSALFSAMLWIYYALQKDGAGFLLITINAVGCFIETIYIILFITYANKKARISTLKVLGLLNFLGFAAIILVCELLTKGSNREKVLGGICVGFSVCVFAAPLSIMRVVIRTKSVEFMPFSLSLFLTISAITWLFYGLAIKDFYVALPNILGAFLGAVQMILYVIFKYYKTPLVVDETEKPKTVSDHSINMVKLSSTPASGDLTVQPQTNPDVSHPIKTHGGDLEDQMDKKMPN

SEQ ID NO: 1396 - protein, 423 aa, Arabidopsis thaliana
MDRISGLPDELLLRVLSLLPNVKDVVVTMVLSKRWQFLWMMVPKLVYDDSYQNLEYGKFSRFVDRSLFMRKAPGIETLHFKLGQNCGNGDIQWWIRAASKFCFRELIIEINCSTSASPSILPRSLYTECRMLVTLKLKKAVLVDVSSPTCFPSLKNLSLVSVKYPGNEFVKSLLSSCHVLEDLVVEQCINDNVTIFSVKVPSLKSLVLRTSKERAPDGESGFVVEAPSLEYLDIDQTGGFCVIENGMPNLAEAYVSVLHHHPVKFLSSITSVKRLYLCLLPHSILSCMQDMYPIRCVFHRLVHITLCTCDDEWLNLLACLLKGSPKLISLKLEKVIFQFIQCLMYRLSQHHGHLICSPSPLRDDLSSVPECVLSSLETVEWVDYEGTEAERQLVEFILRNGSCLKKFVISPESVNPDKKYEMI

SEQ ID NO: 1397 - protein, 267 aa, Escherichia coli O157:H7 EDL933
MAIPAFGLGTFRLKDDVVISSVKTALELGYRAIDTAQIYDNEAAVGLAIAESGVPRHELYITTKIWIENLSKDKLIPSLKESLQKLRTDYVDLTLIHWPSPNDEVSVEEFMQALLEAKKEGLTREIGISNFTIPLMEKAIAAVGAENIATNQIELSPYLQNRKVVAWAKQHGIHITSYMTLAYGKALKDEVIARIAAKHNATPAQVILAWAMGEGYSVIPSSTKRENLESNLKAQNLQLDAEDKKAIAALDCNDRLVSPEGLAPEWD

SEQ ID NO: 1398 - protein, 395 aa, Arabidopsis thaliana
MALFLSPKTITLLFFSLSLALYCSIDPFHHCAISDFPNFVSHEVISPRPDEVPWERDSQNSLQKSKILFFNQIQGPESVAFDSLGRGPYTGVADGRVLFWDGEKWIDFAYTSSNRSEICDPKPSALSYLRNEHICGRPLGLRFDKRTGDLYIADAYMGLLKVGPEGGLATPLVTEAEGVPLGFTNDLDIADDGTVYFTDSSISYQRRNFLQLVFSGDNTGRVLKYDPVAKKAVVLVSNLQFPNGVSISRDGSFFVFCEGDIGSLRRYWLKGEKAGTTDVFAYLPGHPDNVRTNQKGEFWVALHCRRNYYSYLMARYPKLRMFILRLPITARTHYSFQIGLRPHGLVVKYSPEGKLMHVLEDSEGKVVRSVSEVEEKDGKLWMGSVLMNFVAVYDL

SEQ ID NO: 1399 - protein, 460 aa, Saccharomyces cerevisiae
MPINAITSDHVIINGANKPATIVYSTESGTILDVLEGSVVMEKTEITKYEIHTLENVSPCTILPGLVDSHVHLNEPGRTSWEGFETGTQAAISGGVTTVVDMPLNAIPPTTNVENFRIKLEAAEGQMWCDVGFWGGLVPHNLPDLIPLVKAGVRGFKGFLLDSGVEEFPPIGKEYIEEALKVLAEEDTMMMFHAELPKAHEDQQQPEQSHREYSSFLSSRPDSFEIDAINLILECLRARNGPVPPVHIVHLASMKAIPLIRKARASGLPVTTETCFHYLCIAAEQIPDGATYFKCCPPIRSESNRQGLWDALREGVIGSVVSDHSPCTPELKNLQKGDFFDSWGGIASVGLGLPLMFTQGCSLVDIVTWCCKNTSHQVGLSHQKGTIAPGYDADLVVFDTASKHKISNSSVYFKNKLTAYNGMTVKGTVLKTILRGQVVYTNANGVSKTPLGQTLLDSRR

SEQ ID NO: 1400 - protein, 245 aa, Zea mays
LQISTMFTHHQKIVVVDHELPNEGSQQRRIVSFVGGIDLCDGRYDTQYHSLFRTLDTVHHDDFHQPNFEGGSIKKGGPREPWHDIHSRLEGPIAWDVLYNFEQRWRKQGGKDLLVRLRDLSDIIIPPSPVMFPEDRDTWNVQLFRSIDGGAAFGFPETPDEAARAGLVSGKDQIIDRSIQDAYINAIRRAKNFIYIENQYFLGSSYDWKPEGIKPEDIDCLHLIPKELSLKIVSKIEAGERFTVY

SEQ ID NO: 1401 - protein, 308 aa, Triticum aestivum
MKTLLILTILAMATTIATANMQVDPSSRVQWPQERPFPQSQQPFSQQPQQIFPQPQQTFPHQPQQAFPQPQQTFPHRPQQQFPQPQQPQQPFPQPQQPQLPFPRQPQQPFPQPQQPQQPFPQSQQPQQPFPQPQQQFPQPQQPQQSFPQQQQLMIQSFLQQQMNPCKNFLLQQCNPMSLVSSLVSIILPRSDCQVMQQQCCQQLAQIPQQLQCAAIHSVAHSIIMQQEQQQGVQILRPLFQLAQGLGIIQPQQPAQLEGIRSLVLKTLPTMCNVYVPPDCSTINVPYASIDAGHWWPMKNARVMLIGR

SEQ ID NO: 1402 - protein, 498 aa, Yersinia pestis KIM
MSEYHEKNNALFKSITALDGALFINGEFRKGAGGRLPVENPATGKVIGHLAAATPEEIEEAVAAARRAFPAWAAERPKARANALHRLGDLIAGDALNMARNMTIEQGKPVNEAQGEILKLAEICHFYGEEATRVQGDVVPNDPPGFQSLVVREPVGVVGAITPWNYPAELVGWKLCASLAAGCTLIIKPAELTPYTALAIAEKCLEAGIPAGVVNVLTGKGEQVGQALVEHPQVDKIAFTGSSAVGLHIQQSCPQVKRLSLELGGNGPMVVTACADVAAAVKGAVRRSFRNCGQVCIAINRIYVHRSCYRAFVSKMGVATNGLRLGNGLDDPAADLGAMASVEPLNKTRAHLEDALAKGARLVAGGKAPEGVEYAKGHFFRPTVLADCTHQMRVMTEETFGPLVGLAPFDDIDEVISRANDTPYGLAAYVYARDLAAIHRLSAALDYGNVAINNVDASMMNAPYGGRKQSGVGYEHGREGLLEYFNFKHIRLYHGIGD

SEQ ID NO: 1403 - protein, 447 aa, Triticum aestivum
MAASVREGAAAAAAAGHAADDYDVSDGEMDVDVEAGSELQRAGDDRRDGDGDGDDEYALLTRITDTSAAEARAGKDIQGIPWERLQITRQDYRKARLEQYKNYENFPQSGELMDKLCKQVESSSKYYEFQYNTRIVKPSILHFQLRNLLWATSKHDVYFMSNSTVGHWSSLSHKMTDVLDFSGHVAPAKKHPGCALEGFTGVQVSTLAVNEGLLVAGGLQGELVCKSLGERDVKFCTRTTLSDNAITNAMDIHRSTSGSLRITVSNNDSGVREFDMERFQLLNHFRFNWPVNHTSVSPDKKLLAVVGDDRDALLVDSRNGKVTSTLVGHLDYSFASAWHPDGVTFATGNQDKTCRVWDIRNPSTSLAVLRGNIGAIRCIRYSSDGRFLLFSEPADFVHVYSAAECYRKRQEIDFFGEISGISLSPDDESLFVGVCDRVYASLLNYRM

SEQ ID NO: 1404 - protein, 196 aa, Sulfolobus tokodaii str. 7
MAHGPNYRVKYRRRREGKTNYYKRYTYVINNTTRLVVRLTNKYIIAQIAKFNPKGDVIVVAAHSMELAKKFGWKGDLNNTPAAYLTGYLLGVRALKAGIKEAVADIGLFVPVKGSRIFTAIKGAIDAGLSIPVGDLGIKEDRIKGVHIASYAQKLEAENPELFKRLFSKYLERGLHPKDLPSHFEEILNKIKSGGA

SEQ ID NO: 1405 - protein, 294 aa, Arabidopsis thaliana
MKRRKRGRGIVNADRISQLPEALIIQILSLLPTEVAVTTSVLSKQWQFLWKMLPKLNFDSLDQRHEFKTFSKNVKRALLSHKAPVLHSLHLIVHLHLCNSMNTAKLIGIAFACNLRKLVLEVDGGRFSIPESLYNCETLDTLELKYSILMDVPSSICLKSLRTLHLHYVDFKDNESALNLLSGCPNLENLVVHRYPFSSVKTYTIAVSSLKRLTIYTSSTVDPRAGYVINSPSLTYLKIVGQIGFCLIENVPELVEASMIVSSQIINKNLLESLTSVKRLFLEFSPLMVDFLAN

SEQ ID NO: 1406 - protein, 250 aa, Capsicum annuum
MGKCYPTVSEEYLKAVDKCKRKLRGLIAEKNCAPLMLRLAWHSAGTYDVCSKTGGPFGTMRFKTEQSHGANNGIDIALRLLEPLGEQFPIVSYADFYQLAGVVAVEVTGGPDVPFHPGREDKPEPPVEGRLPDATKGSDHLRDVFVKQMGLSDQDIVALSGGHTLGRCHKERSGFEGPWTANPLIFDNSYFKELLGGEKEGLLQLPSDKALLSDPAFRPLVEKYAADEDAFFADYAEAHLKLSELGFAEA

SEQ ID NO: 1407 - protein, 373 aa, Arabidopsis thaliana
MGYLFEETLSSNPKTPIVVDDDNELGLMAVRLANAAAFPMVLKASLELGVFDTLYAEASRTDSFLSPSEIASKLPTTPRNPGAPVLLDRMLRLLASYSMVKCEKVSVGKGERVYRAEPICRFFLKNNIQDIGSLASQVIVNFDSVFLNTWAQLKDVVLEGGDAFGRAHGGMKLFDYMGTDERFSKLFNQTGFTIAVVKKALEVYQGFKGVNVLVDVGGGVGNTLGVVTSKYPNIKGINFDLTCALAQAPSYPGVEHVAGDMFVDVPTGDAMILKRILHDWTDEDCVKILKNCWKSLPENGKVVVIELVIPDEAENGDINANIAFDMDMLMFTQCSGGKERSRAEFEALAAASCFTHCKFVCQAYHCWIIEFCK

SEQ ID NO: 1408 - protein, 208 aa, Brassica napus
MTEESPEEDHKSPEGAETNLGSSSLKNNNINNKEQDRFLPIANVGRIMKKVLPGNGKISKDAKETVQECVSEFISFVTGEASDKCQREKRKTINGDDIIWAITTLGFEDYVAPLKIYLGKYRETEGEKVNSPKQRHQQQQPQHNHHFQFQEQDHNNISCTSYISQHHPSPFLPADHQPFPNLPFSPKSLQNQFPQQNDNTDSMGQWSV

SEQ ID NO: 1409 - protein, 377 aa, Yersinia pestis KIM
MPAQNPLQHQRQHDGIYHIGYFVGGKWSQAQEQFDVYNPATGELVARVAKSGKQETEAAIKAASEAFPAWRKTPAKQRAEILQRWYLLIMEHQQSLAELMVSEQGKPLKEALVEVAYAASFIQWFSEQAKRANGEIIPSAKEGARILATREPIGVVAAITPWNFPLAMLTRKLGPALAAGCTGLIKPANNTPLSAFALLALAEQAGVPAGVLNGVVGDTHAISDAIMASSDVRKISFTGSTNVGKTLMRNAAATMKRISMELGGNAPYIVFDDADLEAAVAGAMACKFRNAGQVCVCVNRFYIQDAIYDEFVNRLAAEVKKLKVGNGMDKDVNMGPLINLAGLEKVEEHVKDALEKGGRLLAGGIAMRWAVISSSQR

SEQ ID NO: 1410 - protein, 426 aa, Thermus aquaticus
MILIRNVRLVDAMGERGPLDVLIGEGRILSLEGGEAKQVVDGTGCFLAPGFLDLHAHLREPGEEVKEDLFSGLLAAVRGGYTDLVSMPNTNPPVDTPEAVRALKEKAKALGLARLHPAAALTEKQEGKTLTPAGLLQEAGAVLLTDDGRTNEDAGVLAAGLLMAAPLGLPVAVHAEDAGLRRNGVMNDGPLADLLGLPGNPPEAEAARIARDLEVLRYALRRSPATPRLHVQHLSTKRGLELVREAKRAGLPVTAEATPHHLTLTEEALRTFDPLFKVAPPLRGEEDREALLEGLLDGTLDAIATDHAPHTQAEKEMDLLRAPFGIPSLEVAFPLLYTELHLKRGFPLRRLVELFTDGPRRVLGLPPLHLEEGTEASLVLLDPKERPVDPQGFASKARFSPWTGWRLGGWPVLTLVEGRIVHEALE

SEQ ID NO: 1411 - protein, 315 aa, Mycobacterium avium subsp. paratuberculosis str. k10
MGPRDVLVRMRACGICGSDAFYISIGGVPPRQGHTPLGHEPAGEVVEVGAEVTGLAVGDHVVINPMAAPSGIIGNGGASGALADYLLIENAVRGTSLEVIPDHIPWEVAALNEPMAVARHGVNRCQPRPTDKVVVFGAGPIGLGATLAFKSLGVQHIVVIDLIPGRLDKAVRIGADAVVNSAEEDVAARLVELHGSGESMFPGKAGTDIYLDAAGAPAVVSTALAAAKKGATLGIVGVHKEPVPVDLINVMSNEITIVGSMGYPDEIFEVTGDLVRNWEKYALIVSHTIPFDRVGEALELARTPGAADKVVVTFC

SEQ ID NO: 1412 - protein, 326 aa, Bartonella henselae subsp. arupensis
DGDKGILLYRGYPIEQLAEKGDFLESCYLLLYGELPTKQEKSDFDRCIMQHTMVHEQFARFFHGFRRDSHPMAVMVACLGAMSAFYHDSIDITDPQQRMIASVRLISKVPTLAAMAYKYSIGQAFVYPRNDLSYAANFLRMCFSVPCEEYKTNPVLTRAMDRIFILHADHEQNASTSTVRLAGSSGANPFACIAAGVACLWGPAHGGANEACLKMLQEIGSVKRIPEFIARAKDKNDPFRLMGFGHRVYKNYDPRAKIMQKTCHEVLKELNIQDDPLLDIAIELEKIALNDEYFVEKKLYPNVDFYSGITLKALGFPTEMFTVLFE

SEQ ID NO: 1413 - protein, 112 aa, Zea mays
MASALSFFTCLVLTVCIVASVDAAISCGTVTSNLAPCAVYLMKGGPVPAPCCAGVSKLNSMAKTTPDRQQACKCLKTAAKNVNPSLASSLPGKCGVSIPYPISMSTNCDTVK

SEQ ID NO: 1414 - protein, 367 aa, Lentinula edodes
MDDRTTAFIVGSSYQPLDIIGEGAYGVVCSAVHIQSQRKVAIKRITPFDHSMFCLRTLREIKLLRHFQHENIIGILDILKPNLGPDGSLDGMTEVYLVQELMETDLHRVIKTQELSDDHCQYFIYQTLRALKALHSADVLHRDLKPSNLLLNANCDLKLCDFGLARSASPLPDHPVDASTFMTEYVATRWYRAPEVMLTFKQYTKAIDKWSLGCVLAEMLSGKPLFPGRDYHHQLSLILDVLGTPTLDDFYAISSSRSREYIRALPFRKKKVFGKPVHEGGVKGFEGKNPLAIDLMEKCLSFNPKRRIDVEGALAHPYLAPYHDPSDEPGAERIDSEFWSFDTFNNGKGLSKEELKVLIYEEVMRGA

SEQ ID NO: 1415 - protein, 246 aa, Triticum aestivum
KAATLRRAATYEAGTAAPKGAPYPGTTESPELRWALIRKVYVVLCLQLLLTAVVAVVFVKVRSIPHFFASSYVGLGLYIFILIFPFIVMCPLHFYRQKHPVNLLLLGVFTVAISFSVGLTCAFTSGKVILEAGILTIVVVLSLTAYTFWAARRGKDFSFLGPFLFACLMILLVFGFIQIFFPLGKLSHMIYGALAALIFIGYIVYDTGNIIKRYKYDEYVWAAVTLYLDIINLFLGLMTLFRAGDS

SEQ ID NO: 1416 - protein, 342 aa, Corynebacterium diphtheriae NCTC 13129
MRIATLTSGGDCPGLNAVIRGIVRTCSEYGSTVVGYQDGWVGLMEDKRIQLYDDENIDRILLRGGTILGTGRLHPDKFKSGLDQIKANLEDAGIDALIPIGGEGTLKGAKWLSDNGIPVVGVPKTIDNDVNGTDYTFGFDTAVSVATDAIDRLHTTAESHNRVMIVEVMGRHVGWIALHAGMAGGAHYTVIPEQPFDIAEICKAMERRFQMGEKYGIIVVAEGALPKEGTMDFVEGGVDQFGHQTFNGIGQVIGEEIKKRLGHDVRTTVLGHIQRGGTPTSYDRVLATRYGVHAARACHNGDYGKMVALHGEHIDLIPLEDAVDTLKTVPEGRYRTARALFG

SEQ ID NO: 1417 - protein, 118 aa, Glycine max
MAISMISSRADTTVNRAGAGMVATFTGLKFMAGLPTRKTNNDITSIASNGGRVQCMQVWPPIVKNKFETLSYLPDLDDSQLAKEVEYLIMKRWIPCLEFELEHGFEYREHNRSPGYYD

SEQ ID NO: 1418 - protein, 450 aa, Xanthomonas axonopodis pv. citri str. 306
MPDHLPSDAADALQAPTQLDAFWMPFTANRQFKARPRLLASAQGMYYRDVQGRQILDGTAGLWCCNAGHSRERIVAAIRDQAGTLDFAPTFQMGSPLPFVLAQRLAAIAPPGLGHVFFTNSGSEAVDSAMKIVLAYHRLRGEGQRTRFIGREKAYHGVGFGGMSIGGLPNNRKWFGPLLAGTDHLPHTLDLQHNAYARGLPVHGAELADDLERLITLHDASTIAAVFVEPVSGSAGVILPPEGYLQRLRAICDRHGIVLVFDEVITGFGRVGDAFAAQRFGVIPDIITAAKGLTSGTVPMGAVLVADAIHDAFMHGPQNAIELFHGYTYSGHPLACAAAIATLDTYAEEELFTRAITLGPQWEDALHGLRGSPHVIDIRNIGLIGAIELAPRDGAPGARGYDVFERCFHEGGLLVRVTGDVIALSPPLIVTPEQIGQMVETLGKILRQVD

SEQ ID NO: 1419 - protein, 353 aa, Burkholderia cepacia R18194
MTAVVCHGPEDYRVEQVAKPRPGANELVIRIAACGICASDCKCYTGAKMFWGGPSPWVKAPVIPGHEFFGYVEALGDGAAEHFGVAVGDRVIAEQIVPCGKCRYCKSGQYWMCEVHNIFGFQREVADGGMAEYMRIPPTAIVHRIPLGVSLEDAAIIEPLSCAIHTVNRGDVQLDDVVVIAGAGPLGLMMTQVAHLKTPKKLVVIDLIDERLELAREYGADVTINPKRDDAREIVRSLTDGYGCDVYIETTGAPVGVSQGLDLIRKLGRFVEFSVFGEDATVDWSIIGDRKELDVRGAHLGPYCYPIAIDLLARGLVTSKGIVTHDFALEDWDDAIRVAKSPESIKVLLKPAR

SEQ ID NO: 1420 - protein, 458 aa, Aspergillus nidulans FGSC A4
MPFHADIPQFQPTNDDIERTQAEKKHKETPTMAVDEQKAESVPYRQDVFGDEEHAEVKYKVLKWWQCGLLMVAETISLGILSIPAAIAGLGLVPAIVILLVMGLIASYTGYVIGQFKWRYPHVVSMADAGEVLMGRFGREVLFGGQMLFLIFLMASHILTFTVAMNRLTNHGTCSLVFGVIGLLVSLVFSLPRTMKNMSWLSLASFISIFTAVMIAMVAIGVEHPGGPVKATAETNLVTGFTAALNIILSYASHNAFFNVIAELKEPRDFPKALTLLQCIDITLYLVSGVVIYYFAGDDVKSPALGSINPLVSKVAYGVALPTIIIAGVINGHIACKSIYTRVFAGTSHMHKQDFRAVGSWIGIAVGLWVIAWVVATAIPVFSNLLSLMTALFASWFSFSLPAAFWLFMNRGLWFSSPRKTGITIFNCLVFGMGVVMSLGTILLACICVSSGNGKSSS

SEQ ID NO: 1421 - protein, 170 aa, Fusarium oxysporum f. sp. lycopersici
MSESTSTQKVWLASNDSATIEVDRVVAERSMLIKNMLEDIGDEGINAENPIPIPNVNEAVLRKVIEWCDHHRNDPLQAQDDDSDARKKTTDIEEWDQKFMQVDQEMLFEIILASNYLDIKPLLDVGCKTVANMIKGKSPEEIRKTFNITNDFTPEEEEQIRRENEWAEDR

SEQ ID NO: 1422 - protein, 339 aa, Escherichia coli K12
MKSILIEKPNQLAIVEREIPTPSAGEVRVKVKLAGICGSDSHIYRGHNPFAKYPRVIGHEFFGVIDAVGEGVESARVGERVAVDPVVSCGHCYPCSIGKPNVCTTLAVLGVHADGGFSEYAVVPAKNAWKIPEAVADQYAVMIEPFTIAANVTGHGQPTENDTVLVYGAGPIGLTIVQVLKGVYNVKNVIVADRIDERLEKAKESGADWAINNSQTPLGEIFTEKGIKPTLIIDAACHPSILKEAVTLASPAARIVLMGFSSEPSEVIQQGITGKELSIFSSRLNANKFPIVIDWLSKGLIKPEKLITHTFDFQHVADAISLFEQDQKHCCKVLLTFSE

SEQ ID NO: 1423 - protein, 154 aa, Triticum aestivum
  misc_feature (127)..(127): Xaa can be any naturally occurring amino acid
  misc_feature (140)..(140): Xaa can be any naturally occurring amino acid
MAPTVMASSATSVAPFQGLKSTAGLPVSRRSNGASLGSVSNGGRIRCMQVWPIEGIKKFETLSYLPPLSTEALLKQVDYLIRSKWVPCLEFSKVGFIFREHNASPGYYDGRYWTMWKLPMFGCTDAXQVINEVEESRRSXPDAYVRSSDHNVGW

SEQ ID NO: 1424 - protein, 421 aa, Bacillus halodurans C-125
MDSIALMDNVWIMLCAVLVLLMQGGFILLEAGSTRMKNAGHIAGKTIFTVGIASLVYWAVGWGFTYGEGNAFIGLSDFFFGDYSTAEEGLVGSVDFFFQLMFAAIALTIAFGGFAERAKLSVYILFAVLFSAFVYPIVAHWIWGDGWLADLGKQDFAGSTVVHLTGAMGALAATILLKPRLGKYNKDGSMNDIQGHNQVYTALGVLLLWVGWFGFNAGSTLEVADAFFGYVALNTQLAAAAGAVAAMFIAWALSGKADVPTTLNGALAGLVAITASCAFVAPWAAVVIGIVGGLIVYFSMKFFDKAKIDDPIFALSVHGVAGVWGTLSTGFFATPELAEMNGGQAGLFYGGGFAQLGVQTLSVVACGVFAFIASYVLLLVCKSVLGGLRVTEEEEIIGLDLSEHGSYGYPESMPGSEKSGA

SEQ ID NO: 1425 - protein, 459 aa, Rhodobacter sphaeroides 2.4.1
MEGLAQANDLSEVIEADRAHMWHHLSQHKQYETVDPRIIVEGKGMRVWDAAGKEHLDAVSGGVWTVNVGYGRESIANAVRDQLIKMNYFAHSAGSIPASRFSKRLIEKMPGLSRVYYSNSGSEANEKVFKMVRQISHRHHGGKKGKILFRERDYHGTTITALATSGQPQRAEQYGPLTPGFVMVPHCLEYRKQWDVENYGERAADAIEEVILREGPDTIGALCLEPVTAGGGVIVPPAGYWERVQEICRKYDILLHIDEVVCGLGRTGTWFGYQNFGVKPDFVTMAKGVASGYAAISCTVTTEAVFDMFKDDPSDPMSYFRDISTFGGCTAGPVAALENMRIIEDEGLLENTLKMGARVVENLSALQEKHAVIGDVRGKGLFCGAELVADRATKEPMDEKRVAAVVADVMAQGVIIGMTNRSLPGFNNTLCLSPALIATPDDIDQITDAIDRALTRVFG

SEQ ID NO: 1426 - protein, 163 aa, Saccharomyces cerevisiae
MSEFYKLAPVDKKGQPFPFDQLKGKVVLIVNVASKCGFTPQYKELEALYKRYKDEGFTIIGFPCNQFGHQEPGSDEEIAQFCQLNYGVTFPIMKKIDVNGGNEDPVYKFLKSQKSGMLGLRGIKWNFEKFLVDKKGKVYERYSSLTKPSSLSETIEELLKEVE

SEQ ID NO: 1427 - protein, 213 aa, Triticum aestivum
  misc_feature (210)..(210): Xaa can be any naturally occurring amino acid
MSPSAVEGNGVVDVKTTLKPNVGVYTNPNHDLWVAPAEPSAEAVKSGSDLKQGEVSVAIRSTGICGSDVHFWHAGCIGPMIVEGDHILGHESAGEVIAVHPSVSHLKVGDRVAVEPNIPCGTCEPCLTGRYNGCETVQFLSTPPVPGMLRRYINHPAVWCHKIGNMSYENGALLEPLSVALAGMQRAEVRLGDPVLICGAGPIGLITLQXCAA

SEQ ID NO: 1428 - protein, 158 aa, Salmonella typhimurium LT2
MKLISNDLRDGDKLPHRHVFNGMGYDGDNISPHLAWDNVPMGTKSFVVTCYDPDAPTGSGWWHWVVVNLPADTRVLTQGFGSGLVAVPDGVIQTRTDFGKAGYGGAAPPKGETHRYIFTVHALDVERLDVDEDASGAMVGFNVHFHSLASASITAMFS

SEQ ID NO: 1429 - protein, 389 aa, Escherichia coli
  misc_feature (185)..(195): Xaa can be any naturally occurring amino acid
TLQNGKLNVPENPIIPYIEGDGIGVDVTPAMLKVVDAAVEKAYKGERKISWMEIYTGEKSTQVYGQDVWLPAETLDLIREYRVAIKGPLTTPVGGGIRSLNVALRQELDLYICLRPVRYYQGTPSPVKHPELTDMVIFRENSEDIYAGIEWKADSADAEKVIKFLREEMGVKKIRFPEHCGIGIXXXXXXXXXXXVRAAIEYAIANDRDSVTLVHKGNIMKFTKGAFKDWGYQLAREEFGGELIDGGPWLKVKNPNTGKEIVIKDVIADAFLQQILLRPAEYDVIACMNLNGDYISDALAAQVGGIGIAPGANIGDECALFEATHGTAPKYAGQDKVNPGSIILSAEMMLRHMGWTEAADLIVKGMEGAINAKTVTYDFERLMEGAKLL

SEQ ID NO: 1430 - protein, 363 aa, Oryza sativa (japonica cultivar-group)
MMYKHVGDDARGSSAGVVCCVDVVDDDVDALLCGEDAGELEREGEPAQGSSPSSSLSCAAAAAAAADDDDEDEDEHGVHGEVVQVTPGGEEHCYDYDYDVDVPVGAELVMPACSPPRTAVHRPGWSESVSWILKVRSVHGFQPATAYLAVSYMDRFMSSRSLPDHGWASQLLCVACLSLAAKMEESSAPPLLDLQIEGTRFIFEPRTIQRMELIVLVELDWRLRSVTPFAFVDFFACKVGSSGRSSRILALRACQIILSAIHELEFLNHCASSMAAAAVLFAVNESPAAMSHRSSVSSESAASWCIGLTEERISSCYQLLQRALNATARKRKRHPMILAACSSVTSSSSRSKRRKLDGHFGED

SEQ ID NO: 1431 - protein, 345 aa, Streptomyces argillaceus
MTNTPAAAPSPADAREILQLNVAYTRARVLHTAMELGLFEYLSAGPRTEAEIREHGRLHSHLVRDWLDALVGLGLLTADGGTYANTPRAEHFLVPGHPHYIGGAVLQHGRVHYELWNRFADALRDGKATSGKDITAGAVVEEQPDLDRARRFLDHMDTFNQFVVAELSKALDWSRWKTFVDVGGARGNVAAQLVLDHPDLKGSVFDVPGVEPLFDEHMAARGTTGRVDFVGGDFFTDALPAADVVLFGHVLHDHPEESRKRLLGQAFRALPPGGTLLVYDAMLDDRSEAGAYLQSLVCSVILDGGSEYRVRDITAWAEETGFTVEQVVPLDTMTHDRLFVARKPG

SEQ ID NO: 1432 - protein, 389 aa, Escherichia coli
  misc_feature (180)..(180): Xaa can be any naturally occurring amino acid
  misc_feature (185)..(201): Xaa can be any naturally occurring amino acid
TLQNGKLNVPENPIIPYIEGDGIGVDVTPAMLKVVDAAVEKAYKGERKISWMEIYTGEKSTQVYGQDVWLPAETLDLIREYRVAIKGPLTTPVGGGIRSLNVALRQELDLYICLRPVRYYQGTPSPVKHPELTDMVIFRENSEDIYAGIEWKADSADAEKVIKFLREEMGVKKIRFPEHXGIGIXXXXXXXXXXXXXXXXXYAIANDRDSVTLVPKGNIMKFTEGAFKDWGYQLAREEFGGELIDGGPWLKVKNPNTGKEIVIKDVIADAFLQQILLRPAEYDVIACMNLNGDYISDALAAQVGGIGIAPGANIGDECALFEATHGTAPKYAGQDKVNPGSIILSAEMMLRHMGWTEAADLIVKGMEGAINAKTVTYDFERLMEGAKLL

SEQ ID NO: 1433 - protein, 258 aa, Arabidopsis thaliana
MFLKVHEIAFLFGLLGNIVSFGVFLSPVPTFYGIYKKKSSKGFQSIPYICALASATLLLYYGIMKTHAYLIISINTFGCFIEISYLFLYILYAPREAKISTLKLIVICNIGGLGLLILLVNLLVPKQHRVSTVGWVCAAYSLAVFASPLSVMRKVIKTKSVEYMPFLLSLSLTLNAVMWFFYGLLIKDKFIAMPNILGFLFGVAQMILYMMYQGSTKTDLPTENQLANKTDVNEVPIVAVELPDVGSDNVEGSVRPMK

SEQ ID NO: 1434 - protein, 511 aa, Aspergillus nidulans FGSC A4
MADLFVDLVAPNGTHYSQPTGLFINNAFVASSGQTITSLDPATDKPIATVHAASAEDVDRAVIAARAALVHPSWKKLPGTERGQLMARLADLMEKNKELFATIDAWDNVLSLTEKSGKPYHIALSEDLVEAIGTIRYYSGWADKTFGQTISTTPAKFAYTIRQPVGVVGQIIPWNYPLSMACWKLGPALACGNTVVLKPAEQTPLSVLVLGSLIKEAGFPPGVVNIVNGYGREAGAALAGHPLIDKIAFTGSTVTAREIMKLAAGTLKNITLETGGKSPLLVFPDADLEQAVKWSHFGIMSNQGQICTATSRIYVHQDIFQLFLSKFKAAVETTSKIGDQWDESTFQGPQITRAQYDRILSYIETAKKGGMAVVTGGSAHAPSSEKNKDGYFIQPTVFTGTDDSHAIVREEVFGPVVVILPFASEEEAIRRANDTTYGLGAAVFTCDLERAHRVAAEIEAGMVWVNSSQDCDPRVPFGGVKQSGIGRELGEAGLEAYTQVKAVHVNMGNKL

SEQ ID NO: 1435 - protein, 160 aa, Glycine max
AMSIDPKWKMIRPDLGRIEKWVLRNAFDDDKNPYLPKHILYRQKEQFSDGVGYSWIDGLKDHANKQVTDATMMAANFIYPENTPTTKEGYLYRTIFEKFFPKNSAKATVPGGPSVACSTAKAVEWDASWSKNLDPSGRAALGVHAAAYDGAVDTTKNGPL

SEQ ID NO: 1436 - protein, 366 aa, Cryptococcus neoformans var. neoformans
MTIDQSQINFNVPSTYKLEEIVGEGAYGLVVAGTHLPSGTQVAIKRITPFDHTMFCQRTLREIKLLRHFHHENIISILDLIQPESYEVFNEVYLVQELMETDLHRVIRSQELSDDHCQYFVYQTLRGLKALHSADVLHRDLKPSNLLLNANCDLKICDFGLARSSAKPPPGTSDGGQGFMTEYVATRWYRAPEVMLSFQEYTKAIDLWSVGCILAEMINGKPLFPGRDYHHQLSLILQVLGTPTMDDFNEITSQRSKDYLRALEFTRRQDFSAICPKAKPAAVDLLKQTLTFSPSKRITVEEALMHSYVEAYHDPHDEPNAEPLKPGFFDFEFHQEKLSRDQWKRMIYDEVQDPVPTILSQWTESH

SEQ ID NO: 1437 - protein, 389 aa, Escherichia coli
TLQNGKLNVPENPIIPYIEGDGIGVDVTPAMLKVVDAAVEKAYKGERKISWMEIYTGEKSTQVYGQDVWLPAETLDLIREYRVAIKGPLTTPVGGGIRSLNVALRQELDLYICLRPVRYYQGTPSPVKHPELTDMVIFRENSEDIYAGIEWKADSADAEKVIKFLREEMGVKKIRFPEHCGIGIKPCSEEGTKRLVRAAIEYPIANDRDSVTLVHKGNIMKFTEGAFKDWGYQLAREEFGGELIDGGPWLKVKNPNTGKEIVIKDVIADAFLQQILLRPAEYDVIACMNLNGDYISDALAAQVGGIGIAPGANIGDECALFEATHGTAPKYAGQDKVNPGSIILSAEMMLRHMGWTEAADLIVKGMEGAINAKTVTYDFERLMEGAKLL

SEQ ID NO: 1438 - protein, 144 aa, Brassica napus
MKKIISLVRNVHSRQCQPKLNWSAQVRFLQQDTVSKPKPNKYKYPSFYDPYGPRPQPSSKIVELAERIAALSPEERKQIGPALNEHLRLPKQQMISTQGMMSVGAKQEAGAGKVGDCCEEPCDQRSESVFDTAAKIKVIKEVRA

SEQ ID NO: 1439 - protein, 161 aa, Bacillus cereus ATCC 10987
MTVYDFSAKTITGEEKSLKDYEGKALLIVNVASKCGFTPQYKGLQEVYDKYKEQGLEILGFPCNQFGGQEPGTEADITSFCELNYGVNFPMFAKIDVKGDKAHPLYTYMTEQAPGLLGMKAVKWNFTKFLIGKDGKVVGRFAPQTKPVDLEVEIEKVLGNN

SEQ ID NO: 1440 - protein, 294 aa, Saccharomyces cerevisiae
MKTLVHVASVEKGRSYEDFQKVYNAIALKLREDDEYDNYIGYGPVLVRLAWHISGTWDKHDNTGGSYGGTYRFKKEFNDPSNAGLQNGFKFLEPIHKEFPWISSGDLFSLGGVTAVQEMQGPKIPWRCGRVDTPEDTTPDNGRLPDADKDAGYVRTFFQRLNMNDREVVALMGAHALGKTHLKNSGYEGPGGAANNVFTNEFYLNLLNEDWKLEKNDANNEQWDSKSGYMMLPTDYSLIQDPKYLSIVKEYANDQDKFFKDFSKAFEKLLEDGITFPKDAPSPFIFKTLEEQGL

SEQ ID NO: 1441 - protein, 288 aa, Escherichia coli CFT073
MAEKKQWHETLHDQFGQYFAVDNVLYHEKTDHQDLIIFENAAFGRVMALDGVVQTTERDEFIYHEMMTHVPLLAHGHAKHVLIIGGGDGAMLREVTRHKNVESITMVEIDAGVVSFCRQYLPNHNAGSYDDPRFKLVIDDGVNFVNQTSQTFDVIISDCTDPIGPGESLFTSAFYEGCKRCLNPGGIFVAQNGVCFLQQEEAIDSHRKLSHYFSDVGFYQAAIPTYYGGIMTFAWATDNDALRHLSTEIIQARFLASGLKCRYYNPAVHTAAFALPQYLQDALASQPS

SEQ ID NO: 1442 - protein, 453 aa, Zea mays
  misc_feature (179)..(179): Xaa can be any naturally occurring amino acid
  misc_feature (212)..(212): Xaa can be any naturally occurring amino acid
  misc_feature (291)..(291): Xaa can be any naturally occurring amino acid
  misc_feature (364)..(364): Xaa can be any naturally occurring amino acid
MWNGYVNNDDRALLKVIKYSSPTSAGAECVDLDCSWVEQWVHRAGPRKEIYYEPEEVKAAIVTCGGLCPGLNDVIRQIVFTLETYGVKNIVGIPFGYRGFFEKGLKEMPLSRGLVENINLNGGSFLGVSRGGAKTSEIVDSIQARRIDMLFVLGGNGTHARDHYLEHPNRKSIYIPHNXCRKRKLKVSVVAVPKTIDNDILLMDKTFGFDTXVEEAQRAINSAYIEARSAYHGIGLVKLMGRSSGFIAMHASLSSGQVDVCLIPELLLCLKLPYVFLSHVSTNRSLQVTIXMKVPFTLDGEFGVLRQLEHLLKSKGFCVVCVAEAAGQDLLQESGATDASGNVILSDIGVHMQQKIKMHFKDIXVPADVKYIDPTYMVRACRANASDAILCTVLGQNAVHGAFAGFSGITSCICNTHYVYLPITEVITAPKRVNPNSRMWHRCLTSTGQPDFH

SEQ ID NO: 1443 - protein, 492 aa, Triticum aestivum
MDQPPDGFAAGGLFVQHIDGQKASPPAVIVRRGGISGIASARALSNASFKVTLLESRERLGGRVHTDYSFGCPIDMGASWLHGVCNENSLAPLIRLLGLRLYRTSGDNSVLYDHDLESYALFDKDGRQIPQEIVTKVGEIFEQILKETVKVRDEYANDMPLVQAISMVLDRNPHLKLEGLQYEVLQWCICRLEAWFATDVDNISLKNWDQEHVLTGGHGLMVNGYDPVIKALSRDLDVHLNHRVTKIIQRYNKVIVCVEDGTSFVADAAIITVPLGVLKANIIKFEPELPDWKLSAISDLGVGLENKIALRFNTIFWPNVEVLGRVAQTSNACGYFLNLHKATGHPVLVCMVAGRFAYEMEKLSDEESVNFVMSQLRRMLPGATEPVQYLVSRWGTDPNSLGSYSCDLVGKPADLYERFCARVGNLFFAGEAACIDHSGSVHGAYSSGIDAAEDCRRRLSTQLGISDLFQVGKIVMREEMTEVMVPLQISRL

SEQ ID NO: 1444 - protein, 135 aa, Methanocaldococcus jannaschii
VIIMPGTKQVNVGSLKVGQYVMIDGVPCEIVDISVSKPGKHGGAKARVVGIGIFEKVKKEFVAPTSSKVEVPIIDRRKGQVLAIMGDMVQIMDLQTYETLELPIPEGIEGLEPGGEVEYIEAVGQYKITRVIGGK

SEQ ID NO: 1445 - protein, 341 aa, Aspergillus niger
MKVDTPDSASTISMTNTITITVEQDGIYEINGARQEPVVNLNMVTGASKLRKQLRETNELLVCPGVYDGLSARIAINLGFKGMYMTGAGTTASRLGMADLGLAHIYDMKTNAEMIANLDPYGPPLIADMDTGYGGPLMVARSVQQYIQAGVAGFHIEDQIQNKRCGHLAGKRVVTMDEYLTRIRAAKLTKDRLRSDIVLIARTDALQQHGYDECIRRLKAARDLGADVGLLEGFTSKEMARRCVQDLAPWPLLLNMVENGAGPVISVDEAREMGFRIMIFSFACITPAYMGITAALERLKKDGVVGLPEGMGPKKLFEVCGLMDSVRVDTEAGGDGFANGV

SEQ ID NO: 1446 - protein, 161 aa, Lactobacillus plantarum WCFS1
MAESVYDFTETEMSGAPLDLSQYRGQVLLIVNTASNCGLAPQFKGLEELYQKYQQEGLVVLGLPSNQFHQEKADDDETHDYCQRHYGVTFPMTKRVMVNGDDADPLFTYLKQAAGHGRIKWNFTKFLIGRDGRVLERYAPTTRPATFEAAIRDALADRSED

SEQ ID NO: 1447 - protein, 276 aa, Lactobacillus plantarum WCFS1
METYTLRDGLTVPKIGFGTYKLNGAHGVQVIDSAIDRGYRLLDTAFNYENEGAVGKAVRRSSVPRSELLISSKLPGRHHTYTEAINTIQESLYRAGLDYYDLYLIHWPNPKEDHYVEAWQALINAQKLGLIRSIGVSNFLPEHLERLNKETGVLPVINQVELHPYFNQQAQRDYDQAHGILTQDWSPLGRASEMLQNETLKEIAVHYHKNVGQLILRWELQLGTLPIPKSSTPSRQAGNMDVFDFEISAADMATINGLSQVDGRLNNQDPAVYQEF

SEQ ID NO: 1448 - protein, 250 aa, Saccharomyces cerevisiae
MSQEEKVDAKATLKTEISNNKKNDKQELELDELVGKLSIEGTPQVSQKLSKEEKHAHQLEADSRSIFVGNITPDVTPEQIEDHFKDCGQIKRITLLYDRNTGTPKGYGYIEFESPAYREKALQLNGGELKGKKIAVSRKRTNIPGFNRHYNSQNQYFQQWQWNYPLMAYPNPDTFPYYPPYPPNQSPNQNFGYNKNNYYRSPYNNKNRTFQKKHFNSAKDSTKNIRSTSQKPVVMPSDNVKSSTQEKDSK

SEQ ID NO: 1449 - protein, 510 aa, Glycine max
MGSDNHQNLEFLKEIGLGSSNIGSYINGQWKATGSSVTSVNPSNNQSIAQVTEATLQDFEEGLRACSEAAKTWMTIPAPKRGEIVRQIGEALRAKLDPLGRLVSLEMGKILPEGIGEVQEIIDMCNYGVGLSRQLNGSIIPSERPDHMMFEVWNPLGIVGVISAFNFPCAVLGWNACIALVCGNCVVWKGAPTTPLITIAVTKLVAEVLERNKLPGAIFTSFCGGADIGQAIAKDTRIPLVSFTGSSKVGLMVQQTVNERFGKCLLELSGNNAIIVMDDADSNWLYVYFGCCCGSTGQPVYTWPCRRLFLHESIYTDVLDQLVEVYKQVKTGNPLEKGTLVGPLHTRTSVENFQKGISVIKSQGGKILTGGSVLESGGNFVQPTIVEISPDAPVVKEELFGPVLYVMKFQTLDEAIALNNSVPQGLSSSIFTQRPGTIFKWIGPRGSDCGIVNANIPTNGAEIGGAFGGEKATGGGREAGSDSWKQYMRRSTCTINYGSELPLAQGINFG

SEQ ID NO: 1450 - protein, 235 aa, Sandersonia aurantiaca
MSGYLPFDEPNILALYKKIWKANFSFPSWFSSGAKKLIKRILDPNPHTRITIPEILEDEWFKKGYMPPHFQQGEEVNLDDIDAVFNDSKEHLVTEKKEKPESMNAFALISRSQVFDLGNLFEKQRGLIKRETRFTSQCPPNEILSKIEETAKPLGFNVRKHNYKMNLQGDKTGRKGHLSVATEVFEVAPSLHMVELRKTGGDTLEFHKFYKNFSSGLKDIVWKAEALPEQEETRS

SEQ ID NO: 1451 - protein, 231 aa, Rubrobacter xylanophilus DSM 9941
MSPDGMERLKRAAAREAVDRYVESGMVVGLGTGTTASWAVRRIGERLLEGSLSGVRGVPTSEYTAALARECGVPLVSLSERRPELTIDGADEIAPDLSVIKGRGGALLREKIVAAASRRGVVIVADGSKQVSLLGNGPLPVEVEPFGWEATAEALAALGCEPELRRVKTQPFVTDGGHYTLDCRFPGIPDPPGLACKIKRVPGALECGLFVGLARAAVIARPEGVEVLEAA

SEQ ID NO: 1452 - protein, 207 aa, Zea mays
  misc_feature (49)..(49): Xaa can be any naturally occurring amino acid
  misc_feature (81)..(81): Xaa can be any naturally occurring amino acid
  misc_feature (94)..(94): Xaa can be any naturally occurring amino acid
  misc_feature (112)..(112): Xaa can be any naturally occurring amino acid
  misc_feature (127)..(127): Xaa can be any naturally occurring amino acid
  misc_feature (144)..(144): Xaa can be any naturally occurring amino acid
  misc_feature (160)..(160): Xaa can be any naturally occurring amino acid
  misc_feature (169)..(169): Xaa can be any naturally occurring amino acid
ARADEEWPRIGRNMVAPLLVLNLIMYIIVIGFASWNLNHFINGQTNYPXAWRGNGATFYFLVFAILGPAWWGAASKLAGVXHVRAWRHDSLATXTPASSLIAWAITALAFGXLACKEIHIGGHRGWXRLRRAGGPFVIILAFTXLLYVLMLHTGPSSAGXGGYRDHDYXGVGGAAGEPKGVTQGLEDSDRCSSYMCHHIRRCWSVMT

SEQ ID NO: 1453 - protein, 378 aa, Mycobacterium leprae TN
MARDYYGLLGVSRNASDADIKRAYRKLARELHPDINPDEAAQAKFKEISMAYEVLSDPEKRRIVDLGGDPMENAAASPSGFGGFGGLGDVFEAFFGGSSASRGPIGRVRPGSDSLLPMWLDLEECATGVTKQVTVDTAVLCDRCQGKGTNGDSAPIPCDTCGGRGEVQTVQRSLLGQMVTARPCPTCRGVGVVIPDPCCQCVGDGRVRARREITVKIPSGVGDGMRVRLAAQGEVGPGGGPAGDLYVEVHEQAHDIFVRDGDDLHCTVSVPMVDAALGTTITVDAILDGMSEIDISPGTQPGSVIELRGQGMPHLRSNTRGNLHVHVEVMVPTRLDQHDTELLRELKRRRSRDVAEVRSTHAAGGGLFSRLRETFTNR

SEQ ID NO: 1454 - protein, 359 aa, Triticum aestivum
TAARGVRERKVRDMVGYFRCHAGEEVDVGQAVYGGVLNLVSSAFFSVDVVDVGSESASGLREVLEDIIAALAKPNVSDIFPFLRPLDLQGWRRWAGARYQKVFGILDGIVDRRLADARTSTTGHAHGNFLDSLLELVSAGKIGRDKVTVILFDVFAAGTDMMAITVEWAMAELLRHPHAMAKVHAEMEDILGGKDTDTLEEPDAANLPYLQAVVKEVMRLHPVAPIMLPHQAAEDGVEIGGFAVPRGATVIFNVWAIMRDSAAWERPDEFVPERFLDKSAAVEFRGKDYEFIPFGSGRRLCPGLPMAERVVPFVLASLLHAFEWRLPGGVAADELDVAERFTTVNTLAVPLRAVPVVVT

SEQ ID NO: 1455 - protein, 389 aa, Escherichia coli
TLQNGKLNVPENPIIPYIEGDGIGVDVTPAMLKVVDAAVEKAYKGERKISWMEIYTGEKSTQVYGQDVWLPAETLDLIREYRVAIKGPLTTPVGGGIRSLNVALRQELDLYICLRPVRYYQGTPSPVKHPELTDMVIFRENSEDIYAGIEWKADSADAEKVIKFLREEMGVKKIRFPEHCGIGIKPCSEEGTKRLVRAAIEYAIANDRDSVTLVHKGNIMKFTEGAFKDWGYQLAREEFGGELIDGGPWLKVKNPNTGKEIVIKDVIADAFLQQILLRPAEYDVIACMNLNGDYISDALAAQVGGIGIAPGANIGDECALFEATHGTAPKYAGQDKVNPGSIILSAEMMLRHMGWTEAADLIVKGMEGAINAKTVTYDFERLMKGAKLL

SEQ ID NO: 1456 - protein, 384 aa, Mycobacterium avium subsp. paratuberculosis str. k10
MSNTMSKTTSPITANLGDTKRPVVAGAERHPGWHALRKLAARITTPLLPDDYLHLANPLWSARELRGRVVDVRRETEDSATLVIKPGWGFNFDYQPGQYIGIGLLIDGRWRWRSYSLTSSPATSASARTVTITVKAMPEGFLSSHLVAGVEPGTVVRLAAPQGNFVLPDPAPASILFLTAGSGITPVMSMLRTLVRRNQIGDIVHLHSAPTEADVMFRGELAALANEHPGYRLQLRETRTRGRLDLSLLDREVPDWRERQTWACGPEGMLNAAERVWSAAGIGEQLHLERFAVSKAAPAGAGGMVTFARSGRSVDADAATSLMDAGEAAGVQMPFGCRMGICQSCVVGLVEGHVRDLRTGAEHEPGTRVQTCVSAASGDCVLDI

SEQ ID NO: 1457 - protein, 257 aa, Triticum aestivum
PRFRIWESFLELSAPSNLMPVTLELGGKSPFIVMDDADIDQAVELAHFALFFNQGQCCCAGSRTFVHERVYDEFVEKSKARALKRVVGDPFRKGVEQGPQIDDEQFKKILRYIKSGVDSGATLVTGGDKLGDKGYYIQPTIFSDVQDGMKIAQEEIFGPVQSIFKFNDLNEVIKRANASQYGLAAGVFTNNLDTANTLTRALRAGTVWVNCFDIFDAAIPFGGYKMSGIGREKGIDSLKNYLQVKAVVTALKNPAWL

SEQ ID NO: 1458 - protein, 389 aa, Escherichia coli
TLQNGKLNVPENPIIPYIEGDGIGVDVTPAMLKVVDAAVEKAYKGERKISWMEIYTGEKSTQVYGQDVWLPAETLDLIREYRVAIKGPLTTPVGGGIRSLNVALRQELDLYICLRPVRYYQGTPSPVKHPELTDMVIFRENSEDIYAGIEWKADSADAEKVINFLREEMGVKKIRFPEHCGIGIKPCSEEGTKRLVRAAIEYAIANDRDSVTLVHKGNIMKFTEGAFKDWGYQLAREEFGGELIDGGPWLKVKNPNTGKEIVIKDVIADAFLQQILLRPAEYDVIACMNLNGDYISDALAAQVGGIGIAPGANIGDECALFEATHGTAPKYAGQDKVNPGSIILSAEMMLRHMGWTEAADLIVKGMEGAINAKTVTYDFERLMEGAKLL

SEQ ID NO: 1459 - protein, 389 aa, Escherichia coli
TLQNGKLNVPENPIIPYIEGDGIGVDVTPAMLKVVDAAVEKAYKGERKISWMEIYTGEKSTQVYGQDVWLPAETLDLIREYRVAIKGPLTTPVGGGIRSLNVALRQELDLYICLRPVRYYQGTPSPVKHPELTDMVIFRENSEDIYAGIEWKADSADAEKVINFLREEMGVKKIRFPEHCGIGIKPCSEEGTKRLVRAAIEYPIANDRDSVTLVHKGNIMKFTEGAFKDWGYQLAREEFGGELIDGGPWLKVKNPNTGKEIVIKDVIADAFLQQILLRPAEYDVIACMNLNGDYISDALAAQVGGIGIAPGANIGDECALFEATHGTAPKYAGQDKVNPGSIILSAEMMLRHMGWTEAADLIVKGMEGAINAKTVTYDFERLMEGAKLL

SEQ ID NO: 1460 - protein, 160 aa, Neurospora crassa
MLTGEMLTLDFLLLTCLLISYTTNAFPGEYIPTVFDNYSASVMVDGKPVSLGLWDTAGQEDYDRLRPLSYPQTDVFLICFSLWHPEIQHHAPGIPIILVGTKLDLREDPDTIQSLSQKRMAPITFEMGVNCAKEIGARKYLECSALTQRNLKSVFDEAIR

SEQ ID NO: 1461 - protein, 234 aa, Hordeum vulgare subsp. vulgare
MATIYDIGLGAGFNILMATIFLLIFAFLRLQPINDRIFFPKWYLKGMRDSPSSAGAAVTKYVNLNVRSYLKFLSWMPAALKMPEEELIEHAGLDSVVYLRIYLTGLKIFVPITILAFAVLVPVNWTNDTLEGLKVVHSDIDKLSISNIPYGSKRFIAHLVMAYVFTFWTCYVLKNEYERVATMRLRFLASEKRRPDQFTVLVRNIPPDPDESVSELVEHFFLVNHPDHYLKHQV

SEQ ID NO: 1462 - protein, 343 aa, Triticum aestivum
  misc_feature (228)..(228): Xaa can be any naturally occurring amino acid
  misc_feature (295)..(295): Xaa can be any naturally occurring amino acid
MKTLLILTILAMAITISTANMQVDPSGQVQWPQQQLVPQPQQPLSQQPQQAFPQPQQTFPHQPQQQVPQPQQPQQPFLQPQQAFPQQPQQPFPQTQQPQQPFPQQPQQPFPQQPQQPFPQTQQPQQPFPQQPQQPFPQTQQPQQPFPQFQQPHQPFHQPQQQFPQPQQPQQSFPQQQRPFIQPSLQQRLNPCKNILLQQCKPASLVSSLWSIIWPQSDCQVMQQQCCXQELAQIPQQLQCAAIHSVVHSIIVQQQQQQQQQQQQQQQQGMHILLPLSQQQQLGQGTLVQGQGIIXQPQQLAQLEAIRSLVLQTLPTMCNVYVPPECSIIRAPFASIVAGIGGQ

SEQ ID NO: 1463 - protein, 490 aa, Erwinia carotovora subsp. atroseptica SCRI1043
MQLKQSISLKQQVLFRQHCLIDGEWQDSQSGERLNVTNPATGEVLGTVPLVTVSQTEQAIAAAEQALVEWRKKTGKERAALLQAWARLIMDNQDDLAVLLTAEQGKPLAEARGEIAYATSFIDWFAEEAKRIEGSVLQSPQGQQRLMVIKQPIGVCAAITPWNFPAAMITRKVGPALAAGCTMIVKPAEQTPFTALALAELAQQAGIPRGVLQVIVGDAQSVGKVLCDSPVVRKLSFTGSTEVGRILMAQSAPTVKKLSLELGGNAPFIVFDDADVDQAVKGILASKFRNSGQTCVCANRIYVQNGIYPTLVERLIEEVRKLNVGDGTQPGVTQGPLIDDDAVSKVEQHIADALSHGATLLLGGQRHERGGTFFTPTIVGDVTREMRFAREETFGPVAPLFRFSDEAEVIAMANDTEFGLAAYVYTRDAIRQWTVPEALDYGMVGINTGLISNEVAPFGGVKQSGLGREGSRFGIEDYLEMKYLCVDLSR

SEQ ID NO: 1464 - protein, 287 aa, Glycine max
MLMDSPSRSSVIIVGAGISGIAAAKVLAENGVEDLVILEASDRVGGRICKESFGGVTVELGAGWIAGVGGQQPNPIWELAAQFELRTCFSDYSNARYNIYDRSGNIIPSEIAADSYKKAVDSAIQKLRNQEEEEEAYGDDHCNNNIKNSETKLPSTPETPIELAIDFILHDFEMAEVEPISTYVDFGEREYFVADERGYDYLLYKMAEEFLFTSKGRILDNRLKLNKVVRELQYSKSGVTVKTEDGCVYETNYVILSVSIGVLQSDLLAFNPPLPVRLLFFVQLSLA

SEQ ID NO: 1465 - protein, 210 aa, Zea mays
MFGYRKADPDLEAGGSSLLYPGMTESPVSNFFVSSNAGVALYIFLIILPFLVLCPLRYYHQKHPVNLLLLGLFTVAISFAVGMTCAFTSGKIILEAAILTAVVVISLTAYTFWAAKRGHDFNFLGPFLFAAIMVLMVFSLIQIFFPLGKISVMIYGGLASLIFCGYIIYDTDNVIKRYTYDEYIWAAVSLYLDVINLFLSLLQLLRAADS

SEQ ID NO: 1466 - protein, 278 aa, Bacillus halodurans C-125
MIQSIQDRVKLANGVEMPWFGLGVYKAAEGEEVIGAVRAALKAGYRSIDTASLYQNEVGVGQAIRESGIPRDEIFVTTKVWNTEQGYDETLAAFERSRKRLGLEVIDLYLIHWPVREKFLDTWRALETLYKERKVRAIGVSNFNIHHLETVMNISDINPMVNQVEFHPFLTQKPLLTFCKAHDIQLEAWRPLTKGEIFTHPVVQALAKKYGKTPAQIVLRWNLEHRVVTIPKSVREERIQENANIFDFHLSPEDVEALDGLNEDRRLGQDPDSFSFDF

SEQ ID NO: 1467 - protein, 280 aa, Leuconostoc mesenteroides subsp. mesenteroides ATCC 8293
MSLNELYELNDGHQLPKIGLGTFQIRGYQGVDQILNAIQIGYRLLDTSTNYDSEGAVGEAIRRSGIPRSQFYVTTKLPGKYHHFDDALKIIEESLLRLGLDYLDLYLIHWPLPKRDNYVEAWQALIEAQRRGLVRSIGVSNFEKEHLDKIISATGVTPAVNQNEIHPYWPQESLVATNQEYGIVTEAWSPLGRGSSELTEPLILKLAEKYDKNAGQIILRWHIQRGILPVAKSTTPQHQRRNLDIFDFTLTETEVSQISDLERKDGRVDDQDPKEYEEFV

SEQ ID NO: 1468 - protein, 78 aa, Zea mays
  misc_feature (26)..(26): Xaa can be any naturally occurring amino acid
MAAAARHRGTVKWLNDTKGFGFIYPXDGSEDLFVHQSLIKSEGLRSLAEGEEVQFSNFDGDYGPSKGGPTNHRSGCIQ

SEQ ID NO: 1469 - protein, 456 aa, Ralstonia eutropha JMP134
MDEFAIQGFRGRLIGPSDKDYDDARALYNGMIDKRPKLIARCTDAADIIAAVNYARENKLLLAVRGGGHNGPGLGSCDGGLVIDLSQMRSVRVDPASGTVRVEPGCTAADLDHATHAFGLAVPLGIVGSTGVAGLTLGGGTGYLTRKYGLTVDNLLEVDVVLADGSFVTANKDEHVDLFWAVRGGGGNFGVVTSFLFQAHPAKMVFAGPIFWDARDARQVMSTYRDFIPNAPEELGLFVGLKTVPPTDPFPQEHWNKRACALIGAFNGPIDAGKQLVDSLLEKLPAPLFNWMGEMPWTAINSLFDPFFPKGLQWYWKGDFVKALPDEAIDVHIANAIEAPTPFCLMHLYPIDGAVRRIGRDATPWSARDASFSMVIAGISPDPKDAEALKTWGRAYWSAIHPFNLQGAYVNFLDADEAENRVELSYGENYTRLAAIKAKYDPDNLFRVNQNIKPKA

SEQ ID NO: 1470 - protein, 495 aa, Mesorhizobium loti MAFF303099
MAVRNDVSTRSYQQFIGGRFVDGSGSGSIERRSPATGDLVARYADGTPEDVDLAVEAARIAFEDGPWPRMSGMERAEVLNRLADLIRTNRDRLVRIEVEEVGKPVRFARGDIDGAAGLTRYAASLAMQMAGLTYTNIGDGKTALISREAVGVVALVTPWNFPALILSQKVPFALAAGCTVVLKPSEFTPGSAFEIAALAAEAGVPAGAFNVVSGYGATAGDHLTGHMGIDFVSFTGSTRTGSRVVGNTSRHLVKSSVELGGKSANIVFADADLEAAADGALMGVFFNNGECCVSGSRLFVQSSIADDFIAKVIARSRKMKVGDPFDDDTDVGALIDRNHLAKVTGFVKSGIEEGAQLVLGGNVAAGAVGHFHEATIFDRVEPHMTIFREEIFGPVLSITRFDTVDDAVRLANDTAYGLSNYIWSKNIDTVLTVAKRLKSGWVQANTIIDGAPQLPLTGVKGSGFGYEMGQAGFEEFTQLKTLLIQTGPRAPVFPV

SEQ ID NO: 1471 - protein, 268 aa, Zea mays
  misc_feature (99)..(99): Xaa can be any naturally occurring amino acid
MFGYRKAGPDLEAGGSSLLYPGMTESPELRWAFVRKIYVILAVQLAMTAAVSAFVVKVPAVSNFFVSSNAGVALYIFLIILPFLGKPGSPVFWGIFSPXAEIGCNLLRAVLCPLRYYHQKHPVNLLLLGLFTVAISFAVGMTCAFTSGKIILEAAILTAVVVISLTAYTFWAAKRGHDFNFLGPFLFAAIMVLMVFSLIQIFFPLGKISVMIYGGLASLIFCGYIIYDTDNVIKRYTYDEYIWAAVSLYLDVINLFLSLLQLLRAADS

SEQ ID NO: 1472 - protein, 89 aa, Triticum aestivum
  misc_feature (57)..(57): Xaa can be any naturally occurring amino acid
APTVMAFSATSVAPFHGLKSTAGLPISRRSSSAGLSSATNGGRITCMQVWPIEGIKXFFTLSYLPPLSTEALLKQVHYLIRSKWVPCLE

SEQ ID NO: 1473 - protein, 391 aa, Mesorhizobium sp. BNC1
MTQRLVSSERAAAILGVSRQTLYAYVSRGQIRAEVDPADPRRQLYDARELEAIAARKALGRKPREAAANALDWGLPVLNSALSHISNDTLFYRGIDAIEFSRHATLESTARLLWGCGSTDPFALPFTHAMLQPPHELSLVAKCQFILALHASDLPTIWRRDQRNLWPSAASIVRMLEWAGAGCPIAELPVHEALARHWDRVEAADLFRRALVLVADHELNASTFAARVVASTGGSLAAAVTGGLAALSGPRHGGQIPMVEALFEQARQAGNLRAFIDAKLRLGERLPGFGHPLYLVADPRANELLHWLPEDRFRMELSDVVFELSGHRPNIDFALVGLRHTLGLPQDTALFLFLLGRSVGWIAHALEQHSDGRVIRPRASYVGQRSETIPR

SEQ ID NO: 1474 - protein, 448 aa, Klebsiella pneumoniae
MKPLLLTNALIISEDMRYQADILIDKGRIQKIASFIPSRPEWLVIDVRGKWVIPGMIDDQVHFREPGLTHKGTIATESAAAVMGGITSFMEMPNVTPPTTTRQALREKFQRASRSSLANHSFYFGATNDNLDELKALTASQACGVKVFMGASTGNMLVDDEQVLESIFANAPCLVATHCEHTPTIKQNEAIWRARFGDAIPPGEHAAIRSVDACLTSSRQAVSLAKKHRTRLHVLHITTADELVLFDAAPTLEALRQKTITAEACVHHLFFNYDDYETLGHKLKCNPSVKTSFHQEALWKGVNEGIIDVIATDHAPHLLEEKQSDYFAAPSGLPLVQHALPALLDMCSRGIFTPEMVVRKTSHAVAERFQLKDRGYIREGYWADLVVIDPFSHQQIIREDVAYKCGWSPFEGRILSGGAVDMTLVNGHVIWNGHTIQQKYGLPLEFCR

SEQ ID NO: 1475 - protein, 197 aa, Bacillus cereus ATCC 10987
MDTNITWHTASVSKDERRVKNGHHSFVIWFTGLSASGKSTVANAVARKLFEKNIGNYVLDGDNIRHGLNKDLGFSESDRMENIRRIGEVAKLFVDQGTVVLTAFISPFRVDRKQVRDLLAADEFIEVFVKCPIEECEKRDPKGLYKKARKGDIKDFTGIDSPYEEPEQAELIVETHKYSIEECAEQIVKYLQERSFI

SEQ ID NO: 1476 - protein, 344 aa, Glycine max
  misc_feature (60)..(60): Xaa can be any naturally occurring amino acid
  misc_feature (143)..(143): Xaa can be any naturally occurring amino acid
  misc_feature (152)..(152): Xaa can be any naturally occurring amino acid
MAAENVVEFTDLPVKRPREEEEEEEEQTNGVSNDAVSALPNDPQYPGISAVIPGWFSEIXSPMWPGEAHSLKMEKILFQGKSDYQNVMVFQSSTYGKVLVLDGVIQLTERDECAYQEMITHLPLCSIPNPKKVLVIGGGDGGXVLREVARHXSVEKIDICEIDKMVVDVSKQFFPDIAVGFEDPRVTLTVGDGVAFLKDVPEGTYDAVIVDSSDPIGPAQELFEKPFFASVAKALRPGGVVCTQAESIWLHMHIIEDIVANCRQIFKGSVNYAWTTVPTYPSGMIGFMLCSTEGPLVDFKHPVNPLSENDSQQSRPLKFYNSEIHTAAFCLPSFAKRKIGSKTN

SEQ ID NO: 1477 - protein, 280 aa, Propionibacterium freudenreichii subsp. shermanii
MIIPTTPTPTVELSGGTRMPMLGMGTWPLKGEECRAAVASAIEQGYRLVDTAEAYGNEEAVGKAVREAGPDRAEIFVTTKFSKQWHSRKGVHEALEHSLERLGLDYVDLFLMHWPMPGEGSYVDAYRGMVELKEQGLAKAIGVSNFKVHHLDDLITEGMTPEVNQIQLDPSRPRLEVRDFLDNHDIVTEAWSPLGRGADGVLNAPAVLDAAKKHGITPAAAVLAWELNQGIVTIPKSANPEHQRTNLEAIGVELSAQEMKAIDALADPNAKIDDSDKTGN

SEQ ID NO: 1478 - protein, 336 aa, Lycopersicon esculentum
MSHHYQEQEQLEAQKIPFLLDSLYCEENNILTEVSIETESFSSHDLLWEEEELTSLFSKETEYEISYNVLEKNQSFISSRRESVEWILKTTAYYSFSAQTGFLAVNYFDRFLLFSFNQSLNHKPWMNQLVAVTCLSLAAKVEETDVPLLLDLQVEESGFLFESKTIQRMEMLILSTLKWKMNPVTPFSFLDFITRRLGLKHCLSLEFLRRCEKVLLYTITDDRFIGYLPSAMASATMLHVLDRLKPCIGEKYQDQLLGILGIVKEKVEGCYRLIQEVACNIDFGSNKRKFGTLPGSPTGVMDMSFSSDYSNDSWSVATSVTSSPEPLSKKIRESNE

SEQ ID NO: 1479 - protein, 328 aa, Mycoplasma pneumoniae M129
MSPKTTKKIAILTSGGDAPGMNATLVYLTRYATSSEIEVFFVKNGYYGLYHDELVPAHQLDLSNSLFSAGTVIGSKRFVEFKELKVREQAAQNLKKRQIDYLVVIGGDGSYMGAKLLSELGVNCYCLPGTIDNDINSSEFTIGFLTALESIKVNVQAVYHTTKSHERVAIVEVMGRHCGDLAIFGALATNADFVVTPSNKMDLKQLESAVKKILQHQNHCVVIVSENIYGFDGYPSLTAIKQHFDANNMKCNLVSLGHTQRGFAPTSLELVQISLMAQHTINLIGQNKVNQVIGNKANVPVNYDFDQAFNMPPVDRSALIAVINKNII

SEQ ID NO: 1480 - protein, 389 aa, Escherichia coli
TLQNGKLNVPENPIIPYIEGDGIGVDVTPAMLKVVDAAVEKAYKGERKISWMEIYTGEKSTQVYGQDVWLPAETLDLIREYRVAIKGPLTTPVGGGIRSLNVALRQELDLYICLRPVRYYQGTPSPVKHPELTDMVIFRENSEDIYAGIEWKADSADAEKVIKFLREEMGVKKIRFPEHCGIGIKPCSEEGTKRLVRAAIEYAIANDRDSVTLVHKGNIMKFTEGAFKDWGYELAREEFGGELIDGGPWLKVKNPNTGKEIVIKDVIADAFLQQILLRPAEYDVIACMNLNGDYISDALAAQVGGIGIAPGANIGDECALFEATHGTAPKYAGQDKVNPGSIILSAEMMLRHMGWTEAADLIVKGMEGAINAKTVTYDFERLMEGAKLL

SEQ ID NO: 1481 - protein, 119 aa, Zea mays
LQVYGYRMSLWAEHLGTVQECFRRPESEECVQQVNQMADDNWASYVSPQMADMKGHLMKYPVRVEQDGRVGPLHGQESFPDVGGKVLGTHSSKKLEGGRLVNGELKLCSSESLDVVQQG

SEQ ID NO: 1482 - protein, 490 aa, Bordetella parapertussis 12822
MQDFPNILQRWYSMKQHFIDNASVPGSSGERIPVIDPSTGQEFDSIARGNAADIDLAVQAARRAYEGAWGRLSAAERGRLMLALSLKVLEHRDELTALESRDCGKPLKQARADVLAIARYFEYYGGAADKLHGETIPYQQGYTVLTLREPHGVTGHVVPWNYPLQIFGRSVGAALAAGNACVVKPAEDACLSLLRVAELAAETGFPAGALNIVTGYGHEAGDALTRHPGIDHISFTGSPRVGVLVTQTAAERHVPVTLELGGKSPQIVFADADLDALVPVAVNAIVQNAGQTCSAGSRLLVERGAYERVLERLGAAFAALRAGPAQSDLDCGPLIRKTQQERVRGFLDLARGDGIATVAQGRIVPEAPAEGYYQAPTLLRDVPVDHPLAQEEVFGPVLAAIPFDDEADAVRIANATEYGLAASVWTRDGGRQLRIARKVRSGQVFINNYGAGGGIELPFGGVKASGHGREKGFEALYGFTVLKTISIKHD

SEQ ID NO: 1483 - protein, 581 aa, Glycine max
  misc_feature (8)..(8): Xaa can be any naturally occurring amino acid
  misc_feature (382)..(382): Xaa can be any naturally occurring amino acid
  misc_feature (514)..(514): Xaa can be any naturally occurring amino acid
MCGILAVXLGCSDSSQAKRVRVLELSRRLKHRGPDWSGLHQYGDNYLAHQRLAIVDPASGDQPLFNEDKTVVVTVNGEIYNHEELRKQLPNHTFRTGSDCDVIAHLYEEHGENFMDMLDGIFSFVLLDTRDNSFIVARDAIGVTSLYIGWGLDGSVWISSELKGLNDDCEHFESFPPGHLYSSKERAFRRWYNPPWFSEAIPSAPYDPLALRHAFEKAVVKRLMTDVPFGVLLSGGLDSSLVAAVTARYLAGTKAAKQWGTKLHSFCVGLEGAPDLKAAKEVAEYIGTVHHEFHYTVQDGIDAIEDVIYHIETYDVTTIRASIPMFLMSRKIKSLGVKMVISGEGSDEIFGGYLYFHKAPNKEEFHQETCRKIKALHKYDCXRANKSTFAWGLEARVPFLDKEFIRVAMNIDPECKMIKKEEGRIEKWALRRAFDDEEHPYLPKHILYRQKEQFSDGVGYGWIDGLKAHAEKHVTDRMMLNAANIFPFNTPTTKEAYHYRMIFERFFPQNSARXLTVPGGPSVACSTAKAVEWDAAWSNNLDPSGRAALGVHASAYGNQVKAVEPEKIIPKMEVSPLGVAI

SEQ ID NO: 1484 - protein, 506 aa, Daucus carota
TSADSTQRFIQCLTKYAKNSESISQVVFTPANASYNPILQLNLQNLRFNTSGTRKPLAIVTPIEETQIQTVIYCARKNSMNVRTRGGGHDFEGVSYTAEVPFVLLDMINFNRVNIDLKTSTAWVQSGISLGEFYYRISQKSDVLAFPAGLLSSVGLTGLLGGGGYGMLKRKYALAADNTLDARIVDYNGKILDRKSMGEDLFWAIRGGDPASFCVVLELKLQLVPVPKSVTYFAVQRTLEQNGSALFQKWQATAANVFPRDLDVRVVVDTITSNSSPRQDKKTVRFVFQCLYLGKIDTLLPIMQKYFPELGLVRDDCTETSWIKTAPMFSGFPVGTDPTILLNKTAIPRNSVKIKSSFTTQPISLEGLNGIWDLWLKQPVQTTLIQYTPFGGIMNEFAESALPFPHRPGVLYMINMAVTLAQNEEATLQWINDLFKYYAPYVTKNPRTSYVNYRDADLGIGSRTFQQASIWGKKYYKNNFDRLVKIKSIVDPLNFFNHKQSIPLLM

SEQ ID NO: 1485 - protein, 373 aa, Arthrobotrys dactyloides
MASPTPPNSTASPKPQAPPSQVQACRYKTGKTLGSGSYSVVRECVHIHTGRYYAAKIINQKLMAGREHMVRNEIAVLKKVSMGHQNILTLVDYFETMNNLYLVTDLALGGELFDRICRKGSYFESDAADLIRATLSAVAYLHDHGIVHRDLKPENLLFRTPEDNADLLIADFGLSRIMDEERFHVLTTTCGTPGYMAPEIFKKTGHGKPVDIWAIGVITYFLLCGYTPFDRDSNLEEMQAILKADYKFEPAQYWSDISENAKDFIRRCLTIDPKARPTAHAALEHPFICEDQPEREADLLPTVRKNFNARRTLHAAIDTIRAINKLREGGMMDGALSSAPENQKEKQPQNQPATGLWQGTAQAATAKGLWSKS

SEQ ID NO: 1486 - protein, 458 aa, Rhizobium sp. NGR234
MYSNSLIELDRAHLIHPVASYRGHEKLGVRVLASAKGATVTDASGRQLIDGFAGLWCVNAGYGHESIVEAATRQMRELPYATGYFGLGSEPAIRLASELAERAPGNLDHVFFTLGGSDAVDSTIRFIRYYWIGRGEPQRDQFISVEQGYHGSSTVGAGLTALPAFHAGFGIPFDWQHKIPSHYAYRNPVGDDPQAIIDASLAALRQKVEEIGPERVAAFYAEPIQGSGGVLVPPKGWMKAMRQLCQELGILFVADEVITGFGRTGPLFACHEDEIVPDFMTVAKGLTSGYVPMGAVFMGDHIYQTIADSAGAGAVGHGYTYSAHPVSAAVGLEVLKLYENELLDNGRKAGARLMAGLESLKDHPLVGDVRGRGMLAAVELVVDKEKKTPLPAKAEPARRIFDRAWENGLVIRAFANGVLGYAPPLCCTEAEIDGIVERTRKVLDETLEDPAVRSGLSD

SEQ ID NO: 1487 - protein, 217 aa, Lactobacillus plantarum WCFS1
MKFFLDTANTEDIKHFAELGLVDGVTTNPTLVSREGRDFETVIKEITQIVSGPVSAEVTATKAEEMIAQARNEIKWASNIVVKIPMTEEGLKAVKVLSGEGIKTNVTLVFSVSQGLLAAKAGATYISPFLGRLDDIGGNGIQLVKDLRQVLDTYGFKTEIIAASVRGPQHVQEAALAGADIATIPATVFGKLWSHPLTDKGLASFASDWKAFQATQK

SEQ ID NO: 1488 - protein, 321 aa, Malus x domestica
ILPFKLPAIGPNDVRIRIKAVGICGSDVHYLRTMKCADFEVKEPMVIGHECAGIVDKVGSEVKHLVPGDRVAVEPGISCSRRQQCKGGQYNLCPDMKFFATPPVHGSLANQIVHPADLCFKLPENVSLEEGAMCEPLSVGVHACRRANVGPETTVLIVGAGPIGLVSVLAARAFGAPRIVIVDMDDRRLAMAKSLGADGTVKVSIKMEDLDDEVAKIKEAMGSEVDVTFDCVGFNKTMSTGLNATRPGGKVCLVGMGHGVMTVPLTPAAAREVDVVGVFRYKNTWPLCLEFLRSGKIDVKPLITHRFGFTEKEVEEASLEF

SEQ ID NO: 1489 - protein, 1526 aa, Zea mays
MAMAYKMVKPSPRSGHAPAPQPLAIEQPWLTIDALCVCVRGLQATEGMNVKEECQRWFMEMKWKKVHRFVVYKIDERSRAVLVDKVGGPGEGYEELVAALPGDDCRYAVFDFDFVTVDNCQKSKIFFIAWSPAASRIRAKILYATSKQGLRRLLDGVHYEVQATDPSEMGFDEARHLYPDTRLRQSRGDRRHSTAPLASLTEGQRRLRHSDCSATRQSKSDRQSGLDKGATANSAPPDPRARTRAKTRKTANSAPPDPRARTRAKTRKTANSAPPDPRARTRAKTRKTANSAPPDPRARTRAKTRKTANSAPPDPRARTRAKTRKTTKLRLARPQGSDSALASAERLPPRPTPWLGLGHGNRRQTQPRLRRKPHVALLRAQTATSTGGAIIIPPRIDSGQRQQGLDRSNSCPSIRLRRTSNSHDITPAGCPDLSGCHIGMGLLRADEQLPVKLQMGSLQQPLRPGTVLRFGTLEFMSFDGSYDMTLLPPPRDYDNGGRQPARRRRNRRRLPRVVEEQHSGSLRSLPRQRRRRRGRQGQTGGHASPAVERIDAPDAPTEGTPDVDLAFETEASVVPPRHADPEQEDDAGALAESLQDVALEPETTAQPVPDVTTSLLVDQKVTTNSHLASFRLGLNPPNDLVLAGALIEASATPLRFCMRSPWDRLTDVSTYGPSGSEEDDDPSIGWDFSGHGNPSAMRDFMTACDYCLSDRSDESRSLGDESCGPSRECFHIELGDPTEGNHLGMPEDGDLPRPVPRADIPRELAVVPAPAGGYDPQLEQVREAQARLNEGTGALEPIRRDAGQAWVGQPLAGEIRHLPQGLQHRVANDVRIRPPPASSGVGQNLATAAMLIRAMPEPSTTEGRRIQGELKNLLEGAAARRAESTASRRQGYPSEPHAATSRFMREASVYTGRTRNTAPAAPAHLGNEHHRRDRRAHLDERVRQGYHPRRGGRYDSGEDRSPSPEPPGPQAFSRAIRRAPFPTRFRPPTTITKYSGETRPELWLADYRLACQLGGTDDDNLVIRNLPLFLSDTARAWLEHLPPGQISNWDDLVQAFAGNFQGTYVRPGNSWDLRSYRQQPGESLRDYIRRFSKQRTELPNITDSDVIGAFLAGTTCRDLVSKLGRKTPTRASELMDIATKFASGQEAVEAIFRKDKQPQGRPSEEAPEASAPRGAKKKGKKKSQSKRDAADADLVAAAEYKNPRKPPGGANLFDKMLKEPCPYHQGPVKHTLEGAGPPAEGGRAHDDDKNEEHPAEGFPEVRDCFMIYGGHAANTSARHRKQERREVCSVKVAAPVYLDWSDKPITFDRADHPDHVPSPGKYPLVVDPVVGDVRLTKVLMDGGSCLNIIYAETLKLLRVDPSSVRAGAAPFHGIIPGKRVQPLGRLDLPVCFGTPSNFRRETLTFKVVGFRGTYHAVLGRPCYAKFMAVPNYTYLKLKMPGPNGVITVGPTYKHAFECDVECVEYAEALAESEALIADLENLSKEVPDVKRHAGNFEPAETVKAVPLDPSGDTTKQIRIGSGLDPK

SEQ ID NO: 1490 - protein, 319 aa, Malus x domestica
ILPFKLPAIGPNDVRIRIKAVGICGSDVHYLRTMKCADFEVKEPMVIGHECAGIVDKVGSEVKHLVPGDRVAVEPGISCSRCQQCKGGQYNLCPDMKFFATPPVHGSLANQIVHPADLCFKLPENVSLEEGAMCEPLSVGVHACRRANVGPETTVLIIGAGPIGLVSVLAALAFGAPRIVIVDMDDKRLAMAKSLGADGTVKVSTKMEDLDDEVAKIKEAMESEVDVTFDCVGFNKTMSTGLNATRPGGKVCLVGMGHGMMTVPLTPAAAREVDVVGVFRCKNTWPLCLEFLRSGKIDVKPLITHRFGFTEKEVEEASL

SEQ ID NO: 1491 - protein, 465 aa, Bacillus anthracis str. A2012
MTIVTFSKSTTDKPSYTYEELSVKNKAYVWHPFTQMKDYLEEDPVIIERGEGRKLYDVNGNEYWDGVSSIWLNVHGHQVPELDEAIREQLNKIAHSTMLGLANVPSILLAEKIIEVVPEGLKKVFYSDSGSSAVEIAIKMAFQYWQHKGKPKKQRFVTLKEAYHGDTIGAVSVGAIDLFYQVYSSLLFEAIKMPYPYTYRSPYGNDKAEIVKKHLEEMEELLKDKHEEIAAIIVEPLMQGAGGMITMPKGYLRGLRNLCTKYNVLFITDEVATGFGRTGKMFACEHENVTPDILTAGKGLTGGYLPVAITVTTDEIYNAFLGSYEEQKTFFHGHSYTGNPLGCAVAIANLELYEKTNLIEEVARKTEYVATQLEELFACKHVGDIRQCGLMVGIELVKNKETKEAFEWTERVGVQVCKRSRELGMILRPLGNTIVFMPPLASTIDEIDEMLRILYKAISDITEGE

SEQ ID NO: 1492 - protein, 187 aa, Glycine max
  misc_feature (100)..(100): Xaa can be any naturally occurring amino acid
MPLILAKSDSIQIREVWNDNLEEEFALIREIVDNYPYIAMDTEFPGIVLRPVGNFKNSYDYHYQTLKDNVDMLKLIQLGLTFSDEHGNLPTCGGDDPARXCIWQFNFREFNVNEDVFANDSIELLRQSGIDFKRNNENGIDAHRFGELLMSSGIVLNDNIHWVTFHSGYDFGYLYELLTCQALPDTQ

SEQ ID NO: 1493 - protein, 142 aa, Zea mays
INDHDHDHRAGHGRYRMNNAVPGAWVYVGGEQLWIDVLHATLEHDLAPRVWTDYLHITVGGTLSNGGIGGQAFRHGPQISNVHELDVVTGTGEMVSCSPGKNSDLFYAALGGLGQFGVITRARIALEPAPRRVLWVRLAYSD

SEQ ID NO: 1494 - protein, 352 aa, Lactobacillus plantarum WCFS1
MEAVVKTESGYDNMELKQIPIPEVTGDKVLLKVAYTGICGTDIHTFKGQYANAVTPLVLGHEFSGEVVEVGPDVKTLKPGDRVTSETTFATDGTCVYCQDKEYNLCPNRVGIGTKANGSMANYVLTREESAHILPDNVSYKMAAMSEPLASCVHAMYQKTPFTLHDTLLIMGPGPMGLLSLQIAKEIGAFVIVSGITKDADRLQIAKELGADIIVDTQKEDLAKVVMDATDGVGVTKVYDCSGATPAVNSALPLIRKGGTFQQVGLFAKPMNELDERSIIQHEITYRGSRSQNPYDWAIALHLESKGAINQDAMITKVFDLEHWRDAFDAMMAGKELKVMIASNPDDPDLAD

SEQ ID NO: 1495 - protein, 149 aa, Glycine max
  misc_feature (34)..(34): Xaa can be any naturally occurring amino acid
SPTNAARGCRGLNPGSFLTLAKGSESGGSYGQWXSAIGRTAATTTLAESTVVLTTLLIKRTLDGHWNVIDVRYGLVGGYAVITYRCAVAQPSGAIVCGFVAAWVLIGLNKLAANVEYDDPLDAAQLHGGCGAWRCLFTGLFAKKEYVEE

SEQ ID NO: 1496 - protein, 403 aa, Sinorhizobium meliloti 1021
MLTQKTKDIVKATAPVLAQHGYAIIQHFYKRMFQAHPELKNIFNMAHQERGEQQQALARAVYAYAANIENPESLSAVLKDIAHKHASLGVRPEQYPIVGEHLLASIKEVLGDAATDEIISAWAQAYGNLADILAGMESELYERSEERAGGWAGWRRFIVREKNPESDVITSFVLEPADGGPVADFEPGQYTSVAVQVPKLGYQQIRQYSLSDSPNGRSYRISVKREDGGLGTPGYVSSLLHDEINVGDELKLAAPYGNFYIDVSATTPIVLISGGVGLTPMVSMLKKALQTPPRKVVFVHGARNSAVHAMRDRLKEASRTYPDFKLFIFYDEPLPTDIEGRDYDFAGLVDVEKVKDSILLDDADYYICGPVPFMRMQHDKLLGLGITEARIHYEVFGPDLFAE

SEQ ID NO: 1497 - protein, 313 aa, Eucalyptus globulus
ANLFAMQLATASVLPAVLTAAIELDLLEIMARAGPGAYLTPGEVASQLPTQNPDAPVMLDRIFRLLASYSVLTCTLCDLPEGKVERLYGLAPLCKFLVKNEDGVSLAPLRLIDQDRVFLESWYYMKDAILEGGIPFHKAHGMTAFDYPGTDPRFNKIFNRAMSDHSTIMMKKILETYNGFEGLKTVVDVGGGTGAILNMIVAKYPSIKGINFDLPHVIEDAPSYPGVEHVGGDMFVNIPNGDAVFMKWICHDWSDEHCAKLLKNCYDALPVNGRVIVAEYILPAYPDQSLSTKGVIHMDCIMLTHFSGGKERT

SEQ ID NO: 1498 - protein, 400 aa, Zea mays
MVLEATMICIDNSEWMRNGDYAPSRFQAQADAVNLICGAKTQSNPENTVGVMTMAGKGVRVLVTPTSDLGKILACMHGLEVGAEANLAAAIQVAQLALKHRQNKRQQQRIIAFIGSPVKYDKKVLETIGKKLKKNNVALDIVDFGESDDEKPEKLEALIAAVNSSDSSHIVHIPPGENALSDVLLSTPIFTGEEGGSGFAASAAAAAATGASGFEFGVDPNVDPELALALRLSMEEERARQEAIAKKAAEDTSNTEHNNVPSSNSDSVMAEGEPASNAAAGDKEQPKDDDDLLQQALAMSMEGGASGSAAVTDSAMAEAGAVDPDLALALQMSVQDANMSSDTDMSKVFEDRTFVSSILNSLPGVDPNDPSVKDLLASLHSQGEQEKKEDTSDKTEDDKN

SEQ ID NO: 1499 - protein, 312 aa, Eucalyptus globulus
ANLFAMQLASASVLPMVLKAAIELDLLEIMAKAGPGAFLSPGEVAAQLPTQNPEAPVMLDRISRLLASYSVLTCTLRNLPDGKVERLYGLAPVCKFLVKNEDGVSIAALNLMNQDKILMESWYYLKDAVLEGGIPFNKAYGMTAFEYHGTDPRFNKIFNRGMSDHSTITMKKILETYKGFEGLETVVDVGGGTGAVLSMIVAKYPSMKGINFDLPHVIEDAPPLPGVKHVGGDMFVSVPKGDAIFMKWICHDWSDDHCAKFLKNCYDALPNNGKVIVAECVLPVYPDTSLATKNVIHIDCIMLAHNPGGKER

SEQ ID NO: 1500 - protein, 218 aa, Glycine max
VKCDVMVYTKIFLKFPYKFWPSGPDKEFFIYAHERRGYYTFWQHMENAYPGSNMLVVTLTNEESKRVEAQADEETLREAMAVLRDMFGPNIPNAIDILVPRWWNNRFQRGSYSNYPIISNHKLFHNIKAPVGRIFFTGEHTSERFNGYVHGGYLAGIDTSKALLEEMRKEKESQTLLLEPLLASLTMSKPETVSNIHKCDIPTQLYLSGKLGVPEAIL

SEQ ID NO: 1501 - protein, 355 aa, Methanosarcina barkeri str. fusaro
MSKNICFIDGLEGILKYREIDINQLVDLPYDAVSYLLILGDLPGDQELAEYSACLHGEREVNREVIDVIHMCNFNIDSIEALRTIVSFISQFDPDINDSSPEGNMRKATRLIAKIPTIVAAYYRIANGKEPVPPDPSLSHGANFLYMLRGNKPTQLEAEVMEKDFILSAEHELNASTFSSRVTASTLSDLYSAVVSGLCTLKGPLHGGARAEVTAMIEEIACPENAENYVLDKLSKKEKIMGFGHRVYKTYDPRGMIFKQLAKQLAEAKGDMHWYNIAEVVENTVIRELVEKKGKPIYPNVDFYSGVIYKYMDIPPQLATSIFAIGRVSGWIAHCFDQYEKKKIIRPRAFMLDEC

SEQ ID NO: 1502 - protein, 355 aa, Arabidopsis thaliana
MDRISGLPDELLVEILHCLPTKEVVSTSILSKRWEFLWLWVPKLTFVMNHYESDLPIQDFITKNLRLLKPQVIESFHLQCFSSSFKPEDIKHWVVTTISRRVRELIINYCDLSWLDKPVVLLDLPNSLYTCTSLVTLKLIGHSIIVDVPRTVSLPCLKTLELDSVAYSNEESLRLLLSYCPVLEDLTIHRDMHDNVKTLVIIVPSLLRLNLPIDGAYSCDGYVIVTPALKYLKVPGLYREDFSYLLTHMPNVEEADLSVEQDVERLFESITSVKRLSLFVLLDIEDESMYHNGIYFNQLEHLNLHIYRDNWSKLLVRLLEDSPKLRVLKIVVDVSFFIGNLKALVLLIISFLTKI

SEQ ID NO: 1503 - protein, 268 aa, Agrobacterium rhizogenes
RVTHHTMVHKQMSRFFTGFRRDAHPMAVMCGCVGALSAFYHDSTDITDPHQRMVASLRMIAKMPTLAAMAYKYHIGQPFVYPKNDLDYASNFLRMCFAVPCEEYVVNPVLARAMDRIFILHADHEQNASTSTVRLAGSSGANPFACIAAGIACLWGPAHGGANEAALNMLNEIGTVDRIPEFIARAKDKNDPFRLMGFGHRVYKNYDPRAKIMQKTAHEVLGELGIKDDPLLDIAIELERIALTDEYFIEKKLYPNVDFYSGITLKAL

SEQ ID NO: 1504 - protein, 375 aa, Glycine max
MGVCFASLARHQTPSKSIPYAGSGRESLGSKDENMGITESTSSVNGGSCSSHSSKNIVFPSVEVRNLKEFSFANLKAATKSFKSDALLGEGGFGKVYKGWLDEKTLAPTKAGSGIMVAIKKLNSESMQGFREWQSEINFLGRISHPNLVKLLGYCCDDIEFLLVYEFMPKGSLENHLFRRNTNSEPLSWDTRIKIAIGAARGLAFLHTSEKQIIYRDFKASNILLDEDYNAKISDFGLAKLGPSGEDSHVSTRIMGTYGYAAPEYIATGHLYVKSDVYGFGVVLLEMLTGLRALDKNRPIEQQNLIEWAKPSLSDKRKLKSIMDERIEGQYSTKAALKSAHLILKCLQCDRKKRPHMKDVLDTLEHIEAIKDRTK

SEQ ID NO: 1505 - protein, 338 aa, Bacteroides thetaiotaomicron VPI-5482
MKAVQIVNPSEMKVVELEKPTVGAGEVLVRIKYVGFCGSDLNTFLGRNPMVKLPVIPGHEVGAVIEEIGPDVPAGFEKGMNVTLNPYTNCGKCASCRNGRVNACEHNETLGVQRNGVMCEYAVLPWTKIIPAGNISSRDCALIEPMSVGFHAVSRAQVIDNEYVMVIGCGMIGIGAIVRAALRGATVIAVDLDDEKLVLAKRVGASYAVNSKTENVHERIQEITAGFGADVVIEAVGSPVTYVMAVDEVGFTGRVVCIGYAKKEVAFQTKYFVQKELDIRGSRNALPADFRAVINYMKEGKCPVEELISKIAKPEDALEAMKEWAADPGKVFRILVEM

SEQ ID NO: 1506 - protein, 251 aa, Arabidopsis thaliana
MENEREKQVYLAKLSEQTERYDEMVEAMKKVAQLDVELTVEERNLVSVGYKNVIGARRASWRILSSIEQKEESKGNDENVKRLKNYRKRVEDELAKVCNDILSVIDKHLIPSSNAVESTVFFYKMKGDYYRYLAEFSSGAERKEAADQSLEAYKAAVAAAENGLAPTHPVRLGLALNFSVFYYEILNSPESACQLAKQAFDDAIAELDSLNEESYKDSTLIMQLLRDNLTLWTSDLNEEGGILIFFCFPIS

SEQ ID NO: 1507 - protein, 268 aa, Agrobacterium rhizogenes
RVVHHTMVHEQMSRFFTGFRRDAHPMAVMCGCVGALSAFYHDSTDITDPHQRMVASLRMIAKMPTLAAMAYKYHIGQPFVYPKNDLDYASNFLRMCFAVPCEEYVVNPVLARAMDRIFILHADHEQNASTSTVRFAGSSGANPFACIAAGIACLWGPAHGGANEAALNMLTEIGSVDHIPEYIARAKDKNDPFRLMGFGHRVYKNYDPRAKIMQKTAHEVLGELGIKDDPLLDIAIELERIALTDEYFIEKKLYPNVDFYSGITLKAL

SEQ ID NO: 1508 - protein, 97 aa, Triticum aestivum
  misc_feature (80)..(80): Xaa can be any naturally occurring amino acid
KALHQYDCLRANKATSAWGLEVRVPFLDKEFIDVAMSMDPEWKLYDADLGRIEKWVLRKAFDDEKEPYLPRHILYRQKEXFNDGVGYNWIRRLKRFY

SEQ ID NO: 1509 - protein, 229 aa, Triticum aestivum
  misc_feature (21)..(21): Xaa can be any naturally occurring amino acid
QQSFPLQPQQPFPQQPQQPFXLQPQQPFPQQPQQPFPQPQQPIPVQPQQSFPQQSQQSQQPFAQPQQLFPELQQPIPQQPQQPFPLQPQQPFPQQPQQPFPQQPQQSFPQQPQQPFPQQPQQPFPQQPQQPFPQQPQQPFPLRPQQPFPQQPQQSQQSFPQPQPQQPQQPSILQPQQPLPQQPQQPFQQPQQQLSQQPEQTISQQPQQPFPPATTPTSTTISTTTTIWE

SEQ ID NO: 1510 - protein, 178 aa, Zea mays
MAEAPASPGGGGGSHESGSPRGGGGGGSVREQDRFLPIANISRIMKKAIPANGKIAKDAKETVQECVSEFISFITSEASDKCQREKRKTINGDDLLWAMATLGFEDYIEPLKVYLQKYREMEGDSKLTAKSSDGSIKKDALGHVGASSSAAQGMGQQGAYNQGMGYMQPQYHNGDISN

SEQ ID NO: 1511 - protein, 302 aa, Zea mays
MAGMSLQHPWAFAFGLLGNVISFMTFLAPIPTFYRIYKSKSTEGFQSVPYVVALFSAMLWIFYALIKSNETFLITINAAGCVIETIYVVMYFVYAPKKAKLFTAKIMALLNGGVFGVILLLTLLLFKGSKRVVLLGWICVGFSVSVFVAPLSIMRRVIQTKSVEYMPFSLSLSLTLSAVVWFLYGLLIKDKYVALPNVLGFIFGVVQMVLYVFYMNKTPVAATAVGKDAGKLPSAADEHVLVNIAKLNPALPERTSGMHPVTQMAAVPARSCAAEAIAPAMLPNRDVVDVFVSRHSPAVHVV

SEQ ID NO: 1512 - protein, 495 aa, Pseudomonas aeruginosa UCBPP-PA14
MSIAIDPSVSAFLRSPHGLLIEGESGPARSGADMPLYDPATGAELARVARAGAEDVDRAVAAARRAFEGNWAGQRPADRERLLLRLAERIEAHGEQLAQLETLNNGKSINLSRALEVGASVEFIRYMAGWATKIEGRSLDLSIAAVPGARYRAYTVPEPVGVVGAIVPWNFPLLMAIWKIVPALACGCTVVLKPADETPLTALRLGQLCLEAGIPPGVVNIVTGTGAEAGAALAAHPGIDKLAFTGSTPVGKLIGHAAVENMTRFSLELGGKSPVIILDDTSLDMAAAGSAGAIFFNQGQVCTAGSRLYVQRKRFDQVLERLAAIAGDLSIGPGLDPTTQINPLVSARQQERVLGMIESGVAEGASVVCGGARQGETGFYVQPTILADVTPGMQVVREEIFGPVLVATPFDDLDEAVRLANDSIYGLGASIWSNDLRQVMDLVPRIKAGTVWVNAHNLLDPSMPFGGFKQSGIGREMGHAAIEAYTENKSVCIAY

SEQ ID NO: 1513 - protein, 389 aa, Escherichia coli
TLQNGKLNVPENPIIPYIEGDGIGVDVTPAMLKVVDAAVEKAYKGERKISWMEIYTGEKSTQVYGQDVWLPAETLDLIREYRVAIKGPLTTPVGGGIRSLNVALRQELDLYICLRPVRYYQGTPSPVKHPELTDMVIFRENSEDIYAGIEWKADSADAEKVIKFLREEMGVKKIRFPEHCGIGIKPCSEEGTKRLVRAAIEYAIANDRDSVTLVHKGNIMKFTEGAFKDWGYQLAREEFGGELIDGGPWLKVKNPNTGKEIVIKDVIADAFLQQILLRPAEYDVIACMNLNGDYISDALAAQVGGIGIAPGANIGDECALFEATHGTAPKYAGQDKVNPGSIILSAEMMLRHMGWTEAADLIVKGMEGAINAKTVTYDFERLMEGAKLV

SEQ ID NO: 1514 - protein, 503 aa, Avicennia marina
MSTMAIRMPTRQLFIDGEWREPVQRKRILIINPANEQTIGDIPAATAEDVDIAVEAARKAFFRNSGKDWSSTTGAHRAKYLRAIAAKIKDRKAELVKLEAIDSGKPLVEASLDMDDVIGCFEYFAGIAERLDSEQRTPVSLPMETFKCHLLKEPIGVVGLISPWNYPLLMAIWKVAPALASGCTAILKPSELASVTCLELAEVCMEVGLPPGVLNILTGLGPEAGAPLVTHPHVAKISFTGSDTTGVKIMTAAAQLVKPVTLELGGKSPIVVFEDVDLDTAAEWTLFGCFWTNGQICSATSRLLVHESIAATFLEKLVKWCEKIKISDPLEEGCRLGPIVSRRQYEKVMKYISTAKEEGATILCGGARPEHLEKGYFVQPTIITDVKTSMQIWIEEVFGPVLCVKTFATEDEAIDLANDTHYGLAAAVISKDLDRCERMAKAFQVGAVWVNCSQPCFYQAPWGGKKRSGFGRELGERGLDIYLNVKQVTQYVSSEPWDWYKSP

SEQ ID NO: 1515 - protein, 389 aa, Escherichia coli
TLQNGKLNVPENPIIPYIEGDGIGVDVTPAMLKVVDAAVEKAYKGERKISWMEIYTGEKSTQVYGQDVWLPAETLDLIREYRVAIKGPLTTPVGGGIRSLNVALRQELDLYICLRPVRYYQGTPSPVKHPELTDMVIFRENSEDIYAGIEWKADSADAEKVIKFLREEMGVKKIRFPEHCGIGIKPCSEEGTKRLVPAAIEYAIANDRDSVTLVHKGNIMKFTEGAFKDWGYQLAREEFGGELIDGGPWLKVKNPNTGKEIVIKDVIADAFLQQILLRPAEYDVIACMNLNGDYISDALAAQVGGIGIAPGANIGDECALFEATHGTAPKYAGQDKVNPGSIILSAEMMLRHMGWTEAADLIVKGMEGAINAKTVTYDFERLMEGAKLL

SEQ ID NO: 1516 - protein, 484 aa, Rhizobium sp. NGR234
MKLKDKELFRQAGVIGGEWIGAASGDVVEVFDPASQAVLGTVPDMGTAETRAAIEAAETAFGPWKKKTHAERAALLERWHALMIEHLEDLALILTLEQGKPLDEARGEIRYGAAFVKWFAEEARRIGGHTIPSPTPDRRIVVLKEAVGVCAIVTPWNFPNAMITRKVAPALAAGCTVVIKPSEFTPFSALALGVLAERAGIPAGVVNIVTGMPTAIGNEIMANETVRKISFTGSTRVGSLLMRGAADSVKRLSLELGGNAPFIVFDDADLDLAVEGAIASKFRNGGQTCVCANRILVQSGVYDAFAEKLAARVNAMKVGPGTEPGVAIGPMINAAAIDKIDRHVEDALAKGAKIAARGRSLPVGRQYTAPLVLTGATTEMLLASEETFGPVAPLFCFETEEEAITIANGTPFGLAAYFYTENLKRSWRVAEALEFGMVGLNTGAISTEVAPFGGVKQSGLGREGAQVGIEEYLELKSFHIGGLA

SEQ ID NO: 1517 - protein, 335 aa, Xylella fastidiosa Dixon
MTQTITVIRGDGIGPEIMDATLSVLNALQANLNYEFADAGLSALEKHGDLLPEATLNSISKNKIALKSPLTTPVGEGFSSINVALRRKFDLYANVRPAKSFPNTKSRFSDNVDLITVRENTEGAYLSEGQTISPDGEVATSSARVTRKGSERIVRYAFDLARTTGRKKVTAVHKANIIKSTSGLFLKTARDVASQYPEIDFQEMIVDNTCMQLVMRPEQFDIIVTTNLFGDILSDLCAGLVGGLGLAPGANIGNEQAIFEAVHGSAPDIAGQGKANPCALLLGAVQMLDHIGQPQNAERLRNAIVATLNAKDSLTPDLGGNGNTMGFAKAIASRL

SEQ ID NO: 1518 - protein, 158 aa, Zea mays
  misc_feature (42)..(42): Xaa can be any naturally occurring amino acid
  misc_feature (91)..(91): Xaa can be any naturally occurring amino acid
MIQKNEKAFHTRRNKDEEITMVHGSRAPAMNIQRYTERVHRXARCSPACFVAAFVYIIRYLERPGATSMTLRLTSLNVDRLLITSLLVAAXFLDRKCYNNAYYAKIGGASTEEMNRLERTFLFDLDFRLNITAEMFEKHCLMLQRQTVPWWFKRTNSP

SEQ ID NO: 1519 - protein, 487 aa, Rhizobium sp. NGR234
MTLSFDPDSLPLPVGHFIGDRLLPAEGFIDMHRPSDGKAYAGCPIADEALVDQAVETAKKALKASNWGGLRPRERTVALQRWADLIESEAETLAKLEALSSTRPVGHLVAGDIAVSAEQIRFFAEFADKEGSDLVPTDDSNLGMIMTEPYGVVAAITPWNFPVSMAAWKLGPALAAGNAVVLKPSEMTPFSTVYLAELAIRAGMPAGLINIVLGDGTVTGTAITGHPDIAKVSFTGSTGAGAAIMANIARTGVKPMTLELGGKSPQLVFADADLDKAAAAIAQSMLSNAGQACVAGSRLIVEESVAAPLAEAIVTRMKAAKPGPTWDEATEYSPIISKRQLNRIHGIVEAAVAAGGECLFGGKQMDAPGYFYQPTLMAVRDSSSPAITEEIFGPVLTMQTFADEEEALALADHPTYGLAAGLFTRDLSRALRLTRRLQAGTVWVNRYSRSRDHILPTGGYKRSGIGKDLGREAYHANRKSKSVLISL

SEQ ID NO: 1520 - protein, 388 aa, Escherichia coli
TLQNGKLNVPENPIIPYIEGDGIGVDVTPAMLKVVDAAVEKAYKGERKISWMEIYTGEKSTQVYGQDVWLPAETLDLIREYRVAIKGPLTTPVGGGIRSLNVALRQELDLYICLRPVRYYQGTPSPVKHPELTDMVIFRENSEDIYAGIEWKADSADAEKVIKFLREEMGVKKIRFPEHCGIGIKPCSEEGTKRLVRAAIEYAIANERDSVTLVHKGNIMKFTEGAFKDWGYQLAREEFGGELIDGGPWLKVKNPNTGKEIVIKDVIADAFLQQILLRPAEYDVIACMNLNGDYISDALAAQVGGIGIAPGANIGDECALFEATHGTAPKYAGQDKVNPGSIILSAEMMLRHMGWTEAADLIVKGMEGAINAKTVTYDFERLMEGAKL

SEQ ID NO: 1521 - protein, 291 aa, Oryza sativa (indica cultivar-group)
MSAAPVVDAEYMAEVERARRDLRALIASKSCAPIMLRLAWHDAGTYDKATKTGGPNGSIRFPQEYSHAANAGIKIAIDLLEPMKQRHPKITYADLYQLAGVVAVEVTGGPTIDYVPGRRDSSDSPEEGRLPDAKKGAAHLREVFYRMGLSDKDIVALSGGHTLGKARPERSGFDGAWTKDPLKFDNSYFIELLKENSEGLLKLPTDKALVEDPTFRRYVELYAKDEDAFFRDYAESHKKLSELGFTPPRSAFIYKSCQKPKSLLMQTAAGVAVAAAVVAWAYLCESNKRLG

SEQ ID NO: 1522 - protein, 483 aa, Buchnera aphidicola str. APS (Acyrthosiphon pisum)
MQKNLIWFRNDLRVYDNTALHQACQNDTDKVISLFISTPKQWHNQSVSKKKISFMYYHLISLQKELLKLNIILYYHESTDFLNSIEYLIFFCKKHKVNNLFYNYEYAINERYRDYLVKKKLSQKGFLVKGFHDNLLFSNRQIRNQKNETYKVFTFFKKKVIQNLHNNIPQCFPVPSKRKSDRDIFLTSISLKNVNLNFNKNFFPVGEKEAINRLKNFCIYKFNDYFLKRDYPFLDATSMLSPYLSAGIISSRYCLKVLLKTKNSLPLNVLLTSPWFDQILWREFYYHLLIGFPKISRSESLVTWEKEIHWINNIKHFNAWKEGNTGFPIIDAGMRQLNELGWMHNRLRMITSSFLVKNLLINWREGEEHFISNLIDGDLALNNGGWQWSASVGCDSVPYIRIFNPLHQSKTFDESGNFIKKFIPELKNVPNHHIHQPHEWSKQKNFKIDYPNPIINYSESRKTSLSLFKQARLKLHKNGLKNS

SEQ ID NO: 1523 - protein, 455 aa, Rhodospirillum rubrum
MVSNALRDADLSYTIHPYTNLVAHETKGPLIAVRGEGVRVFDDKGKDYIEGMAGLWCASLGFSEPRLAAAAARQMAELPFFHMFSHKSHEPGIRLSEELVKRAPVPMARAFFCNSGSEANDTAIKMIWYINNALGRPQKKKIIARKRAYHGVTVASASLTGLPANHRDFDLPIANILHTSSPDYYREGKPGESEEAFAKRCADELEAMILAEDPNTVAAFFAEPIMGAGGVVLPPKGYFEHIQAVLKKYDILLVADEVICGFGRTGQYWGSQTFGLKPDILTCAKALSSAYMPISAVLVTEEVYKPLRDNSGKIGTFGHGYTYSAHPVAAAVALETLAIYDERDILGNVAVSGARLQERLRSFADHPLVGNVRGIGLIGAIELVADKATHGAFPASDAVGPRVVTKAEEAGVILRAMAGDVVAFSPPLIITPEEVDQMMDRFTVALEAVTAEVLG

SEQ ID NO: 1524 - protein, 305 aa, Nicotiana tabacum
MGLDYYDVLKVSRNASEEDLKRSYKRLAMKWHPDKNSQNKKEAEAKFKQISEAYDVLSDPQKRQIYDVYGDDALKSGQFASASPTSAGSNGRGFRFNTRDAEAIFAEFFGGSDSNSAAGVGRKAAPVENKLPCSLEELYKGSRRKMKISRILLDDSGKPTTVEEVLAIHIKPGWKKGTKITFPEKGNYEPGATPGDLIFVIDEKPHAVFKRDGNDLVINQKISLLDALTGKTISLITLDGRELTIPITDVVKPGHEHIIPNEGMPISKERGKKGNLKIKFDIKFPSRLSADQKSDIRRVLCRNSD

SEQ ID NO: 1525 - protein, 490 aa, Escherichia coli O157:H7
MSRMAEQQLYIHGGYTSATSGRTFETINPANGNVLATVQAAGREDVDRAVKSAQQGQKIWAAMTAMERSRILRRAVDILRERNDELAKLETLDTGKAYSETSTVDIVTGADVLEYYAGLIPSLEGSQIPLRETSFVYTRREPLGVVAGIGAWNYPIQIALWKSAPALAAGNAMIFKPSEVTPLTALKLAEIYSEAGLPDGVFNVLPGVGAETGQYLTEHPGIAKVSFTGGVASGKKVMANSAASSLKEVTMELGGKSPLIVFDDADLDLAADIAMMANFFSSGQVCTNGTRVFVPAKCNAAFEQKILARVERIRAGDVFDPQTNFGPLVSFPHRDNVLRYIAKGKEEGARVLCGGDVLKGYGLDNGAWVAPTVFTDCSDEMTIVREEIFGPVMSILTYESEDEVIRRANDTDYGLAAGIVTADLNRAHRVIHQLEAGICWINTWGESPAEMPVGGYKHSGIGRENGVMTLQSYTQVKSIQVEMAKFQSIF

SEQ ID NO: 1526 - protein, 498 aa, Bacillus halodurans C-125
MQKISTNDSKLNPRLVAFLNGGPKKLFINGEWVDSFSGQSFETMNPATGETLALVAEAGSEDIDFAVKAARKAFDEGPWSKMSAAERSRLIYKLADLIEDHKEALAQLETLDNGKPIRETANADIPLVIEHFRYFAGWATKIVGQTIPVQGHYFNYTRHEAIGVVGQIIPWNFPLLMAAWKLGAALATGCTVVLKPAEQTPLSALYLGELINEAGFPKGVVNIVPGFGHSAGTPLVNHPAVDKVAFTGSTDVGKLIMKQASESLKRVTLELGGKSPNIILPDADLSKAVPGSLMGIMFNQGQVCCAGSRLYVQKKQYDHVVADLVSLTNEIQQGDGLLEQTTMGPLISNQQQSRVKNYIDRGVEEGAELLTGGNIPYDQGYFVAPTIFADVDHSMTIAKEEIFGPVVAAMPFDSIDDLIDKANDSDYGLAAGVWTQDIKKAHYIAHRIKAGTIWVNCYNVFDAASPFGGYKQSGIGREMGSYALENYTEVKSVWVNMD

SEQ ID NO: 1527 - protein, 378 aa, Arabidopsis thaliana
MANHLQVPLTKPDRVKEEQEVEEEARLLARRLANAAASPMVLKAALELGVIDTITTVGGGDLWLSPSEIALRLPTKPCNLEAPALLDRMLRFLVSHSVLKCRTVIEENGQTGKVERVYAAEPVCKYLLNKSDDVSGSFASLFMLDLSDVFIKTWTHLEDVILEGRDAFSSAHGMKLFEYIQADERFGKVFNRAMLESSTMVTEKVLKFYEGFKDVKTLVDVGGGLGNTLGLITSKYPHLIGINFDLAPVLANAHSYPGVNHVAGDMFIKIPKGDAIFMKWILHDWTDEQCVAILKNCWKSLEENGKLIIVEMVTPVEAKSGDICSNIVFGMDMTMLTQCSGGKERDLYEFENLAYASGFSRCAIVCAVYPFSVIEIYK

SEQ ID NO: 1528 - protein, 320 aa, Buchnera aphidicola str. APS (Acyrthosiphon pisum)
MIKKIGVLTSGGDAPGMNAAIRGVVRTALSERLEVFGIYDGYLGLYENRMVQLDRYSVSDMINRGGTFLGSARFASFYQDKIRSIAVQNIKKRKIDALVVIGGDGSYIGAQKLTEMGIPCISIPGTIDNDVSGTDYTIGYFTALQTVVEAIDRLRDTSSSHQRISIVEVMGRHCGDLTLAAAIAGGCEFIVLPEIDYKKEDLVIEIQAGIAKGKKHAIVAITEYICDVEELAQYIEKKTNRETRATILGHIQRGGAPVVYDRILASRMGAYSVELLIKGYQGKCVGIQNEKMVFNDIKNALKNMKRTFKKDWLITAKKLY

SEQ ID NO: 1529 - protein, 150 aa, Zea mays
MAMAYKMATEGMNVKEECQRWFMEMKWKKVHRFVVYKIDERSRAVLVDKVGGPGEGYEELVAALPGDDCRYAVFDFDFVTVDNCQKSEIFSIACKIFFIAWSPAASRIRAKILYATSKQGLRRLLDGVHYEVQATDPSEMGFDVIRGRAQ

SEQ ID NO: 1530 - protein, 275 aa, Arabidopsis thaliana
MSLFLKDDSIQIREVWNDNLESEMALIREVVDDFPFVAMDTEFPGIVCRPVGTFKTNTEYHYETLKTNVNILKMIQLGLTFSDEKGNLPTCGTDNKYCIWQFNFREFDLESDIYATDSIELLRQSGIDFVKNNEFGIDSKRFAELLMSSGIVLNENVHWVTFHSGYDFGYLLKLLTCQNLPETQTGFFEMISVYFPRVYDIKHLMKFCNSLHGGLNKLAELLDVERVGICHQAGSDSLLTSCTFRKLQENFFIGSMEKYSGVLYGLGVENGQIVH

SEQ ID NO: 1531 - protein, 167 aa, Zea mays
  misc_feature (41)..(41): Xaa can be any naturally occurring amino acid
MRGILTALGCSDWPQAKRARILACSRRMKHRGPDWTALYQXHEGNFLAQQRLTVISPLSGDQTLFSEDRTVVAAASGEIYNHKNVRKKVTGTPNFSTGSDCEVIIPLYYKYEENFVDTLDGEFAVVVYDTRDRTYTTDRDAIGVKPLYIGCGSDRSGCIAAEKNALN

SEQ ID NO: 1532 - protein, 180 aa, Arabidopsis thaliana
MASSMLSSATMVASPAQATMVAPFNGLKSSAAFPATRKANNDITSITSNGGRVNCMQVWPPIGKKKFETLSYLPDLTDSELAKEVDYLIRNKWIPCVEFELEHGFVYREHGNSPRYYDGRYWTMWKLPLFGCTDSAQVLKEVEECKKEYPNAFIRIIGFDNTRQVQCISFIAYKPPSFTG

SEQ ID NO: 1533 - protein, 137 aa, Triticum aestivum
SAEAALVELLLDEPERRVCELALPVLDRLCTCAEGRAELVAHAAGVAVVGKKVLRVSDAASERAVRVLRSVARHAATPAVLQEMAHAGVVGKLCLALRSELCGVKTKEKAHEVLKLHSRIWRSSPCLSPKFLALYPS

SEQ ID NO: 1534 - protein, 520 aa, Zea mays
MGEAQDYYNTSTALAGAAAAGLALLAVCSYYLLVGRRRGKAPKRYAPVVGTVFHQLYHVRRLHDYHTDLFRQRKTFQLLVPAGRRQIYTCDPAVVEHILRTNFANYGKGSFNYENMTDLLGDGIFAVDGDKWRQQRKIASYDFSTRALRDFSGAVFKRNAARLAGIVSGNAASGQPMEFQGLALRATMDSIFTIAFGLDLDTLGGSAEGSRFAAAFDDASEFTLLRYVNAFWKAQRFLGVGSEAALKKRVKVVDEFVYKRIRERAQELSDSKMATEDTVPDSRQDMLSRFIHTATNESGTVDYKYLRDIILNIVIAGKDTTAGALAWFLYMACKHPEIQEKICQEAAKATSASETAGVDEFAQSLTDEALNKMHYLHAALTETLRLYPSVPLDNKQCFGDDVLPDGSSVSKGDIVFYVPYAMGRMEYLWGKDAEVFRPERWLDQDGEFQQESPFKFTAFQAGPRICLGKEFAYRQMKIFAAVLLRFFVFRLRDGDKASVNYRTMITLHIDEGLHLTATAR

SEQ ID NO: 1535 - protein, 349 aa, Oceanobacillus iheyensis HTE831
MEALNLYGIEDLRYEDTPKPMIEKDDDVIIKVKSVGICGSDTSRYKKLGPYVEGMTFGHEFAGEVIEVGKSVTNFKSGDRVVACPTFSCGNCHYCREGHPTRCVELTVIGARNPGAYAEYTKLPEGHVKILPDSIDDDTAALVEPSAVVAHGFYRASITPGSSVAIMGVGSIGLLAVQWAKIFGASKVIAIDIDDHKLKIAQELGADIVVNPMKENAEGIVKQHTDELGVDLAVESAGSPITSEQVLALPKKGGEVVFLGIPYGDITLKRYYFEKIVRNELRILGSWNALSAPFPGKEWNATLHYMSTGQLNIKPMISHRLGLQAGPEIFHQITNKLSDAVKVIFHPGK

SEQ ID NO: 1536 - protein, 157 aa, Brassica rapa subsp. pekinensis
SNADKLLTEFIEKQLIDYAKNSKKVVGNSTSLLSPYLHFGEISVRRVFQCARMKQIIWARDKNGQGEESAVLFLRGIGLRDYSRYICFNFPFTHEQSLLSHLRFFPWDADVEKFKAWRQGRTGYPLVDAGMRELWATGWMHNRIRVIVSSFAVKFLL

SEQ ID NO: 1537 - protein, 475 aa, Staphylococcus epidermidis ATCC 12228
MRNFTKQYINGEWVDSASGETIDVINPATEEVMGKIAKGNEEDVNKAVDAADKVYLEFRHSSVEERRELLDKIVKEYQNRKNDLIEAITDELGAPLSVSENVHYQMGLNHFTAARDALDSFQFEEQRGDDLVVKEAIGVAGLVTPWNFPTNQTSLKLAAAFAAGSPVVLKPSEETPFAAIILAEIFDKVGVPKGVFNLVNGDGSGVGNPLSEHPKVRMMSFTGSGPTGSKIMEKAAKDFKKVSLELGGKSPYIVLDDVDVEEAANATTKKVVNNTGQVCTAGTRVLIPESIKEDYLTAVKEAFSKVKVGQPREEGTQVGPIISKKQFDQVQDYIDKGINEGAELFYGGPGKPEGLDKGYFARPTIFINVDNHMTIAQEEIFGPVMSVITYNNLDEAIEIANDTKYGLAGYVIGKDKDTLRHVARSIEAGTIEINEAGRKPDLPFGGYKESGLGREWGDYGIEEFLEVKSIAGYFK

SEQ ID NO: 1538 - protein, 344 aa, Oceanobacillus iheyensis HTE831
MKALVKTELGHGNLHIQNVEEPSVSSHQVKIKVAYAGICGSDIHTYEGHYKVAAPVTLGHEFSGRIVEVGEGVTDFKVGDRVTSETTFSICGECRYCQTGDYNLCNHRKGLGTQQNGGFTNYLIAREESLHHLPDEVDDRSASMTEPLACTYHAIQKINIKPGDLVVVLGPGPIGLLAAQVAKSYGATVMMSGLDNDKIRLDKAKEVGIDYVINIQEEDIKEKIAALTDGYGVDVVLECSGSIHAANQGLDLLRKKGSYAQVGIFPDSHVKFDMEKVIQKEIHVVGSRSQKSADWEPSLQLMKEKKVDAKALVTHEFTIDQWDEAYQAIKDGEAIKVLLKPLQD

SEQ ID NO: 1539 - protein, 268 aa, Mesorhizobium mediterraneum
RVTRHTMVHEQMSRFFTGFRRDAHPMAVMCGVVGALSAFYHDSTDISDPYQRMVASMRLIAKMPTIAAMAYKYHIGQPFIYPKNELNFAANFLHMCFAVPCEEYKINPVPARAMERIFILHADHEQNASTSTVRLAGSSGANPFACIAAGIACLWGPAHGGANEAALNMLGEIGHVDHIPEFIARAKDKNDPFRLMGFGHRVYKNYDPRAKIMQKTAHEVLGELGIKDDPLLDIAMELEKIALTDSYFIEKKLYPNVDFYSGITLKAL

SEQ ID NO: 1540 - protein, 57 aa, Triticum aestivum
MAVEGTDNCIDIILAIILPPLGVFFKFACGIEFWICLLLTFFGYLPGIIYAVWVITK

SEQ ID NO: 1541 - protein, 347 aa, Solanum tuberosum
MADECAAFVKGTELPVKRPREEEAETEMEAANNSNNNNGCSTNEKEEPSPYISSVLPGWFSEISPLWPGEAHSLKVEKILFQGKSDYQNVLVFQSSTYGKVLVLDGVIQLTERDECAYQEMITHLPLCSIPNPKKVLVIGGGDGGVLREVSRHSSVEQIDICEIDKMVVEVAKQFFPDVAVGYEDPRVNLRIGDGVAFLKNVPAGTYDAVIVDSSDPIGPAQELFEKPFFESIAKALRPGGVVATQAESIWLHMHIIEEIVANCRQIFKGSVNYAWTTVPTYPSGMIGFMLCSTEGPAVDFKNPINPIDDESPVKTIEPLKFYNSEIHQASFCLPSFAKRVIETKGK

SEQ ID NO: 1542 - protein, 502 aa, Avicennia marina
  misc_feature (158)..(158): Xaa can be any naturally occurring amino acid
MAIRIPSRQLFIDGKWREPVNRKRLPIVNPATEETIGDIPAATAEDVNIAVEAARKAFFHNGGKDWATASGAHRAKYLRAIAAKVTEKKEELAKLEVLDCGKPLEEAAWDMDDVAGCFEYFADLAERLDSNQIPVSLPMDTFKCHVLKEPIGVVGLVXPWNYPLLMATWKVAPALAAGCTAILKPSEIASVTCLELAQVCKEVGLPAGVLNILTGLGPEAGAPLASHPHVDKITFTGSGATGSKIMTAAAQLVKPVTLELGGKSPIVVFEDVDLDTAAEWTLFGCFWTNGQICSATSRLLVHESIATTFLEKLVKWCEKIKISDPLEEGCRLGPIISRGQYEKVMKFISTAKEEGATILCGGARPEHLEKGYFVQPTIITDVKTSMQIWIEEVFGPVLGVKTFSKEDEPFELANDPHYGWAAAVLSQDLERCERMTKAFQAGIVWVNCSQPCFCQAPWGGKKRSGFGRDLGEWGLDNYLNVKQVTRYVSSEPWDWYKSPSKL

SEQ ID NO: 1543 - protein, 268 aa, Rhizobium galegae
RVTHHTMVHEQMSRFFTGFRRDAHPMAVMCGCVGALSAFYHDSTDITDPHQRMVASLRMIAKMPTLAAMAYKYHIGQPFVYPQNNLDYASNFLRMCFAVPCEEYVVNPVLSRAMDRIFILHADHEQNASTSTVRLAGSSGANPFACIAAGIACLWGPAHGGANEAALNMLTEIGTVDKIPEYIARAKDKNDPFRLMGFGHRVYKNYDPRAKIMQKTTHEVLGELGHKDDPLLQVAMELERIALTDEYFIEKKLYPNIDFYSGITLKAM

SEQ ID NO: 1544 - protein, 268 aa, Sinorhizobium terangae
  misc_feature (68)..(68): Xaa can be any naturally occurring amino acid
RVTHHTMVHEQMSRFFTGFRRDAHPMAVMCGCVGALSAFYHDSTDITDPHQRMVASLRMIAKMPTIAXMAYKYHVGQPFVYPKNDLDYASNFLRMCFAVPCEEYVVNPVLSRAMDRIFILHADHEQNASTSTVRLAGSSGANPFACIAAGIACLWGPAHGGANEAALNMLAEIGTVDRIPEYIARAKDKNDPFRLMGFGHRVYKHYDPRAKIMQKTTHEVLAELGHKDDPLLEVAMELERIALTDEYFIEKKLYPNIDFYSGITLKAL

SEQ ID NO: 1545 - protein, 459 aa, Brassica rapa
MTSINVKLLYHYVITNLFNLCFFPLTAIVAGKAYRLTIDDLHHLYYSYLQHNLITIAPLFAFTVFGSVLYIATRPKPVYLVEYSCYLPPTHCRSSISKVMDIFYQVKKSCPSRNGTCDDSSWLDFLRKIQERSGLGDETHGPEGLLQVPPRKTFAAAREETEQVIIGALENLFKNTNVNPKDIGILVVKSSMFNPTPSLSAMVKNNFKLRSNVRSFNLGGMGCSAGVIAIDLAKDLLHVHKNTYAFVVSTENITYNIYAGDNRSMMVSNCLFRVGGAAILLSNKPGDRRRSKYELVHTVRTHTGADDKSFRCVQQGDDENGKIGVSLSKDITDVAGRTVKKNIATLGPLILPLSEKLLFFVTFMGKKLFKDKIKHYYVPDFKLAIDHFCIHAGGRAVIDVLEKNLALAPIDVEASRSTLHRFGNTSSSSIWYELAYIEAKGRMKKGNKVWQIALGSGFK

SEQ ID NO: 1546 - protein, 268 aa, Rhizobium etli
RVTHHTMVHEQMSRFFTGFRRDAHPMAVMCGCVGALSAFYHDSTDITDPHQRMVASLRMIAKMPTLAAMAYKYHIGQPFVYPKNDLDYASNFLRMCFAVPCEEYVVNPVLSRAMDRIFILHADHEQNASTSTVRLAGSSGADPFACIAAGIACLWGPAHGGANEAAPNMLTEIGTVDRIPEYIARAKDKNDPFRLMGFGHRVYKNYDPRAKIMQKTTHEVLGELGVKDDPLLEVAMELERIALTDEYFIEKKLYPNIDFYSGITLKAL

SEQ ID NO: 1547 - protein, 275 aa, Desulfovibrio desulfuricans G20
MASISVRQAGCYYYPHRHAKSHTTSDHADIRGAACYAGSNIRHNSCPFHHAVRSVSKETYMEFFLDTADLDEIRLAGKQGLIDGVTTNPTLLSRQGGDWKKRMQQICDEVDGPVSLEVISPDAEGMLREAEELVRYGDNVVIKVPMTAEGLIATRTLTGKGIKTNVTLVFSAMQALLAAKAGATYVSPFLGRLDGIGHEGMEIVSQIRTIFDNYGYETKILAASIRHAQHVLDSALVGADVVTVPYSVLRQLMHHPLTDSGLDAFLADWNKLTQS

SEQ ID NO: 1548 - protein, 345 aa, Marinomonas mediterranea
MRGFFVTATNSAVEMLIANSNTFFILLGAIMVFAMHAGFAFLEVGTVRSKNQVNALVKIMTDFAISALVYFFIGYQIAYGINFFESAATLAEQSGYALVKFFFLMTFAAAIPAIISGGVAERARFYPMLISAAVIVGVAYPFLEGLIWNGNYGFQDWLETQFGAPFHDFAGSIVVHGFGGWVALAAIILLGTRNGRFRGDKLVAFAPSNIPFLALGAWILCIGWFGFNVMSAQTLDGISGLVAVNSLMAMVGGIIAAMILGKNDPGFIHNGPLAGLVAVCAGSDIMHPIGALATGLVAGALFTWLFTLIQQKFQHIDDVLGVWPLHGICGAWGGIAAGIFGLESL

SEQ ID NO: 1549 - protein, 458 aa, Brassica rapa
MTSINVKLLYHYVITNLFNLCFFPLTAIVAGKAYRLTIDDLHHLYYAYLQHNLITIAPLFAFTVFGSVLYIATRPKPVYLVEYSCYLPPTHCRSSISKVMDIFYQVRKADPSRIGTCDDSSWLDFLRKIQERSGLGDENHGPEGLLQVPPRKTFAAAREETEQVIIGALENLFKNTNVSPKDIGILVVHSSMFNPTPSLSAMVNNFKLRSNVRSFNLGGMGCSAGVIAIDLAKDLLHVHKNTYALVVSTENITYNIYAGDNRSMMVSNCLFRVGGAAILLSNKPGDRRRSKYELVHTVRTHTGADDYSFRCVQQGDDENGKTGVSLSKDITDVAGRTVKKNIATLGPLILPLSEKLLFFVTFMGKKLFKDKIKHYYVPDFKLAIDHFCIHAGGRAVIDVLEKNLALAPIDVEASRSTLHRFGNTSSSSIWYELAYIEAKGRMKKGNKVWQIALGSGFK

SEQ ID NO: 1550 - protein, 459 aa, Brassica oleracea var. alboglabra
MTSINVKLLYHYVITNLFNLCFFPLTAIVAGKAYRLTIDDLHHLYYSYLQHNLITIAPLFAFTVFGSVLYIATRPKPVYLVEYSCYLPPTHCRSSISKVMDIFYQVRKADPSRNGTCDDSSWLDFLRKIQERSGLGDETHGPEGLLQVPPRKTFAAAREETEQVIIGALGNLFKNTNVSPKDIGILVVNSSMFNPIPSLSAMVVNTFKLRSNVRSFNLGGMGCSAGVIAIDLAKDLLHVHKNTYALVVSTENITYNIYAGDNRSMMVSNCLFRVGGAAILLSIKPGDRRRSKYELVHTVRTHTGADDFSFRCVQQGDDENGKTGVSLSKDITDVAGRTVKKNIATWGPLILPLSEKLLFFVTFMGKKLFKDKIKHYYVPDFKLAIDHFCIHAGGRAVIDVLEKNLALAPIDVEASRSTLHRFGNTSSSSIWYELAYIEAKGRMKKGNKVWQIALGSGFK

SEQ ID NO: 1551 - protein, 475 aa, Rhizobium sp. NGR234
MKHARKFYIDGEWVEPSVSKTLEVIDPSTEQPMGTIALGSAADAEKAVAAARRAFASYSQTSKQERVELLRRILTILKRRNDELGDIISREMGAPLAMARAEQAGIGAAHFEQAIKSFETFAFDYMQGTTRIVHEPVGVVAMITPWNWPINQIACKVAAALATGCTMVLKPSEIAPFNAVLFAEIMDEAGVPKGVFNLVQGDGPTVGAALASHPDVDMVSFTGSTRAGIAVAQAAAPTVKRVHQELGGKSPNIILRSADFPAAVAAGVRRCFGNSGQTCTAPTRMLVPAERMDEAGAIAARQADALVVGPPSDSRTDLGPVASAAQFDKIQALIERGIAEGAELVAGGLGRPSHLNAGYYVRPTVFARVTNQMSIAREEIFGPVLSIIGYDSEDEAIAVANDTPYGLAAYIQGDPKETRALAGKLRSGTVRLNSSGWDSAAPFGGYKQSGNGREYGKFGLHEFTEIKGIVGFLNE

SEQ ID NO: 1552 - protein, 243 aa, Zea mays
  misc_feature (24)..(24): Xaa can be any naturally occurring amino acid
  misc_feature (71)..(71): Xaa can be any naturally occurring amino acid
HRRRPRQLQELPKPDLPPLPKPVXPPRPDLPPLPKPEEQPPLPKPELPVPPQPLPIPPQPLPKPELPVPPXLFPVPPQPLPVPPQPMPKPELPVPPQPLPKPDMPVPPESLPKPELPVPPQPLPKPELPVPPEPLPKPELPVPPQPLLKPELPVPPEPLAKPELPMPPQPLPKPELPVPPEPLPKPELPVPPEPLPKPELPVPPEPLPKPELPPPVLPGELPPKPELVPLPPKAEIMPPLPKP

SEQ ID NO: 1553 - protein, 173 aa, Lemna gibba
MMVSTAAVARVRPAQTNMVGAFNGCRSSVAFPATRKANNDLSTLPSSGGRVSCMQVWPPEGLKKFETLSYLPPLSVEDLAKEVDYLLRNDWVPCIEFSKEGFVYRENNASPGYYDGRYWTMWKLPMFGCTDASQVIAEVEEAKKAYPEYFVRIIGFDNKRQVQCISFIAYKPT

SEQ ID NO: 1554 - protein, 283 aa, Hordeum chilense
MKIFLLFALLGLATTITTATVQFDPSGHGVQRPQQSYPQWQPVPQQQPFPQQDPQQQLLPQQQPFSQQQQLPQQHPFPQQMPLLPQPPQFPQQQPFAQPQQPLTQQPYPQEQPLSQQQPSVEEQQQLNVCKEFLLQQCNPNEKVSSLQSVIPFLRPQTWQQNSCQLKRQQCCRQLANINEQSRCPAIQTIVHAIVMQQQQVQQQVGHGFIQSQPQQLGQGMPIYPQQQPGHGFFLPQQQAQSFNLVRSLVIQTLPMLCNVHVPPYCSTTTAPFGSMPTGISGQ

SEQ ID NO: 1555 - protein, 475 aa, Mesorhizobium loti MAFF303099
MDTQMLIGSKFENGAETEESILNPKTGATILNLPEASQAQIEAAVAAAEKAFVSWSRTTPAQRSGYLLKIADRIEAEAKEFAALEALNCGKPINSVLNDEIPAIVDCYRFFAGAVRSMPGVVAGEYLPGHTSMVRRDPIGIVASIAPWNYPLMMMAWKLAPAIGGGNTVVFKPSEQTPLTALRLARILAEILPEGVVNVVLGRGDSVGNALINHPKVNMISITGDVATGKKVLQAAAKSVKRTHLELGGKAPVIVFDDADLGAVVNGLRAFGYYNAGQDCTAACRIYAGKKIYDKLVADLSSAVSTIKYNQPDDTENEIGPLISRRQRDRVSSFVERASELKHIEITTGGRPGEGTGFYYQPTVVAGALQEDEIVRREVFGPVVSITRFTEVDEAVNWANDSDYGLASSVWTKDVSRAMATAARLQYGCTWINTHFMLTNEMPHGGLKQSGYGKDMSLYALEDYTAVRHVMVAHA

SEQ ID NO: 1556 - protein, 284 aa, Hordeum chilense
MKIFLLFALLGLATTITTATVQFDPSGHGVQRPQQSYPQWQPVPQQQPFPQQDPQQQLLPQQQPFSQQQQLPQQHPFPQQMPLLPQPPQFPQQQPFAQPQQPLTQQPYPQEQPLSQQQPSVEEQQQLNVCKEFLLQQCNPNEKVSSLQSVIPFLRPQTWQQNSCQLKRQQCCRQLANINEQSRCPAIQTIVHATVMQQQQVQQQVGHGFIQSQPQQLGQGMPIYPRHQPGHGFFLPQQQAQSFNLVRSLVIQTLPMLCNVHVPPYCSTTTAPFGSMPRHRWPMK

SEQ ID NO: 1557 - protein, 136 aa, Neurospora crassa
MMSRQLRYIIYKLSDDFKEIVIESTSEGATENYDEFREKLVNAQTKSASGAISKGPRYAVYDFEYKLASGEGSRNKVTFIAWSPDDAGIKSKMVYASSKEALKRSLSGIAVELQANEQDDIEYEQIIKTVSKGTAA

SEQ ID NO: 1558 - protein, 479 aa, Burkholderia cepacia R18194
MEEAKHFIAGEWTLPAQLETIAVVDPSDGQPFASIARGTAPDIERAVAAARDAFAGPWGAASAAERGRVLMRLSARVAGSIEELAAIEARDTGKPLKQARADAAALARYFEFYAGAADKLHGETLPYQAGYTVLTVREPHGVTGHIVPWNYPMQIFGRSVGAALAAGNACVVKPAEDACLSLLRVAELAVEAGLPAGALNIVTGYGHEAGAALARHPGIDHISFTGSPATGKLVTQMAAENHVPVTLELGGKSPQIVFADADLEAALPVLVSAIVQNGGQTCSAGSRVLIERAVYEPLVERLATAFNGLRVGPSRADLDCGPLINAKQQQRVWDFLSDAQHDGIPMAAHGQVVADAPESGFYQAPALLRDVPPSHRLAQEEVFGPVLAAMRFVDEDEAVALANGTPYGLVAGIWTRDGARQMRLARRLRAGQVFINNYGAGGGVELPFGGVGHSGHGREKGFEALYGFTMLKTIAIRHG

SEQ ID NO: 1559 - protein, 117 aa, Brassica napus
MATVGRNIAAPLLFLNLIMYLIVLGFASWCLNRYINGQTNHPSFGGNGATLFFLTFSILAAVIGIASKLAGANHIRFWRNDSLAAAGSSSIVAWAVTALAMGLACKQINIGGWRGWR

SEQ ID NO: 1560 - protein, 112 aa, Bartonella sp. Rl3725tl
ANEACLKMLQEIGSIKRIPEFIARAKDKNDPFRLMGFGHRVYKNYDPRAKIMQQTCHKVLKELNIQNDPLLDIAIELEKIALSDEYFIEKKLYPNVDFYSGIILKALGFPTE

SEQ ID NO: 1561 - protein, 337 aa, Glycine max
MAKETSVVYLYPSKSQVWGENFDHKKLVITTLAANGKKEESNGAPNDTYPAFPGWYADVSWPGEAHTYKIEKILFHGKSEFQELLVFESSRQGKVAILDGHIQLTENDEFAYQEMLTHLALCSIPDPKKVLLIGGGDGGILREISRHSSVEHIDICELDQMVIDVYSEFFPDIAVGYEDPRVHVHISDGVAFINSVPEGTYDVIISDAFPAMGHSADVLADECFLESVAKALRPGGVFSAPADSLWHKNFVVADTIANCKKIFKGSVNYAWTTVPTYASGVIGFMLCSTEGPPVNFKHPINKLNPEKNGVAKGPTKFYNPEIHAAAFCLPSFVDKVD

SEQ ID NO: 1562 - protein, 381 aa, Glycine max
  misc_feature (154)..(154): Xaa can be any naturally occurring amino acid
  misc_feature (160)..(160): Xaa can be any naturally occurring amino acid
  misc_feature (168)..(168): Xaa can be any naturally occurring amino acid
YSNFELLCSSTCFLTGPDHMMFEVWNPLGIVGVITAFNFPCAVLGWNACIALVCGNCVVWKGAPTTPLITIAVTKLVAEVLERNKLPGAIFTSFCGGADIGQAIAKDTRIPLVSFTGSSKVGLMVQQTVNERFGKCLLELSGNNAIIVMDDADXSNWLYXYFVCCCGXTGQRCTTCRRLFLHESIYTDVLDQLVEVYKQVKIGNPLEKGTLVGPLHTRTSVENFQKGISVIKSQGGKILTGGSVLESGGNFVQPTIVEISPDAPVVKEELFGPVLYVMKFQTLEEAIALNNSVPQGLSSSIFTQRPGTIFKWIGPRGSDCGIVNANIPTNGAEIGGAFGGEKATGGGREAGSDSWKQYMRRSTCTINYGSELPLAQGINFG

SEQ ID NO: 1563 - protein, 172 aa, Schizosaccharomyces pombe
MGDPTNNNDSETKPNPATYWKSRFPVARIKKIMQADQDVGKVAQVTPVIMSKALELFMQSIIQESCKQTRLHQAKRVTVSHLKHAVQSVEQFDFLQDIVEKVPDAPPIKAERKTKRPRARRAANEGEHNESVPAKKVKKNTVKEEEIEKDDESATTETPVKEEPTGEETEAD

SEQ ID NO: 1564 - protein, 180 aa, Musa acuminata
MVSSMMVSSAATFTRASPAQSSMVAPFTGLKSASAFPVTRKPNADLSHLPSNGGRVQCMKVWPIEGVKKFETLSYLPTMKDEALVKQIEYLLRSKWIPCLEFCPKGFVWRENHRSPGYYDGRYWTMWKLPMFGCTDAVQVAKEVEECKKEYPHAFIRIIGFDNNRQVQCISFIAYKPTGY

SEQ ID NO: 1565 - protein, 346 aa, Pirellula sp. 1
MKALLLTEYKNMQVTDVDEPEVGPDDVLVQVEACGICGSDIHGYDGSTGRRIPPLVMGHEAAGVVVQVGENVRDLELGARVTFDSMVSCGNCEFCREGHGNLCDNRMVLGVSCGDYRRHGAFAERISVPRRIVYRLPDTLPFEHAALVEAVSVAVHAAEVTPIKLGDTAVVVGAGMIGLLAVQAVRAAGATQVIAVDLNDKRLETAGTLGADVLLRADQVDVPEKVRELTGGRGADVALEVVGATPTVKTAIESVRKGGAVTLVGNVSPTIELPLQSVVTREIRLQGTCGCNGEYPQCIDLMNRGVINVEPLITAKISLADGPKWFDRLHAGDAEQMKVLVCPRSE

SEQ ID NO: 1566 - protein, 425 aa, Lactobacillus johnsonii NCC 533
MTTVIKNGTVYQNGHLIKADVLIDGQKIKAIGTDLEGEEIIDASGMIVSPGLVDVHVHYRDPGQTYKEDIKTGSQAAARGGFTTVGAMPNVTPVPNTAELMDKMVRENQKKGLVHILQYGPVTNDETTDIIPDYAALKKAGAFALSNDGHGVQSAQTMYLAMQKAKENNLIIAAHAQDDSLFNKGIVNEGIAAEKLDLPPVTELAETTQIARDLLLAQKTGVHYHICHVSTKTSVELVRLAKARGIKVTCEVAPHHILLTDSDIPEDNAYFKMNPPLRSKEDQVALLVGLLDGTIDLIATDHAPHAKAEKQGGMRGAAFGITGSETAFSTLYTRFVKEEKVFTLEQLLSLLTDKPATVFGIENAGLLAPGENADIAIFDIEHQREIKEDDFKSKGVNTPFTGHKVYGETVMTFVDGKVVYQRGTK

SEQ ID NO: 1567 - protein, 389 aa, Clostridium tetani E88
MDVKEMALKLHSEKKGKLEVVGKISVKNREDLALAYTPGVAEPCVHISKDKNKVYEYTTKGNMVAVVTNGTAVLGLGNIGPEAALPVMEGKALLFKEFANVDAFPICLDTEDPEEIIRTVKLMAPGFGGINLEDIKAPECFYIEERLKKELDIPVFHDDQHGTAIVVLAGIYNALKIVDKKLEEAKILINGAGSAGIAICKLLLNAGACNIVMCDINGSLVEGDENLNPAQKEIAKVTNKEKEKGKLVDVIKDKDIFIGVSGPKILTKEMVSTMAKDSIVFAMANPEPEILPDEAKAGGARVVATGRSDFPNQINNVLVFPGIFRGALDVKAREINEEMKIAAARGVANLIKEEDLNEEYIIPDPFNKEVAESVSKEVRRIAKEMNICK

SEQ ID NO: 1568 - protein, 331 aa, Zea mays
MYPTYLCNSCGLPVSRNVSELFVSAMEKKKKKKKKKKKKKKKKKKKKKKKQAPKPSSYWGRPSAASHRIAFYNSKLSLLAAMAKNYPTVSAKYSEAVKKARRKLRALIAEKSCAPLMLRLAGHSAGTFNKSSRTGGPFGTMKCPGELAHGANAGLDIAVRLLEPIKEEFPTLSYANFYQLAGVVAVEVTGGPEIPFHPGREDKPQPPPEGRLPDVTKGSDHLRQVFGKQMGLSDQDIVALSGGHTMGRCHKERSGFEGAWTTNPLVFDNSYFKELLRGDKEGLLQLPSAKALLGDLVFRLLGGKYAANGKAFFDDYKEAHLKLSELGDADA

SEQ ID NO: 1569 - protein, 483 aa, Pneumocystis carinii
  misc_feature (133)..(133): Xaa can be any naturally occurring amino acid
  misc_feature (195)..(195): Xaa can be any naturally occurring amino acid
MCCKAIKLGNARVFPVTTFRDAKKVRWINLLKSGKAKRNKSGKIIKQGEFQSKDVQDARIQPYRRWFSNTRVISQDVLNMFRESFAEKLNDPCKVLLKQNKLPMSLLMEPTKTRKANIIDIEPFDDTFGKKSXRKRAKLYASSIENLSNFAFESYENYIKKNSEYENVDKNIQKSFEAIFSKGTSKRIWNELYKXIDSSDVIIQLLDARNPLGTRCKHVEEYLKKEKPHKHMILLLNKCDLIPTWCTREWIKQLSKEYPTLAFHASINNPFGKGSLIQLLRQFSKLHSNRRQISVGFIGYPNTGKSSVINTLRSKKVCNTAPIPGETKVWQYVRMTSKIFMIDCPGIVPPNSNDSETEIIIKGALRIEKVSNPEQYIHAILNLCETKHLERTYQISGWENDSTKFIELLARKTGKLLKGGEVDESSIAKMVINDFIRGKIPWFIAPAQENDPSNIKLSNNTLVEKNHLTTLDDEIYNDANPNA

SEQ ID NO: 1570 - protein, 479 aa, Anabaena variabilis ATCC 29413
MSDLVLFWHRRDLRITDNIGLATARQHSSKVVGVFCLDPNILERDDVAPVRVTYMIGSLQELQQRYVQAGSQLLILRGDPVQAIPHLAEALNAKAVFWNWDVEPYSQTRDRAIIATLKDKGIQCLTHNWDQILHSPDEIRSGSNTPYTVYTPFWKNWSSKPKAKPVETLHNVEGLTEAEQELAQKAGVKALPTAKDLGFFWDADLIIAPGEAAAQAKLAEFTAKAITEYQEQRNFPGVNGTSQLSAALKFGVIGIRTVWQTTLEALENSRSEETTTSIRTWQQELAWREFYQHAMYNFPELADGAYRATFKNFPWETNEEHFQAWCEGKTGYPIVDAAMRQMNESGWMHNRCRMIVASFLTKDLLINPQWGEKYFMQKLIDGDLSANNGGWQWSASSGMDPKPLRIFNPASQSQKFDPDAEYIRQWVPELRSMDTEYLVTGKITPLERHAVGYVKPIVDHQKQQQLFKQRYQQQKAIGI

SEQ ID NO: 1571 - protein, 262 aa, Malus x domestica
MSPTDSSREENVYMAKLAEQAERYEEMVEFMEKVAKTVDVEELTVEERNLLSVAYKNVIGARRASWRIISSIEQKEESRGNEDHVAIIKEYRSKIETELSKICDGILNLLESHLIPSASSAESKVFYLKMKGDYHRYLAEFKTGGERKEAAESTLLAYKSAQDIALAELAPTHPIRLGLALNFSVFYYEILNSPDRACNLAKQAFDEAISELDTLGEESYKDSTLIMQLLRDNLTLWTSDITDDAGDEIKEASKRESSETQQ

SEQ ID NO: 1572 - protein, 358 aa, Rhizobium sp. NGR234
MMREYSIATIPADGIGPEVIAAGRTVLATLEKRLGDVKFTVENFDWGSDYYRKHGVMMPSDGLEQLKKFDAIYFGAVGAPDVPDHITLWGLRLPICQGFDQYANVRPTKILPGITSPLRNCGPGDLDWVIVRENSEGEYSGHGGRAHRGLPEEVGTEVAIFTRVGVTRIMRYAFKLAQSRPRKLLTVVTKSNAQRHGMVMWDEIAAEVAEEFPDVTWDKMLVDAMTVRMTLKPQSLDTIVATNLHADILSDLAGALAGSLGVAPTANIDPERRFPSMFEPIHGSAFDITGKGIANPVATFWTAAQMLDHLGEQDASARLMRAVERVTGARILTPDVGGTATTREVTEAVCDAIHSSNV

SEQ ID NO: 1573 - protein, 305 aa, Glycine max
  misc_feature (140)..(140): Xaa can be any naturally occurring amino acid
  misc_feature (225)..(225): Xaa can be any naturally occurring amino acid
MEHFNNDDLEYVVDEYYDVPDFAVEDTSSDIVPELTSDVDSDFEDEFPTSNAKTDTTASEARNGKDIQGIPWERLNYSRDKYRETRLKQYKNYQNFSRSRHDLRKECLEVQKGETFYDFFFNTRLVKSTIVHFQLLRQVXVSSLAGPNIMLRNLLWATSKHDVYFMQNYSVMHWSALLRRGKEVLNVAKPIIPTLKRPGFLAQPVSRVQISTMTVKENLMVAGGXSRVSLYNLKHPGVLFCGKITTDDNAITNAVDVYSNPAGSLRVITANNDFQVRVFDAENFASLGWFKYDWSVNNTSVSPDG

SEQ ID NO: 1574 - protein, 283 aa, Hordeum chilense
MKIFLLFALLGLATTITTATVQFDPSGHGVQRPQQSYPQWQPVPQQQPFPQQDPQQQLLPQQQPFSQQQQLPQQHPFPQQMPLLPQPPQFPQQQPFAQPQQPLTQQPYPQEQPLSQQQPSVEEQQQLNVCKEFLLQQCNPNEKVSSLQSVIPFLRPQTWQQNSCQLKRQQCCRQLANINEQSRCPAIQTIVHAIVMQQQQVQQQVGHGFIQSQPQQLGQGMPIYPQQQPGHGFFLPQQQAQSFNLVRSLVIQTLPMLCNVHVPPYCSTTTAPFGSMPTGIGGQ

SEQ ID NO: 1575 - protein, 256 aa, Hordeum chilense
MKIFLLFALLGLATTITTATVQFDPSGHGVQRPQQSYPQWQPVPQQQPFPQQDPQQQLLPQQQPFSQQQQLPQQHPFPQQMPLLPQPPQFPQQQPFAQPQQPLTQQPYPQEQPLSQQQPSVEQQQQLNVCKEFLLQQCNPNEKVSSLQSVIPFLRPQTWQQNSCQLKRQQCCRQLANINEQSRCPAIQTIVHAIVMQQQQVQQQVGHGFIQSQPQQLGQGMPIYPQQQLGHGFFLPQQQAQFNLVRSLVIQTLPML

SEQ ID NO: 1576 - protein, 240 aa, Hordeum chilense
TTATVQFDPSGHGVQRPQQSYPQWQPVPQQQPFPQQDPQQQLLPQQQPFSQQQQLPQQHPFPQQMPLLPQPPQFPQQQPFAQPQQPLTQQPYPQEQPLSQQQPSVEQQQQLNVCKEFLLQQCNPNEKVSSLQSVIPFLRPQTWQQNSCQLKRQQCCRQLANINEQSRCPAIQTIVHAIVMQQQQVQQQVGHGFIQSQPQQLGQGMPIYPQQQLGHGFFLPQQQAQFNLVRSLVIQTLPML

SEQ ID NO: 1577 - protein, 256 aa, Hordeum chilense
  misc_feature (252)..(252): Xaa can be any naturally occurring amino acid
MKIFLLFALLGLATTITTATVQFDPSGHGVQRPQQSYPQWQPVPQQQPFPQQDPQQQLLPQQQPFSQQQQLPQQHPFPQQMPLLPQPPQFPQQQPFAQPQQPLTQQPYPQEQPLSQQQPSVEQQQQLNVCKEFLLQQCNPNEKVSSLQSVIPFLRPQTWQQNSCQLKRQQCCRQLANINEQSRCPAIQTIVHAIVMQQQQVQQQVGHGFIQSQPQQLGQGMPIYPQQQLGHGFFLPQQQAQFNLVRSLVIQXLPML

SEQ ID NO: 1578 - protein, 225 aa, Bacillus cereus G9241
MVIQWFPGHMAKARRQVTEKLKLIDVVIELVDARLPLSSRNPMIDEIITHKPRLVVLNKADMADDHLTKQWIAYFKEKGHMAISINAQAGQGMKEIAAACKVLVKEKFDKMVAKGIRPRAIRALIVGIPNVGKSTLINKLAKKNIAKTGDRPGVTTAQQWIKVGKEMELLDTPGILWPKFEDQLVGLRLATTGAIKDSILNLQDVAVYALRFYGETLPRAIKRAL

SEQ ID NO: 1579 - protein, 146 aa, Triticum aestivum
MSDEEHHFESSDAGASKTYPQQAGNIRKGGHIVIKGRPCKVVEVSTSKTGKHGHAKCHFVAIDIFTAKKLEDIVPSSHNCDVPHVNRVDYQLIDISEDGFVSLLTDSGGTKDDLKLPTDDNLSALMKSGFEEGKDVVVSVMSSMGE

SEQ ID NO: 1580 - protein, 110 aa, Brassica napus
  misc_feature (6)..(6): Xaa can be any naturally occurring amino acid
  misc_feature (21)..(21): Xaa can be any naturally occurring amino acid
  misc_feature (44)..(44): Xaa can be any naturally occurring amino acid
  misc_feature (46)..(46): Xaa can be any naturally occurring amino acid
  misc_feature (49)..(49): Xaa can be any naturally occurring amino acid
  misc_feature (61)..(63): Xaa can be any naturally occurring amino acid
  misc_feature (65)..(65): Xaa can be any naturally occurring amino acid
  misc_feature (89)..(89): Xaa can be any naturally occurring amino acid
  misc_feature (91)..(91): Xaa can be any naturally occurring amino acid
  misc_feature (99)..(99): Xaa can be any naturally occurring amino acid
MSGVWXFKNGVIRLVENPNQXGSDTNSRRKVMVYLPTGEVISSXSXLEXILRSLGWERYFXXXDXDLLQFHKRSSSDLISLPKDFTKFXSXYMYDIVVXNPNYFHVRDSN

SEQ ID NO: 1581 - protein, 443 aa, Brucella melitensis 16M
MFLRSMLAFPPRRDNDMSGNQELIARRERLLGRNMSLFYQDPVHLVKGEGVWLWDADGRKYLDCYNNVPHVGHCHPRVVEAICRQASTLNTHTRYLHEGILDYVERLTATFDKSLDAAILTCTGSEANDVALRMAQAVTGKTGIIATDFTYHGNTTAVSQLSTRMPPVGGYGGHVRHVPAPDSYRPLGGKGGEAFAQAWAAEVEKAIASLQESPFGFSGLIIDPFFANEGFPDLPENFLAPAVAAVRKAGGVVIADEVQPGFGRTGGHMWGHQKAGIVPDIVTLGKPMGNGHPVGAVVAGADTLNAFRKAFRYFNTFGGNPVSCAAAMAVLDVLEEEKLQANALEVGAYARQGLEKLAQKHGMIGNVRGSGLFFGAELVLDRAEKTPAAEMATRVVNEMRERGVLMNKLGIHQNATKIRPPMPFSRENADLMLSTLDDVLGGL

SEQ ID NO: 1582 - protein, 287 aa, Archaeoglobus fulgidus DSM 4304
MGLLQDYSQRREEGEGRGSNFTRFSCWSCDFCRCLCNAEIAGESGGKVCCCGGKGGGPDQHSETRSCDNSGSWGRYGLAAFAPCSSLRLPAYLHLHEIQKIVIIFYATKIMGRHLTVFIIALAAVFAACAEEKEMAKSLTVKSAFENGGKIPAKYTCDGEDISPPLYIEGLREDVKSLVIICEDPDAPMGVFTHWIAWNVEPTSEIPENVPKTKFVDEPKMVQGRNDFGKVGYNGPCPPSGEHRYYFRIYAIDTLLQGDYSRQELLRAIEGHILQYGEIYGLYSRSR

SEQ ID NO: 1583 - protein, 371 aa, Oryza sativa (japonica cultivar-group)
MAAASLAPPTASFSPAPAPGRVKAAAPLLSRRPPGRFLLRVASESSSISGDTLLGLYEKERLSHSLYANEDYDKEMFWDNLDADLRYWTRSLRPVQWYPGHIAKTEKELKEQLKLMDVVIEVRDARIPLATSHPKMDAWLGNRKRIIVMNREDMVSNEDRNAWASYFANQGTKVVYSNGQLGMGTMKLGRMAKSLASTVNTKRREKGLLPRAVRAGIVGYPNVGKSSLINRLLKRRMCPAAPRPGVTRELKWVRFGSDLELLDSPGILPMRISDQTAAIKLAICDDIGERSYDFADVAAILVQLLVRHPAVGPEAFRRRYRLDMDSDCGKMFVTKLSVHLFNGDASQAAFRILSDYRKGKFGCVALERPPT

SEQ ID NO: 1584 - protein, 166 aa, Zea mays
  misc_feature (76)..(76): Xaa can be any naturally occurring amino acid
  misc_feature (159)..(159): Xaa can be any naturally occurring amino acid
MDAVMFGLETPLMAALQHLLDVPDGDAGAGGDSDNKTGGGATRTYVRDARAMAATPADVKELPGAYAFVVDMPGLXGTGDIRVQVEDERVLVVSGERRREEREDDAKYLRMERRMGKFMRKFVLPDNADVDKVAAVCRDGVLTVTVEKLPPPEPKKPKXTIEVKVA

SEQ ID NO: 1585 - protein, 504 aa, Brucella melitensis 16M
MSKLDDNVAKAKTYLARFEKGVLNRIGGEDVAAADGATFETISPVDLKPLATVALGKAADIDRAARAAKAAFPEWAAMSGDARKKLLHKIADAIVARAEEIAFVEFMDTGQSLKFMAKAALRGAENFRFFADRAPEARDGKTLRGPGQVNMTTRVPIGPVGVITPWNTPFMLSTWKIAPALAAGCTVVHKPAEFSPLTARLLVEIAEEAGLPKGVWNLVNGFGEDAGKALTEHPDIKAIGFVGESRTGSLIMKQGADTLKRVHFELGGKNPVVVFADADLERAVDAAVFMIYSLNGERCTSSSRLLVEASIYEKFTALVAEKAKRIKVGHPLDPETVVGPLIHPVHEKKVLEYIEIGRSEGATVAAGGAKFAGPGGGCYVSPTLFTAAHNGMRIAQEEIFGPVLTAIPFKDEAEALALANDVKYGLTGYLWTNDVTRAFRFTDALEAGMIWVNSENVRHLPTPFGGVKNSGIGRDGGDWSFDFYMETKNIAFANAAHAIAKLGG

SEQ ID NO: 1586 - protein, 149 aa, Sulfolobus tokodaii str. 7
MNVKSSAFKNEDFIPVRYTCDGEDISPEIEWDKVQNAKSYALIVEDPDAPGGIFIHWIIYNIKGTKLPENIKKVEKTEFGIQGENDFGKIGYGGPCPPRTHPPHRYYFYVYALDTELPERSRITADELKNLMKGHIIDQGVIMGKYKRK

SEQ ID NO: 1587 - protein, 156 aa, Zea mays
MDAVMFGLETPLMAALQHLLDVPDGDNKTGGGATRTYVRDARAMAATPADVKELPGAYAFVVDMPGLGTGDIRVQVEDERVLVVSGERRREEREDDAKYLRMERRMGKFMRKFVLPDNADVDKVAAVCRDGVLTVTVEKLPPPEPKKPKTIEVKVA

SEQ ID NO: 1588 - protein, 443 aa, Oryza sativa (japonica cultivar-group)
MPPSTGSVPPAASTPAAGDEATAAGRVLLGRYELGGLLGRGASAKVYLARDLLTGRDVAIKSFPNPRHGGGLRGGEEDVLLRPAPIEREAAILPRLRHRHVMRLREILATRKKVHFVLDLAAGGELFSLLDASGRMTEDLARHYFRQLISAVRYCHSRGVYHRDIKPENLLLDDAGDLKVADFGLGAVADGALHHTLCGTPAYVAPEILSRKGYNPAKVDIWSCGVVLFVLAAGYLPFNDASLVNMYRKIYAGKFRCPAWFSPELRCLVRRILDPNPATRIDTEEIITHPWFRQDASHFAMAQLMQHGHDEEAKFKTEFKEDDMARDMTAFDILACSPGSDLSGLFGAEPGKERVFVGEPAAAVLSRVEEAGKKEGYMVTREGKKGTGPVYVKGENGGIVAKVCVFKIADAVSVVEVVKGYGAEAARFWKARLEPAMKPPAAI

SEQ ID NO: 1589 - protein, 348 aa, Mycobacterium leprae
MQDEGMRIGILTGGGDCPGLNAVIRAIVRTCDARYGSSVVGFQDGWRGLLENRRMQLCNDDRNDRLLAKGGTMLGTAHVHPDKLRAGLHQIKQTLDDNGIDVLIPIGGEGTLTAAHWLSQEDVPVVGVPKTIDNDIDCTDVTFGHDTALTVATEAIDRLHSTAESHQRVMLVEVMGRHAGWIALSSGLASGAHMTLIPEQPFDVEEVCCLVKRRFQRGDSHFICVVAEGAKPVPGSITLRQGGMDEFGHERFTGVAAQLGAEVEKRINKDVRVTVLGHVQRGGTPTAFDRVLATRFGVNAADASHAGEYGQMVSLRGQDIGRVPLEDAVRQLKLVPESRYDDAAAFFG

SEQ ID NO: 1590 - protein, 169 aa, Triticum aestivum
RREDVKQQHDNKNNNNNNNNIVGDEVCSAVTTDDSSAAVGSENSKSSASAKGHSKMTSKPASAAAATKSSHGRRKVKVDWTPELHRRFVQAVEQLGLDKAVPSRILELMGNEYRLTRHNIASHLQKYRSHRKHLMAREAEAASWTQKRQMYAAAGGPRKDAAAGGGPWV

SEQ ID NO: 1591 - protein, 310 aa, Magnetospirillum magnetotacticum MS-1
MKDPYLVLGVARTACDDEIKKAYRALARELHPDLNPGDTKAESRFKDISAAYDFLSDSTKRAQFDAGEIDATGSPKRRAWRTRPGPGPGAGPGAGPGAGGPRGGFGGFGENVDDIMAELFRRKQKGQAHARAKTRGGDVRHALTISFLDAAAGGTKRVTLMSGRTLEVRIPPGSTDGQTLRLKGQGHGAEDGAIPGDAFIELKVEDHPHFKRRDLDVLLDLPVSVQEAVLGGKVPVPTIDGKVMVTVPPGSNTGAVLRLKGKGIAGPQGTRGDQLVTLSVVLPEDAEFRQLVEKWGPRHGYDPRAKAGLG

SEQ ID NO: 1592 - protein, 321 aa, Oryza sativa (japonica cultivar-group)
MATIPEVPASELIQTMPRVGMGTAAFPFTSSEDTTAAMLRAIELGYRHFDTARIYATEGCVGEAVAEAVRRGLIASRADVFVTSKIWCSDLHAGRVVPAARETLRNLGMDYVDLLLVHWPVSLTPGNYDFPFPKEVILPSFDMEGVWRGMEECHRLGLARAIGVSNFSAKKLEQLLSLAAVRPAVNQVEVNPMWQQRTLREVCRREGVQLCGYSPLGAKGTPWGSAAVMDSGVLQEIAGAKGKTLAQICLRWLYEQGDVLLVKTYNEKRMKENLDIFNWELTDEERERISQLPQLRGLPGLEFISDHGPYKSVEDLWDGDV

SEQ ID NO: 1593 - protein, 322 aa, Oryza sativa (japonica cultivar-group)
MAMATIPEVPASALLPTMPRIGMGTAAFPFTSSEETTAALLRAIELGYRHFDTARLYATEGCVSEAVAEAVRRGLVASRADVFVTSKLWCSDLHAGRVVPAARETLRNLGMDYVDLLLVHWPATVAPGSYDFPFPKEEMAPAFDMEGVWRGMEECHRLGLARAIGVSNFSAKKLEQLLSFAVVRPAANQVEMNPMWQQRTLREVCRREGVQLCGYSPLGAKGTPWGSAAVMDSGVLHDIAQTKGKTLAQICLRWMYEQGDVLLVKTYNENRMKENLDIFDWELTEEERDKISKLPQQRGLTGMQFVCDNGPYKCVEDLWDGA

SEQ ID NO: 1594 - protein, 481 aa, Burkholderia cepacia R18194
MVPRTLAHIGGCSVPARSGRTFAAINPATEAVIAEVASCDAPDVDDAVRAARHAFESGAWSRCAPAERKRVLCRLGELIASHGAELALLDSLNMGKRVADAFSIDVPAAGGLFSWYGEAVDKLHGEVASTDPGNLAVVTREPLGVVGAVVPWNFPLDMVAWKVAPALAAGNSVVLKPAEQSPLSALRLAELALEAGLPPGVLNVVPGYGETAGRALGLHPDVDVLAFTGSTAVGKKFLEYAAQSNMKQVWLECGGKSPNLVFDDTDDLDLAARKACFGIFFNQGEVCSANSRLLVQRSIHDAFVDRLIAHAAAFMPGDPLDPSSGMGAIVDEQQHRRVREWIARGRDSATLAIGGGAPRVDGKGYFIEPTIFIDVKHDDAIAREEIFGPVLSVMAFDTEDEAVRLANDSIYGLAASLWTGSLSRAHRVSGRLRAGTVSVNTVDALSAQTPFGGFRQSGFGRDLSLHAIDKYTGLKTTWISY

SEQ ID NO: 1595 - protein, 463 aa, Burkholderia cepacia R18194
MNAPNFPHRTTQDYQRSDAAHHLHAFVDQKALNEEGARVMVRGEGVHLWDNDGNRYLDGMSGLWCTNVGYGRPELVDAAARQMKELSYYNMFFHTTHPSVIELSERLFALLGNRFSHVVYTNSGSESNEVLIRTVRRFWDVMGKPEKKVLIGRVNGYHGSTVGSASLGGMAFMHEMGDLPIPNITHVDEPYWYANGGDLSPEAFGKQAALSLERKILEIGADRVAAFVAEPFQGAGGMIFPPDGYWQEIERICRQYDVLLCADEVIGGFGRTGEWFAHRHFGFEPDLICVAKGLTSGYVPMGGLIMSRRVGDALVDKGGVYAHGLTYSGHPVAAAVALANLDVLEREGLVERTKTDTGPYLQKALRDAFGSHPLVGEVQGVGAVGAIQFAKNKATRERFANEADLTWHSRTVGFELGAIVRSTNGRLIVAPPLVIDHAQIDELVDTMRKAVDATAREVLGIDC

SEQ ID NO: 1596 - protein, 493 aa, Pseudomonas putida KT2440
MTLVRFQMCIDGQWRDAQSGKTFDSLNPATAQAWAQLPDADEADVELAVQAAQRAFDSKAWRSITATARGKLLRRLGDLIAENKEHLAQLESRDNGKLIRETRGQVGYLPEFFHYTAGLADKLEGGTLPLDKPDLFAYTVHEPIGVVAGIIPWNSPLYLTAIKLAPALAAGNTIVLKPSEHASATILELARLALEAGFPAGVVNVVTGYGPSTGAALTRHPLVRKIAFTGGAATARHVVRSSAENFAKLSLELGGKSPNIIFADADLDSAINGAVAGIYAASGQSCVAGSRLLVQDEIFDEFVERLIARAKRIRIGNPQDDASEMGPMATAQQLAVVEGLVAAAKAEGAKLHMGGKRADVEGDGWFYEPTLFECDSNAMTIMQEEVFGPVAAVIRFKTEEEALAMANDSQFGLAAGIWTRDLGRAHRLARDVRSGIIWVNTYRAVSAMAPIGGFKNSGYGRESGIDSVLAYTELKTVWINLSTAPMPDPFVMR

SEQ ID NO: 1597 - protein, 476 aa, Sphingomonas paucimobilis
MTAYPSLHMIIDGEAVTGGDRRTQTIVNPATGETLGELPLADTADLDRALETAQRGFQRWRNSTPQERAAVLSGAARLLMERQETLARIATMEQGKTLAESRIEVMMVAGLFNFYAGEVFRLYGRALVRPAGTRSTVTYEPVGPLAAFSPWNFPLGNPGRKLGAPIAAGCSVIMKSAEETPASALGVLQCLLDAGLPSDVAQAVFGVPDEVSRYLLASPVIRKLSFTGSTVVGKHLAKLAADDLKRTTMELGGHGPVLVFNDVDVDRVLEVMVGHKYRNAGQVCVSPTRFIVQEDVYETFRDGFAERAKALRVGNGLEDGIQMGPMANARRPDAMERLNRSAVDAGATLNAGGERIGNQGFFYAPSVLSDVPLDAEIMNEEPFGPVALINPYRTADEMIAEANRLPYGLAAYSWTNDVKMQRRIAREVETGMLGINSVAIGGADSPFGGVKWSGHGHEDGPEGVQACLVTKAVHEG

SEQ ID NO: 1598 - protein, 221 aa, Zea mays
MSAPPPPASSDDDGKPADEEGVEIREVWANNLEAEFAVIRDIVDDYPYIAMDTEFPGIVCRPLGSFRSNDEYNYATLKANVDMLSLIQLGLTLSDENGALPARGTGGRPCTWQFNFRGFDPRSDPANADSIDLLRNSGIDFDRFTTEGADTGHFAELLMSSGVLLNAELQWVTFHSGYDFGYLLKLLTGRNLPDTMPGFFDLIRIYFPVLYDIKHLMKYCG

SEQ ID NO: 1599 - protein, 426 aa, Listeria monocytogenes str. 4b F2365
MYVLKNGQVLNASGELENKDVLIQNGKVNLIADSIEVTSGEEFDATGKLIAPGFIDVHVHLREPGGEHKETILTGTQAAARGGYTTICSMPNTKPVPDSKEVMESLQAKIKETAKVRVLPYASITTSLGTDELVDFEALKEAGAFAFTDDGVGVQLAGTMYEAMKRAAALDMAIVAHCEDNSLIYGGVVHDGIFAEKEGLKGIPNIAESVQIARDVLLAEAAGCHYHVCHISTKESVRVVRDAKRAGIRVTAEVSPHHLILDEEAIPGNDGNWKMNPPLRSKEDRAALLEGLLDGTIDFIATDHAPHAAEEKNVPMEQAAFGIVGLETAFPLLYTHFVKTNEWTLKQLIDWMTVKPAECFKLPYGKLEEGSVADIVVLDLEKEANIDPATFYSKGKNTPFVGETCIGWPVATFSEGTLVYNEGEIK

SEQ ID NO: 1600 - protein, 484 aa, Triticum aestivum
MANNNSTYGENVSRKSHTPSAIVIGGGFAGIAAANALRNASFEVVLLESRDRIGGRVHTDYSFGFPVDLGASWLHGVCEENPLAPIIGRLGLPLYRTSGDDSVLFDHDLESYALYDTNGSQVPQEFVEKIGKVFEAILEETGKLREEMKEDISIAKAIAIVLERNPHLRQEGIAHDVLQWYLCRMEGWFATDADAISLQCWDQEVLLPGGHGLMVRGYRPVINTLAKGLDIRLGHRVVEIVRHWNRVEVTVSNGKTFVADAAVITVPLGVLKSNTVKFEPRLPEWKEEAIRELSVGVENKIVLHFSEVFWPNVEFLGVVSSTTYGCSYFLNLHKATGHAVLVYMPAGRLACDIEKMSDEAAAQFAFSQLKKILPNAAEPLNYLVSHWGSDENTLGSYTFDGVGKPRDLYEKLRIPVDNLFFAGEATSVQYTGTVHGAFSTGEMAAEECRMRVLEKFRELDMLEMCHPMAEQTATVSVPLLISRL

SEQ ID NO: 1601 - protein, 449 aa, Zea mays
MSASVGRTRVGRYELGRTLGEGTFAKVKFARNVETGENVAIKILDKEKVLKHKMIAQIKREISTMKLIRHPNVIRMYEVMASKTKIYIVMELVTGGELFDKIASRGRLKEDDARKYFQQLINAVDYCHSRGVYHRDLKPENLLLDASGTLKVSDFGLSALSQQVREDGLLHTTCGTPNYVAPEVINNKGYDGAKADLWSCGVILFVLMAGYLPFEDSNLMSLYKKIFKADFSCPSWFSTSAKKLIKKILDPNANNRITIAELINNEWFKKGYQPPRFETADVNLDDVNSIFDESGEPAQLVVERREERPSVMNAFELISTSQGLNLGTLFEKQTGSVKRETRFASRLPANEILSKIEAAAGPMGFNVQKRNYKLKLQGENPGRKGQLAIATEVFEVTPSLYMVELRKSNGDTLEFHKFYHNISNGLKDVMWKPESGIVEGDEARQRRSP

SEQ ID NO: 1602 - protein, 471 aa, Parachlamydia sp. UWE25
MTNPSIVWFRQDFRLEDNPALNAATQKGGPVIPVFNWVFNPEKEWQLGGASQWWLYYSLISLKNDLSELGLSLIIRKEDPLKSLLEIAHETGADTVYWNRRYEPMLIQDDAKIKTELQKQGIKAHSFNGNLLFEPWTIANKQGKPFQVFTPFWNQCLKLNDPEVPLPVPHSLKKFVGQLQTESIDSLNLLPKIKWDKGLKEVWSPGAKSAKALLKKGLTGVIDQYLDIRDLPDHDGTSLLSPYLHFGEISPRMIWQAVKENSTSKGAEGYLRQIGWREFAHHLLYHFPETPQKPLRSQFNSFSWKNDKQNLKAWQKGQTGYPIIDAGMRQLWKIGWMHNRVRLIVGSFLVKDLMIHWIEGAKWFWDTLVDADLANNTMGWQWIAGCGADAAPYFRIFNPITQGEKFDPEGNYVKKWVPELINLPKEWLHQPWEAPEEILRQSGIELGINYPKPIVNHAKAREEALQAYSRL

SEQ ID NO: 1603 - protein, 162 aa, Glycine max
  misc_feature (58)..(58): Xaa can be any naturally occurring amino acid
  misc_feature (85)..(85): Xaa can be any naturally occurring amino acid
  misc_feature (92)..(92): Xaa can be any naturally occurring amino acid
  misc_feature (97)..(97): Xaa can be any naturally occurring amino acid
  misc_feature (121)..(121): Xaa can be any naturally occurring amino acid
  misc_feature (140)..(140): Xaa can be any naturally occurring amino acid
ASSMISSPAITTINHTNTNIITPFTNLKSITNFPTKKTNNNITSITSNNKRIQYIPIXPPINKKKFKTLSYLPDLDNTQLAEKIXYLLRKEXNSLLXFHLNHNFIYHNHNRSPKYYNERYXTIYKLPIFGYTNTSQVLKXLEQAKTTYPNNCIHIMIFNNTQ

SEQ ID NO: 1604 - protein, 588 aa, Zea mays
  misc_feature (254)..(254): Xaa can be any naturally occurring amino acid
MCGILAVLGCSDWSQAKRARILACSRRLKHRGPDWSGLYQHEGNFLAQQRLAVVSPLSGDQPLFNEDRTVVVVANGEIYNHKNVRKQFTGTHNFSTGSDCEVIMPLYEKYGENFVDMLDGVFAFVLYDTRDRTYVAARDAIGVNPLYIGWGSDGSVWIASEMKALNEDCVRFEIFPPGHLYSSAGGGFRRWYTPHWFQEQVPRTPYQPLVLREAFEKAVIKRLMTDVPFGVLLSGGLDSSLVASVTKRHLVETXAAEKFGTELHSFVVGLEGSPDLKAAREVADYLGTIHHEFHFTVQDGIDAIEEVIYHDETYDVTTIRASTPMFLMARKIKSLGVKMVLSGEGSDELLGGYLYFHFAPNKEEFHRETCRKVKALHQYDCLRANKATSAWGLEVRVPFLDKEFINVAMGMDPEWKMYDKNLGRIEKWVMRKAFDDDEHPYLPKHILYRQKEQFSDGVGYNWIDGLKSFTEQQVTDEMMNNAAQMFPYNTPVNKEAYYYRMIFERLFPQDSARETVPWGPSIACSTPAAIEWVEQWKASNDPSGRFISSHDSAATDHTGGKPAVANGGGHGAANGTVNGKDVAVAIAV

SEQ ID NO: 1605 - protein, 494 aa, Sphingomonas sp.
MTSVSSSPITDTILNFIDGSYREGSEGKSFSNVNPATGAEIGVVHEASQADVADAVAAAKAALTGPWGKMTTAERVKLITAVATEIERRADDFLAAEVADTGKPRHVASHIDIPRGAANFRMFADVVSTMPGESFNTPTPDGGQAFNYTVRKPKGVVAVVCPWNFPLLLMTWKVGPALACGNTVVVKPSEETPRTAALLGEVMNAVGMPKGVYNVVHGFGPGSAGEFLTSNPDVDAITFTGETGTGQAIMQKAATGVRDISFELGGKNPAIVFADADLDKAVEGLSRSVFLNTGQVCLGTERVYVERPIFDAFVARMAAAAQDFKPGVTGDRAYLGPLISAEHREKVLGYYRRAVEDGATVVTGGGVPEISGAEAGGFFVEPTLWIDVAHGDTVMREEIFGPCCGILPFDSEDEVIALANDTVYGLCASVWTENLSRGHRVAAAMEVGVCWVNSWFLRDLRTAFGGSGHSGIGREGGVHSLEFYTEITNICVKL

SEQ ID NO: 1606 - protein, 568 aa, Zea mays
GRDLTKFACDDLTIGFFFPPPPPPPPSSGYTLLRDPRHNKGLAFSEAERDAHYLRGLLPPALASQELQEKKLMQNLRQYERPLHRYIAMMDLQERNERLFYKLLIDNVEELLPVVYTPTVGEACQKYGSIYRRPQGLYISLKDKGKILEVLKNWPERSIQVIVVTDGERILGLGDLGCQGMGIPVGKLSLYTALGGVRPSACLPITIDVGTNNEALLNDDFYIGLRQRRATGEEYHELVEEFMAAVKQNYGEKVLTQFEDFANHNAFDLLEKYRESHLVFNDDIQGTASVVLAGLLAALKVVGGTLADHTYLFLGAGEAGTGIAELIALEMSKHTGSPIEECRPKIWLMDSRGLIVASRKESLQAFKKPWAHEHGAVETLLEAVRSLKPTVLIGTSGKGGTFTKDVVEAMASQNERPVVFALSNPTSHSECTAEQAYTWTEGRAVFASGSPFPAVELDGRALVPGQSNNAYIFPGFGLGVVISGAIRVRDDMLLAASEALAEQVTEAHYAKGLIFPPFTNIRAISARIAAKVAAKAYELGLASRLPRPDDLVSYAESCMYTPTYRSYR

SEQ ID NO: 1607 - protein, 317 aa, Haemophilus influenzae 86-028NP
MTTQLDSLRNMTVVVADTGDIDAIKKYQPQDATTNPSLILSASALPQYAPLIDEAVAYAKAQSNDKAQQLIDAEDKLAVNIGLEILKIVPGRISTEVDARLSYNTQATVEKARKLIALYNAAGISNDRILIKIASTWQGIRAAEILEKEGINCNLTLLFSEAQARACAEAGVYLISPFVGRILDWYKANSDKKEYAPAEDPGVISVTKIYNYYKEYGYNTVVMGASFRNVGEITELAGCDRLTIAPALLKELQENSTALIRKLEYKGEVKAKPQPLTEAEFYWQHNSDAMAVEKLAEGIRKFAIDQEKLETMLSAKL

SEQ ID NO: 1608 - protein, 293 aa, Hordeum vulgare subsp. vulgare
MSPTLSLKLKKSSHTPQSSVSSSTMLRLFKKEAACQSPSTLPVAMDMGLEVSSSSPSSSSVSSSPEHAARRASPAKRPAGRTKFRETRHPVYRGVRRRGNTERWVCEVRVPGKRGARLWLGTYATAEVAARANDAAMLALGGRSATCLNFADSAWLLAVPSALSDLADVRRAAVEAVADFQRREAADGSLAIAVPKEASSGAPSLSPSSGSDSAGSTGTSEPSANGVFEGPVVMDSEMFRLDLFPEMDLGSYYMSLAEALLMDPPPTATIIHAYEDNGDGGADVRLWSYSVDM

SEQ ID NO: 1609 - protein, 405 aa, Glycine max
MVLEATMICIDNSEWMRNGDYSPSRFQAQADAVNLICGAKTQSNPENTVGVLTMAGKGVRVLVTPTSDLGKILACMHGLDIGGEMNLAAGIQVAQLALKHRQNKKQQQRIIVFAGSPVKHEKKMLEMIGRKLKKNSVALDIVNFGEEDEGKTEKLEALLAAVNNNDTSHIVHVPSGPNALSDVLISTPIFTGDGEGGSGFAAAAAAAAAGGVSGFEFGVDPNLDPELALALRVSMEEERARQEAAAKKASEDASKQEKDGEQQASPQDTTMTEGASAAASEAETKRTDLTDDENALLQQALAMSMDDPTINHEVRDTDMSEAAAEDPELALALQLSVEDSSKDSASQSDVSKLLADQSFVSSILASLPGVDPNDPSVKDLLASMQNQSEPQQKNEDKPPNEEEKK

SEQ ID NO: 1610 - protein, 443 aa, Oryza sativa (japonica cultivar-group)
MAEQRGNMLMKKYEMGKLLGQGTFAKVYHARNTETSESVAIKMIDKEKVLKGGLMDQIKREISVMKLVRHPNIVQLYEVMATKTKIYFVLEHVKGGELFNKVQRGRLKEDAARKYFQQLICAVDFCHSRGVYHRDLKPENLLLDENSNLKVSDFGLSALADCKRQDGLLHTTCGTPAYVAPEVINRRGYDGAKADIWSCGVILFVLLAGYLPFHDKNLMDMYKKIGKAEFKCPSWFNTDVRRLLLRILDPNPSTRISMDKIMENPWFRKGLDAKLLRYNLQPKDAIPVDMSTDFDSFNSAPTLEKKPSNLNAFDIISLSTGLDLSGMFEESDKKESKFTSTSTASTIISKIEDIAKGLRLKLTKKDGGLLKMEGSKPGRKGVMGIDAEIFEVTPNFHLVELKKTNGDTLEYRKVLNQEMRPALKDIVWAWQGEQPKQQQQPTC

SEQ ID NO: 1611 - protein, 356 aa, Oryza sativa (japonica cultivar-group)
MDQIKREISVMKLVRHPNIVQLYEVMATKTKIYFVLEHVKGGELFNKVQRGRLKEDAARKYFQQLICAVDFCHSRGVYHRDLKPENLLLDENSNLKVSDFGLSALADCKRQDGLLHTTCGTPAYVAPEVINRRGYDGAKADIWSCGVILFVLLAGYLPFHDKNLMDMYKKIGKAEFKCPSWFNTDVRRLLLRILDPNPSTRISMDKIMENPWFRKGLDAKLLRYNLQPKDAIPVDMSTDFDSFNSAPTLEKKPSNLNAFDIISLSTGLDLSGMFEESDKKESKFTSTSTASTIISKIEDIAKGLRLKLTKKDGGLLKMEGSKPGRKGVMGIDAEIFEVTPNFHLVELKKHLNTVRS

SEQ ID NO: 1612 - protein, 192 aa, Pseudomonas fluorescens PfO-1
MGAAALLLSFIPSLKSEAVPYLQQPDALYLAFFGLLNLILAPVIPYWNKGPRQHLQNLVSALLVLTVVLQTLTLIAPMPVIAGQPAVLFSLVIALVAVVLHLAVSFYKSSPAAATQSYDMSNRDTGTVKWFNTSKGFGFISRDSGDDIFVHFRAIRGEGHRVLVEGQRVEFSVMNRDKGLQAEDVIAALPRR

SEQ ID NO: 1613 - protein, 379 aa, Streptococcus mutans UA159
MSNLFQNYTRADLEFIKAEGNYLFDTQGKKYLDFSTGIGVTNLGFHPQVQVALQKQAEQIWHTPNLYQNSLQEEVAAKLMAGKDYLAFFCNSGAEANEAAIKIARKATGKQEIITFQNSFHGRTFGSMSATGQDKIKVGFGDAVPHFHYAVFNDLNSVKALVTENTAAVMLELVQGESGVLPAEQDFVTALADYCQKNGLLLIIDEVQTGMGRTGKLYAFQHYGIEPDIFTLAKGLANGVPVGAMLAKKQFGSAFGPGSHGSTFGGNKLAMAASSAVLDIMTKAGFLEQAWENAHYLQEQLTSALQVADTVTQVRGLGYMIGIETTADLGQLVKATRDRGLIVLTAGTNVIRLLPPLTLTKDEIDQGIMILQEVFEQHN

SEQ ID NO: 1614 - protein, 311 aa, Triticum aestivum
MNIQVDPSSQVQWLQQQLVPQLQQPLSQQPQQTFPQPQQTFPHQPQQQVPQPQQPQQPFLQPQQPFPQQPQQPFPQTQQPQQPFPQQPQQPFPQTQQPQQPFPQQPQQPFPQTQQPQQPFPQLQQPQQPFPQPQQQLPQPQQPQQSFPQQQRPFIQPSLQQQLNPCKNILLQQCKPASLVSSLWSIIWPQSDCQVMRQQCCQQLAQIPQQLQCAAIHSVVHSIIMQQQQQQQQQQGMHIFLPLSQQQQVGQGSLVQGQGIIQPQQPAQLEAIRSLVLQTLPSMCNVYVPPECSIMRAPFASIVAGIGGQYR

SEQ ID NO: 1615 - protein, 372 aa, Streptococcus mutans UA159
MAETNGLKDMIACDTRISAIKDNKLSYAGYDIADLMDNKARFEEVIYLLWNLHLPTAIELKQFEEKLRKNYAISDAIEQCILIQSRQHLHPMSVLRSTVSLLGVYNLKAEERSVEATYDQSIQLMAKIPTIIATFARLRQGLSPIAPRKDLGFAANFLYMLNGRLPSELEILAMNRALVLHAEHELNASTFAARVCASTLSDIYSCVTTAIGTLKGPLHGGANERVFDMLREIREYGDVDSYLQEKLNSKEKIMGFGHRVYQTQDPREKYLREMARELTKGTEHDIWYQLSKKVEICMKQKKNLIPNVDFYSATVYHVLGIDSSIFTLIFAMSRVSGWIAHIQEQQKNNKLIRPRSHYTGMRKLRYIPIERR

SEQ ID NO: 1616 - protein, 286 aa, Zea mays
  misc_feature (33)..(33): Xaa can be any naturally occurring amino acid
MAALPPAAEDPDAVEIREVWASNLEEEFAVIRXSVDVYPYVAMDTEFPGFVVTPSAEYRFTCDRNYAALEGNVNVLKLIQLGLTLSNGAGALPPCGTGGRRCIWQFNFRGFDPHTDPSSSDSIDLLRRSGIDFDLFAAEGVDSTRFAELMMSSGVVLNDDVQWVTFHSGHDFGYLLKLLTGREMPNTLDEFLKLTKTFFPVMYDIKHLMKFCGGGLYGGLSKLGELLKIERVGISHQAGSDSLLTLQCFMKLKQLYLKESVKLYDGVLFGLIPGEVEIKPVAPPIE

SEQ ID NO: 1617 - protein, 456 aa, Corynebacterium glutamicum
MALKGYTNFDGEFIEFGSVQAKEEEKRAFDNDRAHVFHSWSAQDKISPKVWAAAEGSTLYDFDGNAFIDMGSQLVSANLGHNNPRLVEAIQRQAARLTNINPAFGNDVRSDVAAKIVSMARGEFSHVFFTNGGADAIEHSIRMARLHTGRNKILSAYRSYHGATGSAMMLTGEHRRLGNPTTDPDIYHFWAPFLHHSSFFATTQEEECERALKHLEDVIAFEGAGMIAAIVLEPVVGSSGIILPPAGYLNGVRELCNKHGILFIADEVMVGFGRTGKLFAYEHAGDDFQPDMITFAKGVNAGYAPLGGIVMTQSIRDTFGSEAYSGGLTYSGHPLAVAPAKAALEIYAEGEIIPRVARLGAELIEPRLRELAEENVAIADVRGIGFFWAVEFNADATAMAAGAAEFKERGVWPMISGNRFHIAPPLTTTDDELVALLDAVEAAAQAVELTFAGALF

SEQ ID NO: 1618 - protein, 124 aa, Ralstonia solanacearum
MAITKDDILEAVSAMSVMELNDLVKAFEDKFGVSAAAVAVAGPAGGAAAPAAEEKTEFDVILKGAGANKVGVIKAVREITGLGLKEAKDLVDGAPKTVKEAMPKADADAAAKKLIEAGAEVEVK

SEQ ID NO: 1619 - protein, 348 aa, Pyrococcus furiosus DSM 3638
MSEKMVAIMKTKPEYGAELVEVDVPKPGPGEVLIKILATSICGTDLHIYEWNEWAQTRIRPPQIMGHEVAGEVVEVGPGVEGIEVGDYVSVETHIVCGKCYACKRGQYHVCQNTKIFGVDTDGVFAEYAVVPAQNVWKNPKNIPPEYATLQEPLGNAVDTVLAGPIAGKSVLITGAGPLGLLGIAVAKASGAYPVIVSEPSEFRRNLAKKVGADYVINPFEEDVVKEVMDITDGNGVDVFLEFSGAPKALEQGLQAVTPAGRVSLLGLFPGKVSIDFNNLIIFKALTVYGITGRHLWETWYTVSRLLQSGKLNIDPIITHKYKGFDKYEEAFELMRAGKTGKVVFMLK

SEQ ID NO: 1620 - protein, 191 aa, Arabidopsis thaliana
MSDEEHHFESSDAGASKTYPQQAGTIRKNGYIVIKNRPCKVSFSNISPLSSSDLIRSVHYLDSSDSFFCHLHDVVEVSTSKTGKHGHAKCHFVAIDIFTSKKLEDIVPSSHNCDVPHVNRTDYQLIDISEDGYVSLLTDNGSTKDDLKLPNDDTLLQQIKSGFDDGKDLVVSVMSAMGEEQINALKDIGPK

SEQ ID NO: 1621 - protein, 310 aa, Arabidopsis thaliana
MKQISSGEVWRWNKEVEMNSIRDCLKHCSSIAIDTEFPGCLKETPMDASEEIRYRDMKFNVDNTHLIQLGFTLFDRRGFAKTWEINLSDFDEHKCFKNDKSIAFLKSNGLNLDKIREEGIGIDEFFRDFSQILTEKDGKITWVNFQGSYDNAYLVKGLTGGKPLPETKEEFHETVQQLLGKFVFDVKKIAESCSGLSSQFGLQRIADVLQMKRVGKAHHAGSDSELTARVFTKLTFDLLNSRKQSVRRVDHQQFQLEQQQHQQFMMTRCYIPIPMPIPRPRPVMFAAHHQNPYFGGGYFRMPVQGMNYVL

SEQ ID NO: 1622 - protein, 198 aa, Agrobacterium tumefaciens str. C58
MSVASLPSFLCLSQESSRRASARRESPSSPRTWAGWIPVTGTGMRECVVALCLLLTLIFAAASPALAFNPDEVLKDPVLEQRARNLTSQLRCMVCQNQSIDDSNAELARDLRVLVRERLVQGDSDKAVIDYVVSRYGEFVLLKPRLSLRTLLLWGAPIGLTLAGIFAVFVFSRRRATQERPQKLSADEEERIRNLIEK

SEQ ID NO: 1623 - protein, 397 aa, Oryza sativa (japonica cultivar-group)
MEGGGARNGSTTGAARTGGSGGDAAAGGGGGSAGNGKPLPPCCVKARAAAPESEAKCHATVVSGWFTEPRSRGGKTSKVQYYNNPMWPGEAHSLKVEKILYQGKSPYQEVLVFESSTYGKVLVLDGIVQLTDKDECAYQEMITHLPLCSIPSPKKVLVIGGGDGGVLREICRHGSVESIDICEIDQLVIDVCKDFFPDLSVGFKDPRVRLHVGDAVEFLRNAPEGTYDAIIVDSSDPIGPAQELVEKPFFDTIARALRPGGVLCNQAESMWLHTHLIQDMLSICRETFKGSVHYAWTSVPTYPSGVIGFLLCAKEGPPVNFLTPANPIEKLEGAMEAGRDIRFYNSEMHRAAFVLPTFARRELEAYCTTVEREQQEETTAEPLKMNIMPNSEILTAS

SEQ ID NO: 1624 - protein, 180 aa, Vibrio cholerae O1 biovar eltor str. N16961
MKARHLLPVLAAAITFPALSSPVMTLTSQDIQEGSRMAKHFVFNGFGCSGDNLSPQLSWNNAPKGTKSFAITAYDPDAPTGSGWWHWVALDIAADQHNVARGAAKQLKGVRELNNDYGFSGFGGACPPQGHGMHRYQFTVWALPFEKMEIPQGASNALVGFMLRANALEQATLTATYVNE

SEQ ID NO: 1625 - protein, 569 aa, Glycine max
  misc_feature (332)..(332): Xaa can be any naturally occurring amino acid
  misc_feature (457)..(457): Xaa can be any naturally occurring amino acid
MWKLVRYAAASNLARSRRFSAAIPGPCIVHKRGADILHDPWFNKDTGFPLTERDRLGLRGLLPPRVISFEQQYDRFMNSFRSLENNTQGQPDKVVSLAKWRILNRLHDRNETLYYRVLIDNIKEFAPIIYTPTVGLVCQNYSGLFRRPRGMYFSAKDKGEMMSMIYNWPAHEVDMIVLTDGSRILGLGDLGVQGIGIPIGKLDVYVAAAGINPQRILPVMLDVGTNNQKLLEDHLGLRQPRLEGEEYLSIVDEFMEAVHARWPKAIVQFEDFQMKWAFETLKRYQKRFCMFNDDIQGTAGVALAGILGTVRAQGRPLTDFVNQKIVVVGAGXGLVTTERNSLDPAAAPFAKNPRDIEGLTEGASIIEVVKKIRPHVLLGLSGVGGIFNEEVLKAMRESVSTKPAIFAMSNPTMNAECTSIDAFKHAGENIVFASGSPFENVDLGNGKVGHVNQANNXMYLFPGIGLGTLLSGAHLITDGMLQAASECLASYMAEEDILKGILYPSVDSIRDVTAEVGAAVLRAAVEEELAEGHGDVGPKELSHMSKDEAVEYVRSNMWYPVYSPLVHEK

SEQ ID NO: 1626 - protein, 502 aa, Zea mays
MATANGSSKGPFEVPKVEVRFTKLFIDGKFVDAVSGKTFETRDPRTGEVIASIAEGGKADVDLAVKAAREAFDNGPWPRMTGYERGRILHRFADLIDEHVEELAALDTVDAGKLFAVGKARDIPGAAHLLRYYAGAADKVHGATLKMAQRMHGYTLKEPVGVVGHIVPWNYPTTMFFFKVGPALAAGCAVVVKPAEQTPLSALFYAHLAREAGVPAGVLNVVPGFGPTAGAAVAAHMDVDKVSFTGSTEVGRLVMRAAAESNLKPVSLELGGKSPVIVFDDADLDMAVNLVNFATYTNKGEICVAGTRIYVQEGIYDEFVKKAAELASKSVVGDPFNPSVSQGPQVDKDQYEKVLRYIDIGKREGATLVTGGKPCGDKGYYIEPTIFTDVKDDMTIAQDEIFGPVMALMKFKTVEEVIQKANNTRYGLAAGIVTKNIDVANTVSRSIRAGAIWINCYFAFDPDAPFGGYKMSGFGKDMGMDALDKYLQTKTVVTPLYNTPWL

SEQ ID NO: 1627 - protein, 557 aa, Zea mays
  misc_feature (32)..(32): Xaa can be any naturally occurring amino acid
  misc_feature (68)..(68): Xaa can be any naturally occurring amino acid
  misc_feature (179)..(179): Xaa can be any naturally occurring amino acid
  misc_feature (212)..(212): Xaa can be any naturally occurring amino acid
  misc_feature (231)..(231): Xaa can be any naturally occurring amino acid
  misc_feature (428)..(428): Xaa can be any naturally occurring amino acid
  misc_feature (496)..(496): Xaa can be any naturally occurring amino acid
  misc_feature (506)..(506): Xaa can be any naturally occurring amino acid
  misc_feature (535)..(535): Xaa can be any naturally occurring amino acid
MAATVRRAASSVLSRFLLTKPSPSPAASAAGXSPALLGAGAAALRHRFSTAPASAAAAAEEPIQPAVXRVKHTQLLINGNFVDAASGKTFPTLDPRTGEVIARVAEGDSEDIDRAVAAARRAFDEGPWPRMTAYERCRVLLRFADLIERHAEEVAALETWDNGKTLAQAAGAEVPMVAXRCVRYYAGWADKIHGLVAPADGAHHVQVLHEPXGVAGQIIPWNFPLLMFAWXKVGPALACGNTVVLKTAEQTPLSALYVANLLHEAGLPEGVLNVVSGFGPTAGAALSSHMGVDKLAFTGSTGTGQIVLELAEESNLKPVTLELGGKSPFIVMDDADVDQAVELAHQAVFFNQGQCCCAGSRTFVHERVYDEFVEKSKARALKRVVGDPFRDGVEQGPQIDGEQFNKILRYVQSGVDSGATLVAGGDRXGDRGFYIQPTVFADAKDEMKIAREEIFGPVQTILKFSGVEEVIRRANATPYGLAAGVFTRSLDAANTXLSRALRAGTXVWVNCYDVFDATIPFGGYKMSGVGREKGXYALRNYLQTKAVVTPIKNPAWL

SEQ ID NO: 1628 - protein, 503 aa, Zea mays
MATANGSSKGSFEVPKVEVRFTKLFIDGKFVDAVSGKTFETRDPRTGEVIASIAEGGKADVDLAVKAAREAFDNGPWPRMTGYERGRILHRFADLIDEHVEELAALDTVDAGKLFAVGKARDIPGAAHLLRYYAGAADKVHGATLKMAQRMHGYTLKEPVGVVGHIVPWNYPTTMFFFKVGPALAAGCAVVVKPAEQTPLSALFYAHLAREAGVPAGVLNVVPGFGPTAGAAVAAHMDVDKVSFTGSTEVGRLVMRAAAESNLKPVSLELGGKSPVIVFDDADLDMAVNLVNFATYTNKGEICVAGTRIYVQEGIYDEFVKKAAELASKSVVGDPFNPSVSQGPQVDKDQYEKVLRYIDIGKREGATLVTGGKPCGDNKGYYIEPTIFTDVKDDMTIAQDEIFGPVMALMKFKTVEEVIQKANNTRYGLAAGIVTKNIDVANTVSRSIRAGAIWINCYFAFDPDAPFGGYKMSGFGKDMGMDALDKYLQTKTVVTPLYNTPWL

SEQ ID NO: 1629 - protein, 309 aa, Salmonella typhimurium LT2
MPLEKGIAELVAGFIAAGRPSSREQNIDDRRAGYIASTTLAGETETRVQVEDIELDAMTFRVVSPLNATGKLPCIIYYHGGCFVSGGFATHDNQLRQLAFYSRCRVIAAQYRLAPDHTFPAAHNDAETGANTIWKYAQKLGIDRENITLAGDSAGGHLALVTALRLKAARQWQPAQLILIYPMLDATARFASYTCNGLDYIITRDTLLSGYEMYMPRTDPLHPEASPLWREDFAGLPSTHIITAEFDPLRDEGEALYQRFQEQGVECTCQRYLGVIHGFFQLGGVSQAARSAMRDVAWRVVSPSTGKMT

SEQ ID NO: 1630 - protein, 513 aa, Triticum aestivum
  misc_feature (263)..(263): Xaa can be any naturally occurring amino acid
  misc_feature (268)..(268): Xaa can be any naturally occurring amino acid
  misc_feature (281)..(282): Xaa can be any naturally occurring amino acid
MDSPLPFLVAMSSLLLILAGLYMTRLGLLGKRRRSYPPVAGTMLHQLLNWGRLPEYMTELSRRYRTFSMLTLTRSSVHTVDPANVEYILRTNFANYGKGTMTHDTMEDLLGDGIFNVDGAKWRHQRKVASFEFSTRMLRDYSSGVFRDMAAQLAGIVAAAAAAGERLSMEDLFMRSTLDSIFKIGFGVNLGALSGSNQKGAAFARAFDNASEQVLYRILDPLWKDKRLLNIVSKAAMKRSMRTIDDFVYTVIDNKIDHMARDXNNSAXKQDILSRFLLERXXTPGCFDHKHMRDIILNFMIAGRDTTELTLTSFLYVMCREQRIQDKIAREVREATSTGDRQDAGGVEEFTARLTEDAIGSMHYLHAALTETLRLYPAVPVDVKCCFSDDTLPDGHAVRRGDMVNYQPFAMGRMKFLWGDDAEEFRPERWLDGDGVFVPESPYKFTAFQAGPRICLGKEFAYRQMKIFAATLLYLFRFEMWDRGSTVGYRPMLTLKMDGPLYVRASPRRSIGN

SEQ ID NO: 1631 - protein, 466 aa, Zea mays
KTFDTRDPRTGDVLAHVAEADKADVDLAVKSARDAFEHGKWPRMSGYERGRIMSKLADLVEQHTEELAALDGADAGKLLLLGKIIDIPAATQMLRYYAGAADKIHGDVLRVSGRYQGYTLKEPIGVVGVIIPWNFPTMMFFLKVSPALAAGCTVVVKPAEQTPLSALYYAHLAKMAGVPDGVINVVPGFGPTAGAALASHMDVDSVAFTGSTEVGRLIMESAARSNLKTVSLELGGKSPLIIFDDADVDMAVNLSRLAVFFNKGEVCVAGSRVYVQEGIYDEFVKKAVEAARSWKVGDPFDVTSNMGPQVDKDQFERVLKYIEHGKSEGATLLTGGKPAADKGYYIEPTIFVDVTEDMKIAQEEIFGPVMSLMKFKTVDEVIEKANCTRYGLAAGIVTKSLDVANRVSRSVRAGTVWVNCYFAFDPDAPFGGYKMSGFGRDQGLAAMDKYLQVKSVITALPDSPWY

SEQ ID NO: 1632 - protein, 294 aa, Saccharomyces cerevisiae
MKTLVHVASVEKGRSYEDFQKVYNAIALKLREDDEYDNYIGYGPVLVRLAWHISGTWDKHDNTGGSYGGTYRFKKEFNDPSNAGLQNGFKFLEPIHKEFPWISSGDLFSLGGVTAVQEMQGPKIPWRCGRVDTPEDTTPDNGRLPDMDKDAGYVRTFFQRLNMNDREVVALMGAHALGKTHLKNSGYEGPWGAANNVFTNEFYLNLLNEDWKLEKNDANNEQWDSKSGYMMLPTDYSLIQDPKYLSIVKEYANDQDKFFKDFSKAFEKLLENGITFPKDAPSPFIFKTLEEQGL

SEQ ID NO: 1633 - protein, 443 aa, Glycine max
MDRRSHPTGTVSTRNILFNKYEIGKLLGQGNFAKVYHGRNLSTNESVAIKVIKKERLQKERLVKQIKREVSVMRLVRHPHIVELKEVMANKAKIFMVVEYVKGGELFAKVAKGKLTEDLARKYFQQLISAVDFCHSRGVTHRDLKPENLLLDQNEDLKVSDFGLSTLPEQRRADGMLVTPCGTPAYVAPEVLKKKGYDGSKADLWSCGVILFALLCGYLPFQGENVMRIYRKAFRAEYEFPEWISPQAKNLISNLLVADPGKRYSIPDIMRDPWFQVGFMRPIAFSIKESYVEDNIDFDDVENNQEEEVTMRKPARPFYNAFEIISSLSHGFDLRSLFETRKRSPSMFICKFSASAVLAKVEAVAKKLNFRVTGKKEFVVRMQGTEEGRKGKLAMTVEVFEVAPEVAVAEFTKSAGDTLEYVKFCEEQVRPSLKDIVWSWQGD

SEQ ID NO: 1634 - protein, 511 aa, Zea mays
MASNGCNGNGNGNGNGKAAPAGVVVPEIKFTKLFINGEFVDAASGKTFDTRDPRTGDVLAHVAEADKADVDLAVKSARDAFEHGKWPRMSGYERGRIMSKLADLVEQHTEELAALDGADAGKLLLLGKIIDIPAATQMLRYYAGAADKIHGDVLRVSGRYQGYTLKEPIGVVGVIIPWNFPTMMFFLKVSPALAAGCTVVVKPAEQTPLSALYYAHLAKMAGVPDGVINVVPGFGPTAGAALASHMDVDSVAFTGSTEVGRLIMESAARSNLKTVSLELGGKSPLIIFDDADVDMAVNLSRLAVFFNKGEVCVAGSRVYVQEGIYDEFVKKAVEAARSWKVGDPFDVTSNMGPQVDKDQFERVLKYIEHGKSEGATLLTGGKPAADKGYYIEPTIFVDVTEDMKIAQEEIFGPVMSLMKFKTVDEVIEKANCTRYGLAAGIVTKSLDVANRVSRSVRAGTVWVNCYFAFDPDAPFGGYKMSGFGRDQGLAAMDKYLQVKSVITALPDSPWY

SEQ ID NO: 1635 - protein, 393 aa, Streptococcus mutans UA159
MAEKVSFEEGKLQVPDKPVIPYIEGDGVGQDIWKNAQIVFDKAIAKVYGGHKQVIWREVLAGKKAYNETGNWLPNETLEIIKTHLLAIKGPLETPVGGGIRSLNVALRQELDLFACVRPVRYFKGVPSPLKHPEKTAITIFRENTEDIYAGIEWNAGTAEVQKVINFLQDDMQVKKIRFPKSSSIGIKPISIEGSQRLIRAAIEYALANNLTKVTLVHKGNIQKFTEGGFRKWGYELAKREYAAELASGQLVVDDIIADNFLQQILLKPERFDVVALTNLNGDYASDALAAQVGGIGISPGANINYQTGHAIFEATHGTAPDIAGQDLANPSSVLLSGCMLFDYIGWSKVSDLIMKAVEKAIANGQVTIDFAKELGVEALTTRQFSEVLLTYL

SEQ ID NO: 1636 - protein, 321 aa, Burkholderia cepacia R18194
MSTTTLTVRVARKWQEARDICGFEFVSDDGSPLPHFDAGAHIDVHLPGGFVRQYSLCNHPEHGDRYEIAVLRDADGRGGSRAIHDDVRQGDTVRIGVPRNQFALVPDAPHHLLLAGGIGVTPILSMAQRLFSSGTPFDLHYCARSTDRMAFAERINAAAFHDRARFHVDDGAPAQRFDLAAVLAAAPAGTHLYVCGPRGFMDAVLNAARERNWAEARLHYEFFGGTVASSGSDRAFQVRIASSGKVIDVPAECTVIAALAANGVDVLTSCEQGVCGTCATRVLQGEPDHRDSYLTAEEQAAGDQFMPCCSRARSDLLVLDL

SEQ ID NO: 1637 - protein, 133 aa, Brassica napus
MINLRIPILVSFMFFLVFISSSLLFATPIFAARVGHSLVQEEATKIPQYNRLEESEEPEIPEDPEEPEIPEDPEVPEEPEELPKESEEGSFEFPSWIPSFPFPGTNGGLPKTEKTKPTSVISEATSSGSNKKP

SEQ ID NO: 1638 - protein, 152 aa, Glycine max
  misc_feature (21)..(21): Xaa can be any naturally occurring amino acid
  misc_feature (27)..(27): Xaa can be any naturally occurring amino acid
  misc_feature (45)..(45): Xaa can be any naturally occurring amino acid
  misc_feature (47)..(47): Xaa can be any naturally occurring amino acid
  misc_feature (59)..(59): Xaa can be any naturally occurring amino acid
  misc_feature (107)..(107): Xaa can be any naturally occurring amino acid
  misc_feature (112)..(112): Xaa can be any naturally occurring amino acid
  misc_feature (116)..(116): Xaa can be any naturally occurring amino acid
PPPSSSSDGCVIEVRDRRIPXSTSHPXKRILVLNREDMISTADRXAXADYFTRNGTKVXFSNGQLGMGTMKLGRLAKELAADVNVRRRTKGLLPRAVQAGIVGYPNXGKSSXVNRXLKRRMCPAAPRPGVTRELRWVRLGKDLELLDSPGIL

SEQ ID NO: 1639 - protein, 359 aa, Glycine max
MASQLLRRTFGSRFLANPRAFSSAASTPIRATLFPGDGIGPEIADSVKQIFQAADVPIEWEEHYVGTEIDPRTQSFLTWESLESVRKNKVGLKGPMATPIGKGHRSLNLTLRKELNLYANVRPCYSLPGYKTRYDNVNLITIRENTEGEYSGLEHQVVRGVVESLKIITRQASLRVAEYAFHYAKAHGRERVSAIHKANIMQKTDGLFLKCCREVAEKYPEITYEEVVIDNCCMMLVKNPALFDVLVMPNLYGDIISDLCAGLIGGLGLTPSCNIGEGGIALAEAVHGSAPDIAGKNLANPTALLLSGVTMLRHLNLHDKAEQIQKAILNTIAEGKYRTADLGGSSKTTEFTKAIIDHL

SEQ ID NO: 1640 - protein, 342 aa, Oryza sativa (japonica cultivar-group)
MAGGGVGASAAAAATIPEAALRSGKPMPLVGMGTASFPLDAPQLPATVRDAVLRAIDAGYRHFDTAAAYGTEAPLGEAVLEAVRAGMVASRDDLYITSKLWISDTHPGRVLPALRRTLRNLQMVYIDLYLIHWPIRLRVEQETPSPVYDNDFVMMDMEGVWKDMEECQRLGLTKAIGVSNFTCKKLNTLLSFATIPPAANQVEINPYCRQNKLREFCKEKEIQLCAYSPLGASGTIWGSNAVLDCPVLKHIAVQKGKTVAQVCLRWLHEQGDCIIVKSFNERRMRENLEIFDWELTDADRQEISALPEFRGNRDFYVHESGPYKTTDEFWDGEITGPQLKTC

SEQ ID NO: 1641 - protein, 507 aa, Mycobacterium avium subsp. paratuberculosis str. k10
MTVFARPGSAGALMSYESRYDNFIGGQWVAPARGRYFENPTPVTGQTFCEVARSDEADVDKALDAAHAAAPAWGKTAPAERAAILNKIADRIEENLESLAVAEVWDNGKPIREALAADIPLAADHFRYFAGALRAQEGSLSQIDDDTVAYHFHEPLGVVGQIIPWNFPILMGAWKLAPALAAGNAVVLKPAEQTPVSVLYLMSLIGDLLPPGVVNVVNGFGAEAGKPLASSNRIAKIAFTGETTTGRLIMQYASQNLIPVTLELGGKSPNIFFSDVMAKADDYQDKALEGFTMFALNQGEVCTCPSRSLIQADIYDEFLELAAIRTKAVRQGDPLDSETMLGSQASNDQLEKVLSYIAIGKDEGATIITGGERAELGGDLSGGFYMQPTIFAGNNKMRIFQEEIFGPVVAVTSFTDYDDAISIANDTLYGLGAGVWSRDGNTAYRAGRDIQAGRVWVNCYHAYPAHAAFGGYKQSGIGRENHKMMLDHYQQTKNMLVSYSNKAQSFF

SEQ ID NO: 1642 - protein, 146 aa, Zea mays
QDRLLPIANVGRIMKQILPPNAKISKEAKETMQECVSEFIGFVTGEASDKCHKEKRKTVNGDDLCWAFGALGFDDYVDPMRGYLHKYREVEGDRAAAAASSSRGGGDHHPASASTSTSPAAAAAPGHFMFGAAAIDRPDNNTSSAR

SEQ ID NO: 1643 - protein, 280 aa, Streptococcus mutans UA159
METVVLSNGVKMPILGFGVFQVPDLEECERVVTEAIKVGYRLLDTAQVYGNEEAVGNAVRKSGLAREEFFITTKVWISNAGYEKAKASLDESLRKLQTDYVDLVLIHQPFGDYYGTWSALEAYYKSGKIKAIGVSNFYPDRLVDLASFNEIVPMVNQVETHVFNQQIEAKKVSEEYGVQLESWGPFAEGKNNFFTNPTLTAIGEKYGKSAAQVGLRYLIQRGVVVIPKTVHQERMVQNFDVFGFNLSDDDMADILKLDQGESLFINHYDPETVKFLANYK

SEQ ID NO: 1644 - protein, 275 aa, Triticum turgidum subsp. durum
MNIQVDPSSQVQWPQQQLVPQPQQPLSQQPQQAFPQPQQTFPHQPQQQVPQPQQPQQPFLQPRQPFPQQPQQPYPQQPQQPFPQTQQPQQPFPQSKQPQQPFPQPQQPQQSFPQQQPSLIQQSLQQQLNPCKNFLLQQCKPVSLASSLWSIILPPSDCQVMRQQCCQQLAQIPQQLQCAAIHSVVHSIIMQQEQQEQLQGVQILVPLSQQQQVGQGILVQGQGIIQPQQPAQLEVIRSLVLQTLPTMCNVYVPPYCSTIRAPFASIVAGIGGQYR

SEQ ID NO: 1645 - protein, 288 aa, Streptococcus mutans UA159
MEYITLNTGVKMPMEGFGVFQVTDPEICKESVLNAIKTGYRLFDTAAVYGNEKALGEAIHEAIEQGLVTRNELFITSKLWVQDMNYEAAKKGIERSLEKLGLDYLDLYLLHQAMRDYFGAYRALEEAYQAGKLRAIGVSNFYPNILTNFCETVSVIPAVNQIELHPFFTQEEALETARYYGVVPEAWAPLGGGRYDAFNNAILQEVASAHQKTVGQIMLRWNVQRGVVVIPKSTHKERIEENFAIWDFSLTDDEMTKIASLDMGYGDTRTKHFDPNFVRSVLNVKIHD

SEQ ID NO: 1646 - protein, 154 aa, Glycine max
  misc_feature (24)..(24): Xaa can be any naturally occurring amino acid
MSGVWGFKNGVVRLVENPEGEAAXGSRGGRRTVLVHRASSEVLIYYAALEHTLDSLDWETDYDHANLLQFHKRCTYHLIYVTIDFIMFMPMLMSDILMKNKIPFEVRDIQSMSGKRLNIIHIRTNMPTTCKAYVHCTLPATTVQRQLIVTICTT

SEQ ID NO: 1647 - protein, 491 aa, Listeria monocytogenes str. 4b H7858
MVFLSIKETALPKVQTKLFINGKWTDGDNKETKDIVNPANGEVIAKIAQAGPNETKKAIKAAKEAFPDWAKMELADRVKLLHKIADLMEEKADTLAKIMTLEQGKPLKESKGEVLTGAENFRFAAEEARRLYGETIPAPNNHAFIVKKQPIGVVAAITPWNFPGGMVTRKLAPALATGNTIVLKPSGDTPLSALAIFEIFEEAGLPKGVANIVMGSSKEIGETLTDSDDVRKLTFTGSTKVGQTLFKQSAETLKKISLELGGHAPFIVFDDANLDAAVNDLVAAKFRNNGQVCVSPNRIFVAKEIKEKFTKALVAKVKQLKVGNGLDDVNVGPLIREDAIDKIDKQLKNATDKGAKVLTGGGRLTGSDYDKGNFYKPTVLDNVTREMDIFYEETFGPVIPLITFETEDEAIEMANDSEFGLASYFYTKDLARVEKVGAALEYGMVGANEIVISNPETPFGGVKHSGFGRENGHYGMEEYIQVKFINLKYRD

SEQ ID NO: 1648 - protein, 280 aa, Zea mays
  misc_feature (201)..(201): Xaa can be any naturally occurring amino acid
MDPMDIVGKSKEDVSLPKSTMFKIIKEMLPPDVRVARDAQDLLVECCVEFINLLSSESNEVCSREEKKTIAPEHVIKALSDLGFREYIEEVYAAYEQHKLETLDSPKAGKFTRIAMTEDDAAAEHQRMFAVARARMNNGAPKPKEPEQEPPQLPQAQPQLQLHTEPQQPMQSQVQLHSQTQHYLQPQLQLHSQPQLQPLSXQLPPQLQVHQQLQQPPQVQVHQQPEVQPQEAQLQSSAQQTSQPQPQAQLQSQGHSQAQLQAGLLGQLQTQAQTGPDMDS

SEQ ID NO: 1649 - protein, 438 aa, Mycobacterium avium subsp. paratuberculosis str. k10
MSTALGGKVLLPDSPQFAGAKQVFNTNYNGSTPAAVVTPTSAADVQKAMAFAAAHNLKVVPRSGGHSYTGASTANGTMVLDLRQLPGDANFDAATGQVTVTPATSLYTMHRTLAAVGRGVPTGTCPSVGAAGHALGGGMGAQSRHAGLLCDQLTSASVVLPSGQAVTASAASNPDLFWALRGGGGGNFGVTTSLTFATFPTKDVDAVNLNFPPQSFAQVLVGWQNWLRTADPNSWALADATVDAMGVHCRILATCPAGSGNSAAAAITQAVGIQPSGVETHTFNYMDLVNYLAVGNLNPQPLGYVGGSDVFPTVNAAVAQGIAAAVNAFPRNAGRMLAIMHALDGALATVAPAATAFPWRRQSALVQWYVETSGDPAAATNWLASAHQAVQQYSVGGYVNYLEANQSPARYFGPNLSRLSAVRQKYDPGRVMFSGLNY

SEQ ID NO: 1650 - protein, 479 aa, Magnaporthe grisea 70-15
MHRVTKAVVLAALTVCTALASPLSKIALLDDCLSAAEVPVDAPGSTDWLLDSMTFNLRLNYTPAAIATPTTIPQTQAAVSCAASAGLKANAKSGGHSYASFGTGGEDGHLVIQLDRMNNVSLDVDNGIATVQGGARLGRVASELYKQGKRAISHGTCPGVGVGGHALHGGYGMSSHMKGLMLDWLVGATVVLANSSVVECSSVENTDLFWAIRGAGSSMGVVAEMRFETFEAPDEVTYFIAQVPWKNTTAVDGFRALQEFAAEQMPAELNMRLFITRQFANLEGMYWGNKTVLQQTLAPLVTATGAKLQYSQTDNWLGQLTHFGNGLNLDQSRPYKMIQAFVDYWFNKGKATRRDWYVQVDLHGGKNSAVSRPEADSAAYAHRNHLLLFLFYDRVDTKGVYPSDGFAFINEFVGDLTKTIGEDDGETWGRYPNYPDSRLSPESAQRGYWGSHLQRLREIKTAVDPGDMFHYPQGVPPAV

SEQ ID NO: 1651 - protein, 343 aa, Listeria monocytogenes str. 1/2a F6854
MKAVVKTNPGYDQMELKDVEEPQVYGDKVKIKVAFTGICGSDIHTFKGEYKNPTTPVTLGHEFSGVVVEVGPDVTSIKVGDRVTSETTFETCGECIYCKEHDYNLCSNRRGIGTQANGSFAEFVLSREESCHVLDERISLEAAALTEPLACCVHSALEKTTIRPDDTVLVFGPGPIGLLLAQVVKAQGATVIMAGITKDSDRLRLAKELGMDRIVDTLKEDLAEVVLGMTGGYGAERVFDCSGAVPAVNQGLPLTKKKGDFVQVGLFAEKKNAIDEESIIQREIAYIGSRSQKPSSWILALDLLANGKINTDKMITKVYGLDDWREAFEAVMAGNEIKVLVKS

SEQ ID NO: 1652 - protein, 134 aa, Aspergillus niger
DTAGQEDYDRLRPLSYPQTDVFLVCFSVTSPASFENVREKWFPEVHHHCPGVPCLIVGTQTDLRDDPAVREKLARQKMQPIRKEDGDRMAKELGAVKYVECSALTQYKLKDVFDEAIVAALEPAPKKSKKCVLL

SEQ ID NO: 1653 - protein, 350 aa, Listeria monocytogenes str. 1/2a F6854
MRAAVLYENNVIKAEQIDEATCGKDQVRVEVKAVGICGSDIHKMQTRWKYPLPAVMGHEFAGVVTEIGSEVTNVAIGDRVAGIPLEPCMECNYCKAGDFALCDNYRMVGSHFHGGFAENVVMKADNVISIGDLDFEEGAMIEPLAVSMHGVLGIQPRLGDTVIVFGIGTIGILVVQCLLLAGVKDIIAVDISDKKLADAREFGCKYTINPKNEDLKERVFAYTNGLGADIALECAGSKITQEQCLLVTKKKGKVGFLGIAYADVLLHEEAFENIFRRELTLKGFWNSYSAPFPGEEWRTSIEFVKQGRIKLKPLISHRYKLEETKEAFDMILSREHDYNKVMILPQKGDD

SEQ ID NO: 1654 - protein, 275 aa, Triticum turgidum subsp. durum x Hordeum chilense
MNIQVDPSSQVQWPQQQPFLQPHQPFSQQPQQIFPQPQQTFPHQPQQQFPQPQQPQQQFLQPRQPFPQQPQQPYPQQPQQPFPQTQQPQQPFPQFQQPQQPFPQPQQPQQSFPQQQPSLIQQSLQQQLNPCKNFLLQQCKPVSLVSSLWSIILPPSDCQVMRQQCCQQLAQIPQQLQCAAIHSVVHSIIMQQEQQEQLQGVQILVPLSQQQQVGQGILVQGQGIIQPQQPTQLEVIRSLVLQTLPTMCNVYVPPYCSTFRAPFASIVAGIGGQYR

SEQ ID NO: 1655 - protein, 489 aa, Gibberella zeae PH-1
MALLSVNLRDGLILTAVITILLYIWEKKTAKITRNGEPLRKPPNTLPLVGNGIIFLQPRQKLFSWFHRCERLYGYETLHITVPSLPPGVIVNDPQNLDFIFRNEGVFEKGEFFKQRSWDLFGHGIINVDGEFWRLQRKAGLRFLSAAALKTLTNEKLPKYLDQAIGVLEAKTNTKEVVDLQAVVHEVTTQLMGRMAYNMEMHADDDFTVAFEHASGGTAERFQNPLWFVTEMFTGARMRRSITTVKAYGKRIVTSAVADRKEAEGKTQSDAPGSLIQSLLDSIGDETLVADAALNYLSAGRDTVAQALTWTLYLLMKNPHVATKLRQSVESLRDEDTSTGDDPELLTPVRLPYVLAVFYESLRLRPPIPFEIKQAQQATTLPDGTFLPAGAIVVWCAWAMGRSHTTWGPNADDFRPERWLTTSLAGDVTVAQRPAAEFPVFNGGPRTLARLVPLFKFEPAFEGERVSKSSLTLPMEGGLPVYVQHQTPS

SEQ ID NO: 1656 - protein, 164 aa, Glycine max
  misc_feature (68)..(68): Xaa can be any naturally occurring amino acid
  misc_feature (109)..(109): Xaa can be any naturally occurring amino acid
  misc_feature (116)..(116): Xaa can be any naturally occurring amino acid
  misc_feature (125)..(125): Xaa can be any naturally occurring amino acid
  misc_feature (133)..(133): Xaa can be any naturally occurring amino acid
  misc_feature (135)..(135): Xaa can be any naturally occurring amino acid
VYRASVCMVGPFTGLKSMAGLPTKKTNYDITFIALNCGILQCMRVCPPDGKKKFETLCYLPHLDDAQXAKEVQYLLRKGWIPCLQFQLDHGFVYREHNRSPRYYDGRYXTMWDLPXFGCTDAYQXVKELQEAXTXYPNCFIRIIRFDHLSPSPCINFIAFKSPS

SEQ ID NO: 1657 - protein, 279 aa, Streptococcus pyogenes M1 GAS
MVTTVKMTSGYEIPVLGFGTYQAADGEEAYQSTLAAIKAGYRHIDTAAIYKNEESVGRAIKDSGVLREDLFITTKLWNDAHSYEGAKDALAASLDRLGLDYVDLYLIHWPNPKALRNTWKEANAQAWQYMEEAVEAGLIKSIGVSNFMVHHLEALQETAKITPAINQIRLAPGCYQKEVVDYCKANEILLEAWSPLGQGEIFDNETMQQLANKYDKTVAQVALAWSLAEGFIPLPKSVHDERIKENMAIFDVSLTQEDKKTIRYLSGMSAIPNPDTTSF

SEQ ID NO: 1658 - protein, 355 aa, Pyrococcus furiosus DSM 3638
MKQKKAWAIVKEVINEADIVVEVVDARDPIGTRNRKLERMVLESGKKLLLVMNKADLVPKDWAEEYKRKSEIPVVFISARERKGTGIFRKELKKLAKEIDKEKVKVALIGYPNVGKSTIINVLKGKHAVGTAPIPGYTKGKQLIRLTKRIWLLDTPGVVPIDDFDELVIKGGFPADKIRDPVKPALKLIKRILETRKEAITEKFGIEKFENEEEILEEIGKRRGLIKAGGEVDIEETARWFLREWQTGRFTLFGKEEKREEEYLPSFHDILEYIKKEKITEPRMILWKFGKKLEEYLGSEKRLGTIQIDEFTVAIATGFKKCPNALKFIEKVTGKTVISAECFGKKWKGIVAILE

SEQ ID NO: 1659 - protein, 394 aa, Oryza sativa
MRMEGGGGGGHGHHGGGGGGHGHHGGIGGGEAQIKGTLTHGGRYVQYNVYGNLFEVSSKYVPPIRPVGRGACGIICAVVNAQTRQEVAIKKIGNAFDNQIDAKRTLREIKLLRHMDHDNVISIKDIIRPPRRENFNDVYIVYELMDTDLHHLLRSNQPLTDDHCQYFLYQVLRGLKYVHSANVLHRDLRPSNLLLNAKCDLKIGDFGLARTTNETDFMMEYVVTRWYRAPELLLNCSEYTAAIDIWSVGCILGEIVTREPLFPGKDYVHQLRLITELIGSPDDSSLGFLRSDNARRYVRSLPQYPKQQFRARFPTMSSGAMDLLERMLVFDPSKRITVDEALCHPYLASLHEIYDEPVCPAPFSFDFEQPSLTEEDIKEIIWREALKFNPEPIH

SEQ ID NO: 1660 - protein, 430 aa, Mycobacterium avium subsp. paratuberculosis str. k10
MPTSVVGTPKSAEEIQKDWDTNPRWKDVTRTYTAEDVVALQGTVVEENTLARRGAEVLWEQLHDLEYINALGALTGNMAVQQVRAGLKAIYLSGWQVAGDANLSGHTYPDQSLYPANSVPTVVRRINNALLRADQIAKVEGDTSVKNWLAPIVADGEAGFGGALNVFELQKAMIAAGVAGSHWEDQLASEKKCGHLGGKVLIPTQQHIRTLTSARLAADVCDVPTVVIARTDAEAATLITSDVDERDQPFITGERTKEGFYRVRNGLEPCVARAKAYAPYSDLIWMETGTPDLELAAKFAEGVKAEFPDQMLAYNCSPSFNWKKHLDDATIAKFQKELAAMGFKFQFITLAGFHALNYSMFDLAYGYARNQMTAYVELQEREFAAEERGYTATKHQREVGAGYFDRIATTVDPTSSTTALTGSTEEGQFH

SEQ ID NO: 1661 - protein, 164 aa, Hordeum vulgare subsp. vulgare
MAQESLRLVCPPVSAHDGRLPRQYTLEGQGAKKDISPPLEWYGVPGGARSLALVVQDIDADERVPWTHWVVANISPEEKGLPEGFSGAGGNANAGGEGGLQEGVNDWKQPGWRGPVPDSHGHRIQFRLYALDDVLSLGNKVTVDKVMEAIEGHVLGEAELTAVF

SEQ ID NO: 1662 - protein, 164 aa, Ralstonia eutropha JMP134
MSNVYQFEAKSLAGQPVPLSQFRGKVLLIVNTASECGFTPQYAGLQALHDAYAARGLEVLGFPCNQFGKQEPGDAQQIGQFCESRFSVKFPMFAKIDVKGPDAHPLYQWLTSAKRGVLGTQAIKWNFTKFLLRRDGTVYKRYGSITKPEEIRADIETLLADPAA

SEQ ID NO: 1663 - protein, 316 aa, Vibrio vulnificus CMCP6
MSNKLEQLRKLTTVVADTGEIDAIKKYQPEDATTNPSLILKAAQIAEYAPLIDASIEYAKTQSDDKAQQIQDTCDMLAVNIGKEILKTIPGRISTEVDARLSYDMEGSVAKARQLVKMYNDAGITNDRILIKLASTWEGIRAAEILEKEGINCNLTLLFSFAQARACAEAGVFLISPFVGRIMDWYKAKEGRDFEAQEDPGVLSVTKIYNYYKEYGYKTVVMGASFRNIGEILELAGCDRLTIAPALLAELEAAEGEVVEKLVDSKGAAERPAAMTHAEFLWEHNQDPMAVEKLAEGIRNFAVDQGKLEAMIAAKL

SEQ ID NO: 1664 - protein, 460 aa, Glycine max
MEQKGGVLMQRYELGRLLGQGTFAKVYHARNIITGMSVAIKIIDKEKILKVGMIDQIKREISVMRLIRHPHVVELYEVMASKTKIYFVMEHAKGGELFNKVVKGRLKVDVARKYFQQLISAVDYCHSRGVCHRDLKPENLLLDENENLKVSDFGLSALAESKCQDGLLHTTCGTPAYVAPEVINRKGYDGIKADIWSCGVILYVLLAGHLPFQDTNLMEMYRKIGRGEFKFPKWFAPDVRRFLSRILDPNPKARISMAKIMESSWFKKGLEKPAITVTENEELAPLDADGIFEACENDGPIAEPKQEQAKPCNLNAFDIISFSTGFDLSGLFEDTFLKKETRFMSKKPASIIVLKLEEICKRLCLKVKKKDGGLLKLEGSKEGRKGTLGVDAEIFEITPHFHMVELRKSNGDTMEYQKLFKQDIRPALKDIVWTWQGEKPQQEQEQHEVVQEEHQPSHTA

SEQ ID NO: 1665 - protein, 405 aa, Arabidopsis thaliana
MPLSLQSPPCATLSASIRKGRWKTLAAGFSVTPLPAVNFSLRRSIPRILASASSSSSPASSSLEAGENNELNAVSAFSEIVPDTVVFDDFERFPPTAATVSSALLLGICGLPDTIFRNAVDMALADSSCAGLETTESRLSCFFNKAIVNVGGDLVKLVPGRVSTEVDARLAYDTNGIIRKVHDLLRLYNEIDVPHDRLLFKIPATWQGIEAARLLESEGIQTHMTFVYSFAQAAAASQAGASVIQIFVGRLRDWARNHSGDTEIKSAIKSGEDPGLALVKRSYNYIHKYGYKSKLMAAAVRNKQDLFSLLGVDYVIAPLKVLQSLKDSPAIPDDEKYSFVRKLTPETATHYHFTNKELVKWDQLSLASSMGPASVELLSAGVEGYANQAKRVEELFGKIWPPPNV

SEQ ID NO: 1666 - protein, 335 aa, Lycopersicon esculentum
MVHQKQVKDVVSGWLTVFDDGSVDRTWTGPPEVKFMAEPVPPHDDFIDGVAVKDVVAGENSGSRFRIYLPERNDSSVDKLPVILHFHGGGFCISQADWFMYYAVYTRLARVANAIVVSVFLPLAPEHRLPAACDAGFAGLLWLRDVSREQGHEPWLNEYADFNRVFLIGDSSGGNVVHQVAARAGEEDLSPMKLAGAIPIHPGFMRSQRSKSELEQEQTPFLTLDMVDKFMELALPIGSTKDHPITCPMGDAAPAVEELKLPPYLYCVAEKDLIEDTEMEFYESLKTGEKDVELLINNGVGHSFYLNKIAVDMDPVTGSATEKLFEAIAEFINKH

SEQ ID NO: 1667 - protein, 352 aa, Triticum aestivum
  misc_feature (96)..(96): Xaa can be any naturally occurring amino acid
  misc_feature (127)..(127): Xaa can be any naturally occurring amino acid
  misc_feature (136)..(136): Xaa can be any naturally occurring amino acid
  misc_feature (150)..(150): Xaa can be any naturally occurring amino acid
MGSTAADMAASADEEACMYALQLVSSSILPMTLKNAIELGLLETLVAAGGKLLTPAEVAAKLPSTANPAAADMVDRMLRLLASYNVVSCTMEEGRXRLSRRYGAAPVSSSSPQRRRVSMAALALMNXTVSWRLYYXDRPDADPLKAYGFXSFEYHGTDPRFNRVFNEGMKNHSIIITKKLLESYKGFEGLGTLVDVGGGVGATVAAITAHYPTIKGINFDLPHVISEAPPFPGVTHVGGDMFQKVPSGDAILMKWILHDWSDEHCATLLKNCYDALPAHGKVVLVECILPVNPEATPKAQGVFHVDMIMLAHNPGGRERYEREFEALAKGAGFAAMKTTYIYANAWAIEFTK

SEQ ID NO: 1668 - protein, 147 aa, Oryza sativa (japonica cultivar-group)
MSFAIRSSEPEFWFLIPSEEAAVAVAAHRLVVMDQRRSGSAYRPKRTHMAAAEDEHRRPGTSSRRRVAPTPTTQTQTQTAPGYFTVELVMAFVCVTASLVLLPLVLPPLPPPPSLLLVVPVCLLAVLVAMAFVPLDAQSNVVGSSCL

SEQ ID NO: 1669 - protein, 145 aa, Brassica napus
DEERPYLPKHILYRQKEQFSDGVGYSWIDGLKAHAAENVNDKMMSNAAFIFPHNTPLTKEAYYYRMIFERFFPQNSARLTVPGGATVACSTAKAVEWDASWSNNMDPSGRAAIGVHLSAYDGSKVALPLPPHKAIDDIPMMMGQE

SEQ ID NO: 1670 - protein, 199 aa, Aspergillus niger
MATGPATQSLKCVVTGDGAVGKTCLLISYTTNAFPGEYIPTVFDNYTASVMVDGRPISLGLWDTAGQEDYDRLRPLSYPQTDVFLICFSIVSPPSFDNVKAKWFPEIEHHAPNVPIILVGTKLDLRDDRGTIDALRQRKMEPVSYEQALAVAKEIRAHKYLECSALTQRNLKSVFDEAIRAVLNPRPAAKPKNKKCVIL

SEQ ID NO: 1671 - protein, 393 aa, Bordetella parapertussis
MSSALANIYARLPVSFTHGRGVWLWDTGERRYLDALAGIGVSCLGHGHPGLVAAISEQAARLIHTSNIYEVPQQAALARRLAELSGMSEVLFSNSGSEANEAAIKLARYYGYKQGNTHAHIITMDSSWHGRTLATLAATGSDKARQGFGPMPSGFIQVPYNDLPAIRAAGEAEPRVTAVLLEVLQGEGGIRPSDMAFLRGVRQLCTERGWLLMIDEVQSGIGRTGKWFAHQWADIRPDVMTLAKGLAGGVPIGAMLAAGPAAGVFAPGSHGTTFGGGPLACAAGLAVIDAIEQEGLLANAHEVGAHLHAALASELAGVPGIIEVRGHGLMLGIELDRPCGILATRAMEAGLLINVTRERVVRLLPPLILSGEEADQIVRILVPLIKQFLAQQQ

SEQ ID NO: 1672 - protein, 419 aa, Crocosphaera watsonii WH 8501
MTSPSLTLLRQIQVLDPVANSTMTNDVLLGSSLIQAIDSHLDNIPPDTNIVDGKGLILAPGLMDLYSYSGEPGHEDRETLDSLAASAIAGGFTRVAILPQTQPSIDNLATLSHLKQRTASISGVKFDFWGTFTHQGKGEQITELGELAQGGIIGFTDNQGIENLALLRRVLEYLKPLKKPLALVAEFPSLKGSGVMREGYFSTTYGLTGNPAMTEGTAVATILEMVAAMETPVHLMRISTRRAVELIAWGKARGIPITASTTWMHLLLDSENIASYNPNLRLDPPLGNPEDRLALIEGISQGIIDAIAVDHRGYTYEEKTVPFAEAPPGAIGLQLALPLLWQTLVETETLSPLQLWKALSSNPRKCLGQTVHPVKAGHPSELIVFAPQKTWTPTPSTLKSLNYNTPWLGQEIKGQVIAI

SEQ ID NO: 1673 - protein, 125 aa, Mesorhizobium loti MAFF303099
MADLAKIVDDLSKLTVLEAAELSKLLEEKWGVSAAAPVAVAAAGGAAAAAAPAEEKTEFDVVLTDAGAQKINVIKEVRAITGLGLKEAKDLVEAAPKPVKEGVSKADADKFKAQLEAAGAKVDLK

SEQ ID NO: 1674 - protein, 362 aa, Wolbachia endosymbiont of Drosophila simulans
MDKKVLLELSNGLKIELPVLSGTTGPDVLNIKDLYKMTGLFTYDPGFVSTASCSSTITFIDGDEGVLKYRGHNIADLAENNNFTAVIYLLLYGELPSSEQHKKFLLKIQESSKVSEQVTNVIKAFPKTAHPMSILVACFASLSASYHEKHGNNVNGEDLDFGISAIAQVSTIIAMICRHNNNQEFINANNELSYSENFLKMIFGDAVDNDKSALFAKALDKIFTLHADHEQNASTAAVRLVGSAGSNLFASLSAGVATLWGPAHGGANEAVINMLKEIEQSGDIDKFIEKAKDDKDPFKLMGFGHRVYKNYDPRARILKGACHEVLSKLEQNNELLKIAKKLEEIALKDEYFIVRKLYRIPP

SEQ ID NO: 1675 - protein, 427 aa, Aspergillus nidulans FGSC A4
MEILQKKPKNIAIHTSPVHDLRVVDCEIPRLAPDGCLIHVRATGICGSDVHFWKHGRIGPMVVTGDNGLGHESAGVVLQVGDAVTRFKPGKYHACPDVVFFSTPPHHGTLRRYHAHPEAWLHRLPDHVSFEEGALLEPLTVALAGIDRSGLRLADPLVICGAGPIGLVTLLAANAAGAAPIVITDIDSNRLAKAKELVPRVQPVLVQKQESPQELAGRIVQRLGQEARLVLECTGVESSVHAGIYATRFGGTVFVIRVGKDFQNIPFMHMSAKEIDLRFQYRYHDIYPKAISLVNAGLVDLKPLVSHRYKLEDGLEAFATASNTAAKAIKLGTSSREPYSGICPKDEVVPTVLTKPGTRFLRDCTTHIALHGSSPSSNVYGKPGIECLRRSAEHTREQQWTLQFDGCSSLASSGSGERLGQARPEPV

SEQ ID NO: 1676 - protein, 500 aa, Crocosphaera watsonii WH 8501
MCGIAGIWGQTEQTNVEAMMKSIIHRGPDAKGIFTVPNGSGILGHQRLSIMDVDGGDQPIYSKANTQAIIGNGEIYNYPKLQPELAKKYKFLTKSDTEAVLHLYEEKNTTAVGELDGMFAFAIIDDNKFIAARDPIGIKPLYYSEKDGNFWFASELKAITQFCENVEEFPPGHFFSSETGFSQYYSLPDIPPELDANVDELLQEIRETVEASVVKRLMSDVPLGAFLSGGLDSSIIAAIAKKHKSELHTFSVGIAGSKDINAARLVSDYLGTIHHEYIITPEEAIAKLPEIIYYLESFDQDLVRSGIPCYFTSRLASEYVKVILTGEGADELFAGYTYYKDIPSDDTLHRELRRSVNSLHNINLQRVDRLTMAHSIEGRVPFLDLKMIELGQKVPAHLKLKGTPPVEKWILRKAFEDILPEEIVWRKKEQFDEGSGTVDLLTETLKDVMNEQQAQQYQKEHPDIKLRSAEECYYHQIFMKAFDNPDALLTNVARWAETRF

SEQ ID NO: 1677 - protein, 98 aa, Triticum aestivum
MASRLLAAASSSSSSSSSSPLARLISSRRMAGAADHHGSTKVNMWQEPLNPGNWKEEHFVLTSLAMWGAIIYGGLKAFGGKKEVKTEAGSAPAAAPAH

SEQ ID NO: 1678 - protein, 75 aa, Zea mays
MGLCSCCCRCLELLCSVLLPPLGVCLRHGCCSMEFWISVLLTILGYLPGVLYAVYVICSVDPHRHRDNDDYVYVA

SEQ ID NO: 1679 - protein, 274 aa, Pseudomonas putida KT2440
MQRLSTRTGLDLPAIGLGTWPMTGSECTQAVRQALDVGYRHIDTATAYENEAAVGQALRDSDVPREQIHLTTKVWWDRLEPKAMRQSLEDSLRALGTEQVDLFHIHWPGTDWDLARSIDTLVALRDEGKARHIGVANFPLGLLRQVVETLGAPLSAIQVEYHVLLSQQPLLDFARGHDLLLTAYTPLARGQAAAQPVIQAIARKHGVLPSQVALKWLLDQDGVAAIPKASSRENQLANLAALTVPLDDEDRTAIAGLPKDQRVVSPPFAPDWNS

SEQ ID NO: 1680 - protein, 54 aa, Brassica napus
MGTATFIDILLAILLPPLGVFLRYGCEVEFWICLVLTLFGYLPGILYALYVLTK

SEQ ID NO: 1681 - protein, 105 aa, Triticum aestivum
TSVALPEGEVFYLVALLRFCPGGSGAAVEELVAQNGAIVDACRSSGYDFKTYFPHYRTEADWARHFGAKWARFVDRKARYDPLAILAPGQKIFARTPSSSRTDRS

SEQ ID NO: 1682 - protein, 490 aa, Glycine max
MTKISPEVEIRMPMEAFPPVSADVSFISNSFPKYKLDVDNQVLEEPVEDNLGPSLKDVIEQEAFNLSDQHKRISVRDLASKFDKNLAAAAKLSNEAKLREVASLEGHVLLKKLRDALENLRGRFAGINKEDVEKAISMVEALAVKLTQNEGELIQEKFEVKKLVNFLKQASEDAKNLVNQEKSFACAEIESARAVVLRIGEALEEQEKASQASKPQDVDGLIEEVQESRRIKLLHHPSKVMAMEYELRALRDQIRSREVCRVKLQKELIMSKRNEENKCCLYMLDGSEALGSYLRVQPCSDEVPQVSKCSFQWYRLSSEGSWREVISGANKSIYAPDPSDVGRILQVDIVSNGKKLTLTTNPIQTVSGLGSHVETLLRKSNTDFNVVISQMNGKDHSSHSTHSFNVGRMRIKLCRGWITKAREIYSPSMQLCGVRSDIANAAKALFWQARKGLSFVLTFESERDRNAAIMVARKYALDCNVVLAGPDDLV

SEQ ID NO: 1683 - protein, 485 aa, Magnaporthe grisea 70-15
MATKGSEGFATHEFFNIINGQRRGAGAGGVDRVIDPRTEEPLWEVPIGSAEDLEDAVTAARAALPGWAATTAEERQQLLAKMAEALGANMEFLAGVVMKETGKSQLMATIEIANSLDQCKYFANNTLQDKVQFEDDTIKIIETHAPLGVVGAISPWNFPLILSSIKVVSALVMGNTVIMKPSPFTPYCVLKFAELCQSFLPPGVLQAINGGGELGGLMTLHDGIDKISFTGSIPTGKKVMANCAKTLKRVTLELGGNDAALVCANVDLDKVVAQTCAGSFFNAGQFCAATKRIYVHADIYDAFVDKFVAETKANYESAFAGDGVSVPTIFGPVSNKMQFDVVKRILDDAARPESGGKILTGGKPHDKGYWIQPTVVAGPKEDSMVVKDEQFGPVIPILKWSDEQDVIKRANLSNSGLGATVYSKDLTQAERIARQLESGSVWINMSEKPNAAAWFGGWKDSGFGGEMGLLGLYSYCHIKSIHFAK

SEQ ID NO: 1684 - protein, 316 aa, Glycine max
  misc_feature (269)..(269): Xaa can be any naturally occurring amino acid
  misc_feature (300)..(300): Xaa can be any naturally occurring amino acid
MAKETSVVYLYPSKSQVWGENFDHKKLVITTLAANGKKEESNGAPNDTYPAFPGWYADVSWPGEAHTYKIEKILFHGKSEFQELLVFESSRQGKVAILDGHIQLTENDEFAYQEMLTHLALCSIPDPKKVLLIGGGDGGILREISRHSSVEHIDICELDQMVIDVYSEFFPDIAVGYEDPRVHVHISDGVAFINSVPEGTYDVIISDAFPAMGHSADVLADECFLESVAKALRPGGVFSAPADSLWHKNFVVADTIANCKKIFKGSVNXLGPVNFKHPVNRLDPEKNGVAEGPTKFYNPXINAAAFCLPSFVDKVD

SEQ ID NO: 1685 - protein, 432 aa, Bifidobacterium longum DJO10A
MPINEALFAAMKAASYIKPNAGKSYKLQRVAEELIAKQAPDNPKCRVEDAFAPMADGYAVPLRVFTPLVAYGAPLPEALEESSANGTPVASAISAILPAVLPKVLPKILIKESTSSGNADGISGNANTELPSVTPRGTILFFHGGGWTTGGINLYTQACAHMAVRLQRRVISVEYRLAPEYRFPTAVEDCYEVARQLFAGELPISGVGGSVDVDHPQSAAPTAPAGGGDISATIPAPDPDSIVLFGDSAGGNLAAAVSLMARDRGEFMPRTQMLLYPVVGNDYNPETSPFESVRTNGTDYILTAQDMADYIDMYRSSVADLTNPYFAPLTAHDLSNQPRTLVLSAEYCPLRDEDEAYARRLQLVNDNVSCYRIHDGIHGYLLNTSAVGLVATTYRIIEHFLDGTPLEPAPGTGTTANAPEGGDAWQDVLGTD

SEQ ID NO: 1686 - protein, 371 aa, Rubrobacter xylanophilus DSM 9941
MPKKSVGLSGAIAGDTAICTVGSSGDSLEYRGYPIEELAERATFEEVMHLLIRGELPDRRQLEEYTGRLSGMRKIPQELRDVLERIPASTHPMEVLRTGCSMLGTLEHEGEGRDAREIGERLISCLPSVLLYWHHFAGSGKRIETDTGEHSLAGHFLRLLHGREPGEEERRAVDVSLILYAEHEFNASTFTARIIASTGSDFYSAITGAIGALRGPLHGGANEAAMAFIERFRSAEEAERGLREALSRGERLMGFGHPVYTRVDPRSDIIKGWSRRLSEGHEEGYLYEVSERIERILHEEKNLFPNLDFYSASAYRFCGIPTEMFTPLFVFSRTSGWTAHVIEQRESGKIIRPSANYTGPERRPFVPLEER

SEQ ID NO: 1687 - protein, 161 aa, Glycine max
TTSPVGSPTSGNISDSYSSKEQDRFLPIANVSRIMKRALPANAKISKEAKETVQECVSEFISFITGEASDKCQREKRKTINGDDLLWAMTTLGFENYVGPLKLYLNNYRETEGEKSSTSMAKQDTEMGGLNGYRESSIAQSALSADQIQDASGNRMMPPIL

SEQ ID NO: 1688 - protein, 205 aa, Glycine max
MAELESPNVMPKLISFLSSLLKRVAESNDLNQQQLLHQKVSVFHGLTRPTISIQSYLERIFKYANCSPSCFIVAYVYLDRFTQRQPSLPINFFNVHRLLITSVMVAAKFMDDLYYNNAYYAKVGGITTIEMNFLEVDFLFGLGFHLNVTPGTFQAYCAHLQSEMLLMQPLNFADSSLSLGKSLKAHLCYNEDESSSHQKQQQLAV

SEQ ID NO: 1689 - protein, 438 aa, Zea mays
MAEKENILMQRYEMGKLLGKGSFAKVYHARNVKTSESVAIKVIDKDKIKKCGLMDQIIQEISVMKLVKHPNIVQLYEVMATKTKIYFVIEYVKGGELFKKVQRGRLKEDVARTYFQQLISAVDFCHTRQVYHRDLKPENLLLDGSHNLKISDFGLSALPNCKRKDGLLHTICGTPAYVAPEVISQKGYDGAKADIWACGVILYVLLAGYLPFQDKNMMDMYKKICKAELKWPSWFSSDVRKLLRRILHPNPNRRISIEEIRTHPWFRIGLDARLFDSTTRDHVPSDMDLALNSLNSNMVECNSAAEKLTILNAFDIISLSNGFDLSGIFENSNKESKFMSTNTAMTIITKLMEVAKSLDLKVITKTGGLLNMEAAKSGIKGVMSINAEIFQITPNYHLVEIKKINGDILEYHNFMNQSMRPALEDIVWAWHGEQPDEK

SEQ ID NO: 1690 - protein, 147 aa, Brassica napus
VNNRGPTCGQELGDLRGLVLEKVAGSLGLPGRFYNLGGPGIFPYSSKLNHGFFGNFRPYGGPYAGSKGGVVGDILFLVSNLRDDHKVAMHAGSTLNHRFVRFNPREGENATGMLTGFNGLGQYFCLHFGAFQLGRGPVYMAFLGLMG

SEQ ID NO: 1691 - protein, 473 aa, Nostoc punctiforme PCC 73102
MYEKITPPAAGAKIAFKNGEPIVPDNPIIPFIRGDGTGIDIWPATQKVLDAAVAKAYKGQRQISWFKVYAGDEACDLYGTYQYLPQDTLTAIEEYGVAIKGPLTTPVGGGIRSLNVALRQIFDLYACVRPCRYYAGTPSPHKNPEKLDVIVYRENTEDIYLGIEWRQGSEIGDRLIKILNEELIPATPEHGKKRIPLDSGIGIKPISKTGSQRLVRRAIKHALLLPKNKQQVTLVHKGNIMKYTEGAFRDWGYELATSEFRQETVTEQESWILSNKEKNPNISLEENARQIEPGFDNLTPDKKAQVVKEVETVLNTIWATHGDGKWKEKVLVNDRIADSIFQQIQTRPDEYSILATMNLNGDYLSDAAAAIVGGLGMGPGANIGDSSAIFEATHGTAPKHAGLDRINPGSVILSGVMMLEFLGWQEAADLIKKGLSDAIANSQVTYDLARLLEPPVEPLKCSEFADAIIQHFG

SEQ ID NO: 1692 - protein, 292 aa, Pyrobaculum aerophilum str. IM2
MREIIELYRKVGGFQALHVAEAYDVLKEAVEAADVRFLSFTGNLVATGLREFIADAIRRRLFNVVVTTAGALDHDIAKSMGAVYAPGSFDLDDVDLAAKGYHRLGNVVIKKEEYGPLVEKFILAHCEKLWGKTLATYELAYLLGAELPEDSILGAAARAGAKVFVPGIVDGAVGTALMTCNDLARTKRGGSRAFIDVLKDEEELREIVHNSKKLAALIVGGGISKHHVIWWAQFKGGLDYVVYISTAVEYDGSLSGARPREAISWGKVKPSAKSVFIFADATLVLPVLLKAL

SEQ ID NO: 1693 - protein, 171 aa, Larix laricina
APSKTGNSNVVSAFTGLKSMAQFPSSKTMSNAGAEWERKTTSNGARVRCMQVWPPYANKKWETLSYLPRLTPEQLVKEVEYLLKNKWVPCLEFEEDGEIKRVYGNSPGYYDGRYWVMWKLPMFGCTEASQVLNEVNECAKAYPNAYIRVIGFDNVRQVQCISFIVHKPEYN

SEQ ID NO: 1694 - protein, 97 aa, Triticum aestivum
MGLNYNRKTPSFPSTSALLSSTASPPSTDRVKSSPSAGTSTTMAGTANCIDIILAIILPPLGVFLKFGCGHEFWICLLLTFLGYIPGIIYAIYAITK

SEQ ID NO: 1695 - protein, 122 aa, Deinococcus radiodurans R1
MAYDKQALIDQLGQLTIMELADLIDGLKETWGVTAAVAVSGGGAGAASPAAEEKTEFDVVLIDAGASKINVIKEIRGITGLGLKEAKDMSEKGGVLKEGVAKDEAEKMKAQLEAAGARVELK

SEQ ID NO: 1696 - protein, 274 aa, Rhodopseudomonas palustris CGA009
MDSIKTQGLNVPKLGLGTFKLQGKDCHEAVLTALSLGYRHIDTAEMYANEDFVGDALEDTDVPRDQIHLTTKVWWTNLAPDAIRKAFDQSLRKLKTDYVDFYLIHWPAPDMNLGAALETLLRIKDQGGARAIGVCNFPVALMKQAVEEIGAPIACNQVEHHVLLGQTKLLPYLQSKGIPLTAYAPLAQGRLASYPELQAIADKHGATAAQVALAWLLEQEGVMAIPKARGEASQRSNLGALKIKLDFDDRAVIAKLPKNQRFVTPAFSPKWDAE

SEQ ID NO: 1697 - protein, 422 aa, Yersinia pestis CO92
MTPSDLVFDQQHIWHPYTSMTEPLPCYPVVGAEGVELQLADGRRLIDGMSSWWAAIHGYNHPVLNFAAHQQLDKMSHVMFGGITHPPAVKLCRQLVAMTPPPLECVFLADSGSVSVEVALKMALQYWQAKGERRQRILTLRHGYHGDTFGAMSVCDPQNSMHSLYQGYLAENLFANAPQCGFDDPWDPQDIANFVALITQHANEIAAVILEPVVQGAGGMRIYHPSYLREVRALCDKHQILLIADEIATGFGRTGKLFACEHAQIVPDILCLGKALTGGYLTLSATLTTRAVAETISKGDAGCFMHGPTFMANPLACAVASANLSLLAENSWQQQVSKIEDQLKRELLPLAQEDTVADVRVLGAIGVVEMKKPVNVARLQRSFVEQGVWIRPFGKLIYLMPPYIISQHALTRLTAAVVDRGS

SEQ ID NO: 1698 - protein, 124 aa, Glycine max
MASSMISSPAVTTVNRAGAGMVAPFTGLKSMAGFPTRKTNNDITSIASNGGRVQCMQVWPPIGKKKFETLSYLPDLDDAQLAKEVEYLLKKGWIPCLEYEYEHGYVYREHNRSTIYYDRRYLTM

SEQ ID NO: 1699 - protein, 495 aa, Pseudomonas putida
MSLLIRGATVVTHEESYPADVLCVDGLIRAIGPNLEPPTDCEILDGSGQYLMPGGIDPHTHMQLPFMGTVASEDFFSGTAAGLAGGTTSIIDFVIPNPQQSLLEAFHTWRGWAQKSASDYGFHVAITWWSEQVAEEMGELVAKHGVNSFKHFMAYKNAIMAADDTLVASFERCLQLGAVPTVHAENGELVYHLQKKLLAQGMTGPEAHPLSRPSQVEGEAASRAIRIAETIGTPLYVVHISSREALDEITYARAKGQPVYGEVLPGHLLLDDSVYRDPDWATAAGYVMSPPFRPREHQEALWRGLQSGNLHTTATDHCCFCAEQKAMGRDDFSRIPNGTAGIEDRMAVLWDAGVNSGRLSMHEFVALTSTNTAKIFNLFPRKGAIRVGADADLVLWDPQGTRTLSAQTHHQRVDFNIFEGRTVRGVPSHTISQGKVLWADGDLRRRGRGGAVCGTAGVSVGVRGAGATRRTAAPDARSALRPLGLLRSPSPASQI

SEQ ID NO: 1700 - protein, 296 aa, Escherichia coli
MSYYHHHHHHLESTSLYKKAGLANPTVIKLQDGNVMPQLGLGVWQASNEEVITAIQKALEVGYRSIDTAAAYKNEEGVGKALKNASVNREELFITTKLWNDDHKRPREALLDSLKKLQLDYIDLYLMHWPVPAIDHYVEAWKGMIELQKEGLIKSIGVCNFQIHHLQRLIDETGVTPVINQIELHPLMQQRQLHAWNATHKIQTESWSPLAQGGKGVFDQKVIRDLADKYGKTPAQIVIRWHLDSGLVVIPKSVTPSRIAENFDVWDFRLDKDELGEIAKLDQGKRLGPDPDQFGG

SEQ ID NO: 1701 - protein, 141 aa, Triticum aestivum
  misc_feature (124)..(125): Xaa can be any naturally occurring amino acid
MGERLKGTVKWFNVTKGFGFISPEDGSEDLFVHQSAIKADGYRSLNENDVVEFEVITGDDGRTKATDVTAPGGGALAGGSRPSEGGGDRGGRGGGGYGGGGYGGGGGGYGGGGRGGGGGGGGCXXCGESGHFSRECPNKTN

SEQ ID NO: 1702 - protein, 302 aa, Arabidopsis thaliana
MGEVWRWNKEVEMDSIRDCLKHFSSIAIDTEFPGCLKETPMDASEEIRYRDMKFNVDNTHLIQLGFTLFDRRGITKTWEINLSDFNEHKCFKNDKSIAFLKSNGLNLDKIGEEGIGIEEFFRDFSQILKEKDGKITWVNFQGSYDNAYLVKGLTGGKPLPETKEEFHETVEQLLGKFVFDVKKIAESCSGLSSRFGLQRIADVLQMKRVGKAHHAGSDSELTARVFTKLTFDLLNSRKQCVRRVDHQQYQLEQQQLMMTRCYIPIPIPIPRPRSVMFAAHHPNPYFGGGYFGMPVQGRNYVL

SEQ ID NO: 1703 - protein, 512 aa, Arabidopsis thaliana; identical to SEQ ID NO: 374

SEQ ID NO: 1704 - protein, 1832 aa, Podospora anserina
MYNPPGQRDATRPFHVPPPPPPMSPPPPTVGINNPMMTIPPPPPRHPNAPSTTGNVLLPPPPSGPPPNSGFPNSAIAPPSALGSTAPWHGAWGRAYDGRTAFNIPPPPPGGGAGGGGGGGSGGVLRAYDPKYHAQVLAAANNGATYTVPPPPPPQQQQQQQQQQQQQQQQQQQQQQQQQQQQQQQQQQQQQQQQQQQQQQQQQQQQQQQQQQQQSDQMGALTSATYIPQGDTYGEGVGIPGLGLEDSAIGWNMGAHLESATATPLDESSGRDRLYANAMAQRGSSTTSNATVSSVSVPPELAAQWPMEKVLGWLQANSFSSHWQETFKYLGLDGARFLELGSSHGGRGNFGMMHQQVYPRLLALSGPEWNQAREREEGKRMRRLVRSIVTGRPVEVKGGRLGGGQQQPQHARQNSTSAPPAVTGGQTGNRSAESPNVSVDDGFWDTGVTDADDGDKQTPNPIKIPEFGFSRRFSQSRATTMPTLSSTMPTDHRNMMKEIDTSRRHSPTLSESGEAGGTFRGGSTPLGGGGGGGGGGGRDSPSAGSPNPASGLFPSSTAGNLSASPHSSRFGHRSRNSTDSVSSSAAIYGSGVPADAAAMLKSGMNIADVVNAARNANDRRHAQDGGRPSPQESGGGDRSAGEPPGSAKGSGSFLSIFTRKKHGRKDDGFGGDEDSPTSPGLSFKPQSLGDNRPGSSAGTYGHHHAGNVRANRGGPRVFILATADCWNYRMLDVTDIETASDLRQLICINLGLPESEGAHLYPTELGKFEHDGEALDDSKLLAIKTQRADAIGTLKLFVRVGGPPQMRQTGAQIAMDEETYVKLNGRMRSSSSPPTSRQNTLTGKEGEDKMLTAEAIEYRTEQLRKQKEYLAKRKQVAENNHVADRSPSSSIVGRTVDFDQPRHSPFEDRKMDTLLPQRKPPAPPSDPSATLIKANSLKKTGHGLRLSGDSGYHPKRKTSSDLRSSGDVVFEKQKRWGPVADPSAGIGALLVGMSDGMASIARPRPGGGMMQQRQPSPHRVATEPITSQELQRGKKAMSTVNFGPAHQRERSGSGGGSPRPGGMPGSPGSYTWSSKNVPFLVPDYSPNGTPAPPTASRMPDGGGNSGDGCLDQNHNHQAQNGTIAKMRNVARAPSPGNVSPSSRRRPSDSFSSQAAVAKKRKSHGPDTDFTDNDVTFSASSTRASKKVDDSDSDDDSDDGLFAIPIAARNSGPDKGKTTAPAEGNSGDSDGASGTGTGKRPSLRLNTRSGSNSRAKKTLSVAFAVSPQSSSAGGKTPLEDDDSGRSSSQRRGTPGTPQSEGGWDSEEKDSKISRRKSFIEKDVWANRPPTDALVNNLEDFFPDLDVDQPVLEEGVDQEPPSPIAEGDENNQGSASVPPLPPLPPGLSTGKLHTFYNDNDTLGSDESTLKALESRPVSMQSLAHRSIRRSGGGGGLGRMKSIREVARGANEFGKRYTQGPGQIDAQSSAAAAGNRNTNLMRRKSTKMFNANIVQIQPDRGSLNLAMGGLTTIPQDSLPTRSTNSRESIPKRQTTFRWFKGQLIGKGTFGRVYLGMNATTGEFLAVKEVEVNPKAAQGDKKKMQELVAALDQEIDTMQHLDHVNIVQYLGCERKETSISIFLEYISGGSIGSCLRKHGKFEEPVVASLTRQTLSGLAYLHREGILHRDLKADNILLDLDGTCKISDFGISKKTDNIYGNDKTNSMQGSVFWMAPEVIRSQGEGYSAKVDIWSLGCVVLEMFAGRRPWSKEEAVGAIYKIANGETPPIPEDIREVISPVAIAFMLDCFTVVSSERPTADVLLSQHPFCELDPTYSFLDTELYAKIAGRVNDLGRGQ

SEQ ID NO: 1705 - protein, 305 aa, Zea mays
  misc_feature (262)..(262): Xaa can be any naturally occurring amino acid
MKNVAKRRYLSLTRPQGGIFAGPAAPGFLQHEGGRGVEAALPYQKADRGPRKEAGIRLCSATMSSLYDVSCFAAGLAGNVFALALFLSPVPTFKRVLKAKSTEQFDGLPYLLSLLNCCICLWYGLPWVSDGGRALVATVNCTGALFQLAYISLFIFYADSRTTRLKVAGLLVLVVFAFALIAHASIAFFDQPLRQLFVGSVSMASLVSMFASPLAVMGVVVRTECVEFMPFYLSLSTFLMSASFAVSRMGSESSWEQCSWCXKSTTAGDGKAATRQHRCLPDHVAEFVSPIARAVLSVVLCSAIL

SEQ ID NO: 1706 - protein, 312 aa, Saccharomyces cerevisiae
MSFHQQFFTLNNGNKIPAIAIIGTGTRWYKNEETDATFSNSLVEQIVYALKLPGIIHIDAAEIYRTYPEVGKALSLTEKPRNAIFLTDKYSPQIKMSDSPADGLDLALKKMGTDYVDLYLLHSPFVSKEVNGLSLEEAWKDMEQLYKSGKAKNIGVSNFAVEDLQRILKVAEVKPQVNQIEFSPFLQNQTPGIYKFCQEHDILVEAYSPLGPLQKKTAQDDSQPFFEYVKELSEKYIKSEAQIILRWVTKRGVLPVTTSSKPQRISDAQNLFSFDLTAEEVDKITELGLEHEPLRLYWNKLYGKYNYAAQKV

SEQ ID NO: 1707 - protein, 465 aa, Zea mays
MEDVRATYSMGKELGRGQFGVTHLCTHRTSGEKLACKTIAKRKLAAREDVDDVRREVQIMHHLSGQPNVVGLRGAYEDKQSVHLVMELCAGGELFDRIIARGQYTERGAAELLRAIVQIVHTCHSMGVMHRDIKPENFLLLSKDEDAPLKATDFGLSVFFKEGELLRDIVGSAYYIAPEVLKRKYGPEADIWSVGVMLYIFLAGVPPFWAENENGIFTAILRGQLDLSSEPWPHISPGAKDLVKKMLNINPKERLTAFQVLNHPWIKEDGDAPDTPLDNVVLDRLKQFRAMNQFKKAALRIIAGCLSEEEITGLKEMFKNIDKDNSGTITLDELKHGLAKHGPKLSDSEMEKLMEAADADGNGLIDYDEFVTATVHMNKLDREEHLYTAFQYFDKDNSGYITKEELEHALKEQGLYDADKIKDIISDADSDNDGRIDYSEFVAMMRKGTAGAEPMNIKKRRDIVL

SEQ ID NO: 1708 - protein, 338 aa, Oceanobacillus iheyensis HTE831
METVTYAGPKNILFQNNRKPTITKGWAIIKTSYAGICGSDLSIFAGVHPRAEAPLVMGHEFSGTIEEGHPTLKKGTRVTVNPLLRCGECYPCQNGYSHVCENLKLVGIDCDGGMGEYVKVPIHSIVPLKDNISMKLGALIEPVAVAVHAIRQGNYMPGDSVVIFGAGTIGLCVALTLRSYGAKNLIIVEPNKLRLEKAKQLGFQTLDPLSENVTEKIVEGTDNIGADYVFDCAGHPSVVEAITEVVRVRGNIVIVAMYKQPPTLDMRQGMFKELNIQFVRVYTDKDFQIAIDLVDNHKEYEDIITHVLQPEEAQKGFDLLTTHTDAVKVMYEFNRGEL

SEQ ID NO: 1709 - protein, 307 aa, Triticum aestivum
  misc_feature (195)..(195): Xaa can be any naturally occurring amino acid
  misc_feature (232)..(232): Xaa can be any naturally occurring amino acid
HYRTSLYKKAGWYRSGIPGISSTHASACTSSRSLHSQWKKGKLLGSGTFGQVYLGLNSEGDQMCAIREVKVIADDSELKECLRKLNQEMCILNQLSHPNIVQYYGSELSSETFSLYLEFVNGGSIHKLLREYGPFEEAVLRNYTAQILSGLAYLHRRNIVHRDIKGSNIFVNRNGDIRLADFSMTNHISEATSIXSFKGSPYWMAPEVIMNTNGDSLSVDIWSLGCTIIEMXATTRPPWNQYEGVAAIFKIANSKDIPDMPDHLSSEAKSFLKLCLQRDPAARPTAAQLIVHPWVKDQASVTKSPVK

SEQ ID NO: 1710 - protein, 357 aa, Triticum aestivum
SGFRRVLAPSKWYGILVTICVAPRQRAWLPCMASAVGANEKKRALSTSPAHSLKMPSLKLSFKKKSGEANPASTLLSTKDFLERPIAGSQVQLCSLEKKVLNSWSHIDPGTFRVRGSNYLRDKKKELAQNCAAYYPFGVDVYLSPQKLHHISRFVKLPDIQTSSKLPPLLVVNVQVPLYPASLFQNETDGEGMSFVLYFRLSEGYSKELSPLFIENIRRLVDDDVEKIKGFPMETSISFRERLKILGRVANLEDLPLSAAERKLMHAYNEKPVLSRPQHQFFLGDNYFEVDIDMHRFGYISRKGFETFLDRLKICMLDVGLTIQGNKPEELPEQVLCCVRLNGIDYAKYQPLMTNGA

SEQ ID NO: 1711 - protein, 520 aa, Zea mays
  misc_feature (76)..(76): Xaa can be any naturally occurring amino acid
  misc_feature (261)..(261): Xaa can be any naturally occurring amino acid
MAAITPPTQSEPSPQTGRPASSAAAAAKRGGGGAGAAGGPLMGKYELGRLLGHGTFAKVYHARHVDTGDNVAIKVXLDKEKAVKSGLVPHIKREIAVLRRVRHPNIVHLFEVMATKTKIYFVMELVRGGELFSRVSKGRLREDTARRYFQQLVSAVGFCHARGVFHRDLKPENLLVDEQGNLKVSDFGLSAVAEQFRPDGLLHTFCGTPAYVAPEVLGRRGYDGAKADVWSCGVILFVLMAGYLPFHDKNIMAMYKKIYKXGEFRCARWFSKDLTSLLMRILHTNPNTRITLPEIMESRWFKKGFKPVKFYIEDDQLHNVIDDEDGLLDMGPAGPVPPPLPPPPPPLPPPKVDGDESGSDSDSSISSCPASMLSDESQRPRGSLPRPASLNAFDIISFSRGFNLSGLFEEKGDEVRFISAEPMSDIITKLEDIAKLKSFKLRRKDWRICLEGTREGVKGPLTIGAEIFELTPPLVMVEVKKKAGDNEEYENFCDKELKPGMQHLVHHMVRAPSMLLTDAK

SEQ ID NO: 1712 - protein, 489 aa, Novosphingobium aromaticivorans DSM 12444
MTPEGVNVAHPDKLYIAGRWVPAHSGRMIELVSPNTELVVGRVAEADETDMDAAVAAARDAFDHGPWPTTPPAERIAAFRRMVAHLETRVPELAKAWTAQMGGLASFAGPMHGGSVMALGQIAGFAEKFEFVERRPSMAADTALIAYEPVGVVAAIAPWNGPFGIMANKVAYALLTGCTVIMKPSPETPLEAYIIAEAAEAAGIPAGVVNLVTGHREASDHLVCNEGVDKVSFTGSTVAGKRIASVCGSRMARCTLELGGKSAAIVRDDFPIDAAAKMLAGTITMMSGQVCAMLSRVIVPRRRHDELAEAIAAEMKKVRIGNSDDPETQLGPVAMKRQLERIEMYIEEGRKTADLVTGGGRPAHLNRGYFIEPTLFANVRNESRIAQEEIFGPVLSLIPVEDEEDAIRTANASAYGLNGSVLTNDAEAAYRIARRVRTGGFGQNGLRMDFGLPFGGFKQSGIGREGGPEGLFPYLEMKTILIDGMPSAL

SEQ ID NO: 1713 - protein, 269 aa, Pirellula sp. 1
MEAVNADVANEHSPSHSRSIENMSQSNSDDSASSSTQQAGDGQDDVQQNIVWHAHTVSREDRESKLGQRGVVVWFTGLSGCGKSTIANELDRLLIDRGATCTLLDGDNVRHGLCAPPSVLKEEHGEDFAGRFGLGFGPTDREENIRRIGAVTELFASAGVIVLAAFVSPYQRDRDRVRNTIESSGRAGDFLEVFVDTPLEICKQRDPKGLYQKAIAGEIKNFTGISDPYDAPPSPEIHLKWREGQTPHDQASEIIREMEKRGVLGPAKG

SEQ ID NO: 1714 - protein, 65 aa, Zea mays
LLHRLQIPTTDLLYDGVGEAAQIYCELARLGADMLVIDVGGGLGIDYNRTHLAQTDMLVAYSPEE

SEQ ID NO: 1715 - protein, 307 aa, Zea mays
NLKVSDFGLSALRECQKQDGLLHTTCGTPAYVAPEIINKKGYDGAKADIWSCGVILFVLLAGYLPFHDANLVEMYRKISRADVKYPQWFSPELRRLMPKLLEPNPNNRITIEKLVEHPWFKKGYRPAVMLAQPHGSSSLKDVQVAFSNADHKDSSSKVEQPADSSLKPASLNAFDIISHSRGFDLSSLFEVDQEQKASNSRFMTQKPASAIVSKLEQIAETERFMVKKQDGLVKLQGSKQGRKGQLAIDAEIFEVTPAFHVVEVRKSAGDTLEYEMFCSKGLRPSLSDICWSSRSEENMAPSVVQPS

SEQ ID NO: 1716 - protein, 487 aa, Mycobacterium avium subsp. paratuberculosis str. k10
MTATASSPPRTGALLIGTERITAASGGSHQHRYPGTGVPNATIPLAGHSEVDRAVHSAREAQREWISYPVDRRRDLLFGLADLLRDHFAELTELNVHDYGVPISVAGNSVLTERFVRYYAGYPDKLTGASTPVSGAFDVNIVEREPYGVVAVIAPWNGPLVVAGAAVAPALAAGNAVIFKPSELASLAPLRFGELCLEAGLPPGLVNVLPAGPEGGEALVRHPGVGKVHFTGGHATAQQVLRAASDNVTPVTAELGGKSAYLVFADADLDTAAVIAAHQGPLTQAGQSCACASRILVEASVYVSFVEKLVAQVQAATIGDPLRPDVMLGPVITEAAADRILGVIDRAVAEKAGDLVTGGRRLGGELASGYFIEPTIFSNVDNRSSLAQTETFGPVASVMPFADEAQAVSLANDSRYGLNAFVATANLERAHRVARRLQAGSVWVNRHSDIEPQGPYGGYKQSGFGRTGGVEGLHEFLQVKNIRIGMS

SEQ ID NO: 1717 - protein, 238 aa, Oryza sativa
MCGIKQEMSGESSGSPCSSASAERQHQTVWTAPPKRPAGRTKFRETRHPVFRGVRRRGNAGRWVCEVRVPGRRGCRLWLGTFDTAEGAARAHDAAMLAINAGGGGGGGACCLNFADSAWLLAVRRSYRTLADVRHAVAEAVEDFFRRRLADDALSATSSSSTTPSTPRTDDDEESAATDGDESSSPASDLAFELDVLSDMGWDLYYASLAQGMLMEPPSAALGDDGDAILADVPLWSY

SEQ ID NO: 1718 - protein, 435 aa, Saccharomyces cerevisiae
MTLSKYSKPTLNDPNLFRESGYIDGKWVKGTDEVFEVVDPASGEIIARVPEQPVSVVEEAIDVAYETFKTYKNTTPRERAKWLRNMYNLMLENLDDLATIITLENGKALGEAKGEIKYAASYFEWYAEEAPRLYGATIQPLNPHNRVFTIRQPVGVCGIICPWNFPSAMITRKAAAALAVGCTVVIKPDSQTPLSALAMAYLAEKAGFPKGSFNVILSHANTPKLGKTLCESPKVKKVTFTGSTNVGKILMKQSSSTLKKLSFELGGNAPFIVFEDADLDQALEQAMACKFRGLGQTCVCANRLYVHSSIIDKFAKLLAERVKKFVIGHGLDPKTTHGCVINSSAIEKVERHKQDAIDKGAKVVLEGGRLTELGPNFYAPVILSHVPSTAIVSKEETFGPLCPIFSFDTMEEVVGYANDTEFGLAAYVFSKNVNT

SEQ ID NO: 1719 - protein, 463 aa, Anabaena variabilis ATCC 29413
MADLTPNSSFSVTLRLQIPNRVGMLASITQAIASSGGNLGQIDLIEQTRQVSLRDLTVDAASTEHAETIVQAVKAIPDIKLVSVYDRTFNLHRGGKISITSRIPLKSVSDLAMAYTPGVGRVCTAIAQDPSQVYNLTIKQNTVAIVTDGSAVLGLGNLGPHAALPVMEGKAMLFKEFAGLDAFPICLATQNTEEIIQAVKNIAPVFGGVNLEDIAAPRCFEIEQRLKQELDIPVFHDDQHGTAIVTLAALFNSLKLVQKSLTDIRIVINGAGAAGVAIARLLRKAGAEKIWMCDSKGIISTTRTDLNEEKQEFAVKAQGTLAGAVQGADVFIGVSAPGVLTPEMVKSMAKDPIVFAMANPIPEIQPELVQNDVAVIATGRSDYPNQINNVLAFPGVFRGALDCRAQTITTTMYLEAASAIASLVNPSDLSREHIIPSVFDERVVTAVAAAVQRAAREEGIARA

SEQ ID NO: 1720 - protein, 204 aa, Streptomyces avermitilis MA-4680
MNPQLPAVLSLPKVPAGPQLRKARRVRKVPVTPEWLPTVRKAPAVPERLPKVPKVLVIPEARKAPKVRKIPAVPEFRKGRKAPAVPERLPKVRKIPAVPKRRRVPKIPTNPRIPTSPVPDVSRPLPPRRAGAFPAGHAEDRGHRSPRPVRHRDAYLHPTAVLGRVAPAAQPDHRVSDLPHGVPPKRAVKHLSAGSWRPLTPWLV

SEQ ID NO: 1721 - protein, 499 aa, Dechloromonas aromatica RCB
MRHALLFSVFVIASCGLAYELIAGALSSYLLGDSVTQFSTVIGTYLFAMGAGSWLSKYITRDLIGRFIQIELMVGLLGGFSAVGLFLVFTWLSAPFKLVLYLAVFGVGVLVGLEIPLVMRILKRELAFKDLVSQVLTFDYLGALAVSILFPLVLAPQLGMVRTGLLFGVLNVAVALWALHLFREQLPSRRWLAMQSWGVFGLLAIGFAGAGQLTTFAEAHLYADEIVHAETTPYQRIVVTRWRDDLRLFLNNNLQFSSHDEYRYHEALVHPGLASLPGAKRVLVLGGGDGLAVREILKYPNVESVTLVDLDPAMTDLFATAPALVALNQGALKSERVTVVNADALQWLEDSKEYFDFIVIDFPDPANFALGKLYTSAFYRLIEKRLSARGLLVVQSTSPLYARQSFWCVVATLESAGFKTAPYHALVPSFGEWGYIIAGRQAFSMPAFASDKTRFLTSETLAGMFNFPADMARVPAEVNQLNNQVLVRYFETEWRKVIR

SEQ ID NO: 1722 - protein, 368 aa, Arabidopsis thaliana
MEDDRVFSSVHSTVFKESESLEGKCDKIQGYDFNQGVDYPKLMRSMLTTGFQASNLGEAIDVVNQMLDWRLADETTVAEDCSEEEKNPSFRESVKCKIFLGFTSNLVSSGVRDTIRYLVQHHMVDVIVTTTGGVEEDLIKCLAPTFKGDFSLPGAYLRSKGLNRIGNLLVPNDNYCKFEDWIIPIFDEMLKEQKEENVLWTPSKLLARLGKEINNESSYLYWAYKMNIPVFCPGLTDGSLGDMLYFHSFRTSGLIIDVVQDIRAMNGEAVHANPKKTGMIILGGGLPKHHICNANMMRNGADYAVFINPGQEFDGSDSGARPDEAVSWGKIRGSAKTVKVYCDATIAFPLLVAETFATKRDQTCESKT

SEQ ID NO: 1723 - protein, 102 aa, Fragaria x ananassa
MATLDSDVPMIPVGEGSSSAGPSSTKKPKRFEIKKWNAVALWAWDVVVDNCAICRNHIMDLCIECQANQASATSEECTVAWGVCNHAFHFHCISRWLKTRQV

SEQ ID NO: 1724 - protein, 274 aa, Listeria monocytogenes str. 1/2a F6854
MNLKDTVKLANGVEMPRLGFGVWKVQDGDEAVNSVKWAIEAGYISIDTAAAYKNEEGVGQAIKESGIKREDLFVTTKLWNAEQGYESTLAAFDESLRKLELDYVDLYLIHWPVKGKFKDTWRAFEKLYKDKRVRAIGVCNFHEHHLKELMEDAEIAPMVNQIELHPQLTQEPLRKFCAENNIVVEAWSPLGNGKLLSNPEIKAIADAHGKSVAQVILRWDLQIGVVTIPKSVHQERIIQNADIFDFELSEEEVAKISGLNKDERTGPDPDNFNF

SEQ ID NO: 1725 - protein, 160 aa, Bacillus cereus G9241
MTVYDFSAKTITGEDKSLKDYEGKALLIVNVASKCGFTPQYKGLQEVYDKYKDQGLEILGFPCNQFGGQEPGTEADITSFCELNYGVNFPMFAKIDVKGDKAHPLYTYMTEQAPGLLGMKAVKWNFTKFLIGKDGKVVGRFAPQTKPVDLEVEIEKVLGE

SEQ ID NO: 1726 - protein, 219 aa, Helianthus annuus
MKSFTGTTQKCTVCEKTVYLVDKLVANQRVYHKACFRCHHCNSTLKLSNFNSFDGVVYCRHHFDQLFKRTGSLEKSFDGTPKFKPERTFSQETQSANRLSSFFEGTRDKCNACAKIVYPIERVKVDGTAYHRACFKCCHGGCTISPSNYIAHEGRLYCKHHHIQLFKKKGNYSQLEVEETVAAPAESETQNTETQNAETQNADTQNADTQNTETQNGSV

SEQ ID NO: 1727 - protein, 179 aa, Glycine max
  misc_feature (122)..(122): Xaa can be any naturally occurring amino acid
  misc_feature (125)..(125): Xaa can be any naturally occurring amino acid
  misc_feature (162)..(162): Xaa can be any naturally occurring amino acid
MASSMISSPAVTTVNRAGAGMVAPFTGLKSMAGFPTRKTNNDITSIASNGGRVQCMQVWPPVGKKKFETLSYLPDLDDAQLAKEVEYLLKKGWIPCLEFELKHSFIYHKHNKSPEYYDRHYXPYXKLPIFNYTNTSQVLKELQEAKTTYPNHFIHIIKFNNXVRQVQYIIFITYKPPSF

SEQ ID NO: 1728 - protein, 444 aa, Nanoarchaeum equitans Kin4-M
MKIEVRAVGGYNEIGANMTAIGIDDEWLIIDMGVHVDKMLAFQKDQEEVVEWNRELLEKINALPKIEYIEDIKDKVKAILITHGHLDHIGAVIHLAYEFNAPIIGPPYAIELIRSFEKDYKIILPNEMKKINLNSSIQISDKISVDFIYATHSIPHSAHLAIHTPKGVIFFSGDYKFDNFPVIGQRYNLEKLKEIAKEGVILAFIESTRADEDKRSYSEIIAREMLRDVLFEEHEGLIIMTTFSSHIARLKSMVELSLELDRDVYILGRSMVKNVEIAEKLGIYKFSDKAKIYQYHDQIARLLKKIDDRSKYALIVTGNQGEPGSVLWRMAFEKFPFRLDKKDTVIFSCFTIPNAINIAFRNLIEEKIKSFGTRIIKDVHVSGHAMRDDHYRLIKILKPQIIIPNHGDFIKRGALADLAMNEFGYSLGKDLFLIQNGQRINFEF

SEQ ID NO: 1729 - protein, 503 aa, Burkholderia cepacia R18194
MQFNDILAALDIDLAQWKGNALTARSPLDGATLAKLAVDTPADAERKIDAAHDAFLKWRTVPAPVRGELVRVFGNVLREHKAELGALVTLEAGKITSEGLGEVQEMIDICDFAVGLSRQLYGLTIASERPGHRMMETWHPIGVCGVISAFNFPVAVWAWNAALAFVCGDSVVWKPSEKTPLTAIACHVLLQKAIREFDKTHPGVAPAELSQLVLGMRDVGEVLTASKKVPVVSATGSVRMGQEVAKVLSQRLARGILELGGNNGMIVAPSADLDLVVRAVTFAAVGTAGQRCTTLRRLIVHRSLVEQLLPRIEKAYTSVKVGNPLEEGTLVGPLVDRASFDAMQKALGDAREQGGEVKGGERVDVGHADAYYVRPALVRMPKQSAVVERETFAPILYVMVYDNFDDAIELHNAVPQGLSSAIFTNDMREAEQFMSAAGSDCGIVNVNIGTSGAEIGGAFGGEKETGGGRESGSDAWKAYMRRATNTINYSRQLPLAQGVKFDV

SEQ ID NO: 1730 - protein, 421 aa, Zea mays
  misc_feature (381)..(381): Xaa can be any naturally occurring amino acid
MGNTCIGPSAPSDRHSFFNTVSLAVLWRPPAAADRAEPSPTAEPSSSTPCSPPSRAPNPVTISDSEHPPHSTSTALGPAAPPNPNGKPKPKPKVKRVQSAGLLAGSVLKRDSERLKDVYTLGKKLGQGQFGTTYQCVEKATGKHFACKSIAKRKLVTDEDVEDVRREIQIMHHLAGHPNVVSIVGAYEDAVAVHLVMELCAGGELFDRIIQRGHYSEKAAAQLARVIIGVVEACHSLGVMHRDLKPENFLFVNQKEDAPLKAIDFGLSIFFKPGEIFSDVVGSPYYVAPEVLKKRYGCEVDVWSAGVIIYILLSGVPPFWAESEQGIFKQVLKGGLDFSSDPWPSISESAKDLVRKMLNRDPRKRLTAHDALCHPWGLCRXGVAPDKPLDSAVLTRLKQFSAMNKLKKMALKGIAENLAED

SEQ ID NO: 1731 - protein, 357 aa, Secale cereale
MKTFLIFVLAMTMSIITTARQLNPSEQELQSPQQPVPKEQSYPQQPYPSHQPFPTPQQYSPYQPQQPFPQPQQPTPIQPQQPFPQQPQQPFSQPQQQLPLQPQQPFPQPQQPIPQQPQQSFPQQPQRPEQQFPQQPQQIIPQQTQQPFPLQPQQPFPQQPQRPFAQQPEQIISQQPFPLQPQQPFSQPQQPFPQQPEQIIPQQPQQPSPLQPQQPFSQQPQRPQQPFPQQPQQIIPQQPQQPFPLQPQQPVPQQPQRPFGQQPEQIISQRPQQPFLLQPQQPFSQPQQPFLQQPGQIIPQQPQQPFPLQPQQPFPQQPEQIISEQPQQPFLLQPQQPSPQQPQLPFPQPQQPFVVVV

SEQ ID NO: 1732 - protein, 181 aa, Zea mays
  misc_feature (19)..(20): Xaa can be any naturally occurring amino acid
  misc_feature (23)..(23): Xaa can be any naturally occurring amino acid
  misc_feature (29)..(29): Xaa can be any naturally occurring amino acid
  misc_feature (112)..(112): Xaa can be any naturally occurring amino acid
RAPWLFFAAAFCGRGVALXXGEXAFSPSXPAVQRRVASGRPSGPGGSDFSYRLVVVSRSQRVAVGGWRLARLILVRALRLGAGGLLLLLSLSKGAAVNKFAVLSMAAGFLAXVVGELGRMRAMSVLLRLCPCLSSVAGASSVAGIVRAGGVFGGVGRFPGAVPCVVLLGAGRVALGSCCNG

SEQ ID NO: 1733 - protein, 429 aa, Vibrio parahaemolyticus RIMD 2210633
MADKKATLHVEGQAPIELPIMDGTLGTPVIDVRKLGANGYFTFDPGFLATASCESSITYIDGGKGILLHRGYPIDQLANNADYLEVCYILLYGEAPTREQYEQFKTTVTRHTMVHEQIASFFHGFRRDAHPMAVMCGVVGALAAFYHDSLDINNDEHREIAAYRLLSKMPTLAAMCFKYSVGQPFIYPRNDLSYAENFLHMMFANPCEEYEVNPVVARAMDKIFTLHADHEQNASTSTVRLAGSSGANPFACIAAGIASLWGPAHGGANEACLKMLEEIGSVDNIPEYVERAKDKDDPFRLMGFGHRVYKNYDPRATVMRETCHEVLKELNIKDPLLDVAMELERIALSDEYFVSKKLYPNVDFYSGIILKAIGIPVSMFTVIFAISRTIGWIAHWNEMHSDPLNRIGRPRQLYKGETQREFSPLHERE

SEQ ID NO: 1734 - protein, 435 aa, Pyrococcus furiosus DSM 3638
MARITEEQRRKLAQDALEYHRNNFPGNGKIEVIPKVPLRDFYDLSLAYTPGVAEPCKVIAKKGNYEDYTIIPNTVAVVTDGSAILGLGNIGVLAGMPVMEGKCVLFKALAGIDAFPILIDTQDVEKIVETIKLISKGFGGINLEDISAPRCFEIEMRLKRELDIPVFHDDQHGTAVVTLAGLINALKLVGKKFNEIKVAISGAGAAGIAIAKLLHHVGVKEILLVDRAGIIYEGRKENMNPYKEEVARFNIHGVQGDLAKAMEGADVFIGVSVGGIVKPWMIKKMADDPIVFAMANPIPEIMPEDAKKAGAKIVATGRSDYPNQINNVLGFPGIFRGALDVRATDITLNMNIAAAEAIASVVSDEELSEDYIIPSPLHPDVYPKEARAVAEQAIRDGVARRKLSGEWVEEHTRKLREFYAALIEPLNERRKQYIT

SEQ ID NO: 1735 - protein, 393 aa, Lycopersicon esculentum
MPQLVKLPLPFPINGKRTLPILKHFLTSSSPSPSPSHALTSVRSVTYMPRPGDGTPRAVTLIPGDGIGPLVTGAVEQVMEAMHAPVLLWRYDVHGDMKEYASGDVDGISNPGRNKVWFKREGWKTPVGGGVSSLNVQLRKELDLYASLVHCFNLKGLPTRHENVDIVVIRENTEGEYSGLEHEVVPGVVESLKVMTKFCSERIAKYAFEYAYLNNRKVVTAVHKANIMENLLMVYFWESCRRDRKQITLGSSTMRELWTTVACNLYQSLSNLMLWSPLISTEIWLTNTAAGIAGGTGCLCPGGNVGGDHAVFEQGASAGNVGNEKILEQKKANPIALFLSSAMMLRHLQFPSFADRLETSVKRVIAEGKYMTKDLGGDCTTQEITDAVIANLD

SEQ ID NO: 1736 - protein, 360 aa, Zea mays
MARILLHGSLHVTIFEAEELSNSSRPSSQAPGFLRKLVEGIEDTVGVGKGTSKIYATIGLGKTRVGRTRKLTDETASPRWYESFHVYCAHLASDVVFTIRAKNPIGASTVGVAYLPVRDIFEGHEVDRWLHLCDGGGDDKDRTPLESGGKVHVRLQYFDISKDHSWGKGVRSGKYPGVPYTFFSQRQGCRVTLYQDAHVPDGFVPRIPLDGGRCYEAHRCWEDIFDAISGAKHLMYITGWSVYTEITLLKDGARPPRPGSGVTLGELLKKKAGEGVRVLMLVWDDRTCVGALKKDGLMATHDEETMNYFEGTDVHCVLCPRNPDDFGSIVHDLQISTMFTHHQKIVVVDHDMPVQRSHRQ

SEQ ID NO: 1737 - protein, 159 aa, Exiguobacterium sp. 255-15
MLQEQTFQRIDGTEATLKDYPGQAWLIVNTASKCGLTPQFEGLEQLHQDYRKQGLVVLGFPCNQFAGQDPGTDEEIQSFCQMNYGVTFPVFSKIEVNGKGTHPLFAELKALAPNTTGEQDVEWNFTKFLVTRDGEVTRFAPKTNPTDLVAAIERIVVPV

SEQ ID NO: 1738 - protein, 366 aa, Glycine max
MGLRSKLRMSASVVQQGMKEIRRSVTYMPRPGDGAPRGVTLIPGDGIGPLVTHAVEQVMEAMHAPIYFEKYDVHGDMRRVPEEVLDSIRKNKVCLKGGLRTPVGGGVSSLNVQLRKDLDLYASLVNCFNLPGLPTRHHNVDIVVIRENTEGEYSGLEHEVVPGVVESLKVMSKFCSERIAKYAFEYAYLNNRKQVTAVHKANIMKLADGLFLESCRHVATKYPGIKYNEIIVDNCCMQLVSKPEQFDVMVTPNLYGNLVANTAAGIAGGTGVMPGGNVGADHAVFEQGASAGNVGKEKMVEQKKANPVALLLSSAMMLRHLQFPSFADRLETAVKRVISEGNCRTKDLGGDSTTQQVVDAVIANLD

SEQ ID NO: 1739 - protein, 283 aa, Streptococcus agalactiae NEM316
MATIQWFPGHMSKARRQVQENIKHVDFVTILVDARLPLSSQNPMLTKIVGDKPKLMILNKADLADPIRTKEWRDFYESQGLKTLAINSKEQSTVKKVTDIAKILMSDKIAKLRGRGIQKETLRTMIIGIPNAGKSTLMNRLAGKKIAVVGNKPGVTKGQQWLKSNKELEILDTPGILWPKFEDELVGLKLALTGAIKDQLLPMDEVTIFGLNYFKTYYPDRLKERFKSINLEDEAPEIIMALTQKLGYRDDYDRFYNLFVKEVRDGKLGRYTLDIVGEHDGNN

SEQ ID NO: 1740 - protein, 112 aa, Triticum aestivum
  misc_feature (99)..(99): Xaa can be any naturally occurring amino acid
MATPTVEKPDGVEIREVWAENLEAEFAVIREIVDDYPYVAMDTEFPGVVCRPLGTFKSNADFNYATLKANVDMLKLIQLGLTFSDERGGLPALGPDGRXASRQFNFRGEQAR

SEQ ID NO: 1741 - protein, 1342 aa, Escherichia coli O157:H7
MSQEYTEDKEVTLTKLSSGRRLLEALLILIVLFAVWLMAALLSFNPSDPSWSQTAWHEPIHNLGGMPGAWLADTLFFIFGVMAYTIPVIIVGGCWFAWRHQSSDENIDYFAVSLRIIGVLALILTSCGLAAINADDIWYFASGGVIGSLLSTTLQPLLHSSGGTIALLCVWAAGLTLFTGWSWVTIAEKLGGWILNILTFASNRTRRDDTWVDEDEYEDDEEYEDENHGKQHESRRARILRGALARRKRLAEKFINPMGRQTDAALFSGKRMDDDEEITYTARGVAADPDDVLFSGNRATQPEYDEYDPLLNGAPITEPVAVAAAATTATQSWAAPVEPVTQTPPVASVDVPPSQPTVAWQPVPGPQTGEPVIAPAPEGYPQQSQYAQPAVQYNEPLQQPVQPQQPYYAPAAEQPAQQPYYAPAPEQPVAGNAWQAEEQQSTFAPQSTYQTEQTYQQPAAQEPLYQQPQPVEQQPVVEPEPVVEETKPARPPLYYFEEVEEKRAREREQLAAWYQPIPEPVKEPEPIKSSLKAPSVAAVPPVEAAAAVSPLASGVKKATLATGAAATVAAPVFSLANSGGPRPQVKEGIGPQLPRPKRIRVPTRRELASYGIKLPSQRAAEEKAREAQRNQYDSGDQYNDDEIDAMQQDELARQFAQTQQQRYGEQYQHDVPVNAEDADAAAEAELARQFAQTQQQRYSGEQPAGANPFSLDDFEFSPMKALLDDGPHEPLFTPIVEPVQQPQQPVAPQQQYQQPQQPVAPQPQYQQPQQQVAPQPQYQQPQQPVAPQQQYQQPQQPVAPQPQYQQPQQPVAPQPQYQQPQQPVAPQPQDTLLHPLLMRNGDSRPLHKPTTPLPSLDLLTPPPSEVEPVDTFALEQMARLVEARLADFRIKADVVNYSPGPVITRFELNLAPGVKAARISNLSRDLARSLSTVAVRVVEVIPGKPYVGLELPNKKRQTVYLREVLDNAKFRDNPSPLTVVLGKDIAGEPVVADLAKMPHLLVAGTTGSGKSVGVNAMILSMLYKAQPEDVRFIMIDPKMLELSVYEGIPHLLTEVVTDMKDAANALRWCVNEMERRYKLMSALGVRNLAGYNEKIAEADRMMRPIPDPYWKPGDSMDAQHPVLKKEPYIVVLVDEFADLMMTVGKKVEELIARLAQKARAAGIHLVLATQRPSVDVITGLIKANIPTRIAFTVSSKIDSRTILDQAGAESLLGMGDMLYSGPNSTLPVRVHGAFVRDQEVHAVVQDWKARGRPQYVDGITSDSESEGGAGGFDGAEELDPLFDQAVQFVTEKRKASISGVQRQFRIGYNRAARIIEQMEAQGIVSEQGHNGNREVLSPPPFD

SEQ ID NO: 1742 - protein, 487 aa, Rubrobacter xylanophilus DSM 9941
MSETQTREELVSYPAIIGGERVSPERSFEDVDPSTGRPCALVARCGRQEVDRAVEAAREAHEKAWRRSTPAERARVLHRISQLLRRDHEEIARLESLDTGKPLSQARADATVAARYFEFYANTIESFYGETIPALPDAFVYTLREPHGVTGHIIPWNYPIQISCRSVAPALATGNCCVLKPAEEAPLTALRLGELALEAGLPPGALNVVPGYGEEAGAALAAHPGIDHLSFTGSVEVGRLVSRSAADNVVPVTLELGGKSPNIVLADADLERAVPVIVNSIIQNAGQTCSAGSRLLVESRLHGELVERVASRFQEIRIGPGPEDPDLGPIISEAQRERVKGYVETGRREAELVTGGGVPQDPRLAGGFYFEPTLFDRVEPGSTIFREEIFGPVLAVSTFEEAEEAAALANATDYGLIAAVWTRDVGKAHWLARELRVGQVYINTYGAGGGVELPFGGFKKSGHGREKGYEALYEYTQVKTVALSYAR

SEQ ID NO: 1743 - protein, 428 aa, Vibrio cholerae O1 biovar eltor str. N16961
MMMDLAFDRCHIWHPYTSTLTPLTCYPVSRADGVMITLEDGRSLVDGMSSWWAAIHGYNHPKLNQAAHQQIEQMSHIMFGGLTHQPAIELCQKLLKLAPNNLQQVFLADSGSVAVEVSLKMALQYWHSKGQPRAKFLTLRHGYHGDTFAAMSVTDPDNSMHSLYKGFLPEHIFANSPEGGFFDAWDERDIADFRHKLTEHHHQIAAVILEPIVQGAGGMRIYHPEFLRQVRALCDEFGVLLILDEIATGFGRTGKLFACEHAGIQPDILCVGKALTGGYMTLSATLTTQQVADTVCAGEAGCFMHGPTFMGNPLACAVASASLSLIEQGDWQQQVANIEAFFAEQLPKLNDSPRVKQTRWLGAIGVVETHLPVNMEVIQALFVEHGVWIRPFGRLIYLMPPYISQPEHLQKLVDAMAAALNQPDCFKQ

SEQ ID NO: 1744 - protein, 101 aa, Zea mays
MAGVSRSMVAPLLVLNLVMYIVVIGLASWNLNHFINGTTNYAGVAGNGATFYFLLFAILAGVVGAASKLAGVHHVRTWRGDSLATSASSALVAWAITALAF

SEQ ID NO: 1745 - protein, 529 aa, Glycine max
MELSYCAVFLILLIPISRADATSVEKQFKECLLTQLDGNSEHIEKITFTSSSTLYPQVWDSLAQNPRWVNISSRKPLMILTPFHESEIQAAILCSKELKLQLRVRSGGHDYEGLSYLSDVPFVMVDLINIRSIEINLADETAWVQAGASIGELYYKISKASKVHGFPAGTCPSVGIGGHISGGGQGLMLRKHGLAADNVVDAYLIDANGKIHDRKSMGEDVFWAIRGGDASSFGVILAWKIKLVRVPPIVTGFNVPRTPEEGVTDLIHRWQYIAHDLHEDLVIRVIAQISGHDKSKKFRATFNSIFLGGVDRLIPLMNESFPELGLQAKDCTEMSWIQSVMFIAGYNIEDPLELLLNRTTMFKRSFKAKSDFFKEPIPKSGLEGAWKLLLEEEIAFLIMEPYGGRMNEISESEIPFPHRKGNLYNLQYLVNWEVNSDEASRRHLQWAKMVYKYMTPYVSKSPRAAYFNYKDLDLGKNKLDSTSYSEASVWGKKYFKGNFRRLAQIKTKFDPLNFFRNEQSIPLLNSHHS

SEQ ID NO: 1746 - protein, 327 aa, Escherichia coli
  misc_feature (180)..(180): Xaa can be any naturally occurring amino acid
MNGAQWVVHALRAQGVNTVFGYPGGAIMPVYDALYDGGVEHLLCRHEQGAAMAAIGYARATGKTGVCIATSGPGATNLITGLADALLDSIPVVAITGQVSAPFIGTDAFQEVDVLGLSLACTKHSFLVQSLEELPRIMAEAFDVACSGRPGPVLVDIPKDIQLASGDLEPWFTTVENEVXFPHAEVEQARQMLAKAQKPMLYVGGGVGMAQAVPALREFLAATKMPATCTLKGLGAVEADYPYYLGMLGMHGTKAANFAVQECDLLIAVGARFDDRVTGKLNTFAPHASVIHMDIDPAEMNKLRQAHVALQGDLNALLPALQQPLNQ

SEQ ID NO: 1747 - protein, 427 aa, Schizosaccharomyces pombe
MSSVEVNRENADVANTNRQANLAEGYEIKELNESQKQYIRSSIPILESSGVNLTKAFYQKMLGNYPEVLPYFNKAHQISLSQPRILAFALLNYAKNIDDLTSLSAFMDQIVVKHVGLQIKAEHYPIVGHCLLSTMQELLPSDVATPAFLEAWTTAYGNLAKILIDSEKKVYQSQPWNGFVEFKVTELINESSDVKSVYLGPKDPAFRISHAHPGQYVSVLWEIPGLSHKTLREYSLSNRVDTCRNQFRISVRRVAGGVVSNFVHDNLKVGDIVGVSPPAGNFVYKRSEENVNRPLLCFAGGIGITPLIPIIETALLDGRKVNFCYSSRNYVSRPFKQWLEQLKLKYKENLKLKEFFSEESSVTKEQIVDEVMTRIINEEDLEKLDLSECDIYMLGPNNYMRFVKQELVKLGVEPNKVQSEFFGPYIP

SEQ ID NO: 1748 - protein, 208 aa, Glycine max
  misc_feature (183)..(183): Xaa can be any naturally occurring amino acid
MESPSRSFVIIVGAGVSGISAAKLLAENGVKDLVILEASNCIGGRIRKENFGGVSVELGAGWIVGVGGKESNPIWELVAEYGLRTCFSDYTNVPYNIYDRSGKIFSSGIAADSYKKAVDSAIRNLTNQEEADREGNSSKTTEPPSSPLELAIDFILHDFEMAEAVPISTFTAFGEREFLVADXRSMASISLSAHMSFSALTTFALERL

SEQ ID NO: 1749 - protein, 480 aa, Pseudomonas syringae pv. tomato str. DC3000
MQLKDSTLFRQQAYINGQWLDADGGQSIKVNNPATNEILGTVPKMGAAETRRAIEAADKALPAWRALTAKERGNKLRRWFELMIENQDDLGLLMTLEQGKPLAEAKGEITYAASFIEWFAEEAKRVYGDVIPGHQPDKRLIVLKQPIGVTAAITPWNFPAAMITRKAGPALAAGCTMVLKPASQTPFSALALAELAERAGIPAGVFSVVTGSAGDIGSELTGNPIVRKLSFTGSTEIGRQLMAECAKDIKKVSLELGGNAPFIVFDDADLDKAVEGAMISKYRNNGQTCVCANRIYVQDGVYDAFAEKLKVAVGKLKIGNGLEDGITTGPLIDEKAVAKVKEHIADAVSKGATVLTGGNSLEGSFFEPTILVNVSKDAAVAREETFGPLAPLFRFKDEAEAIALANDTEFGLASYFYAQNMSRVFRVAEALEYGMVGINTGLISNELAPFGGIKSSGLGREGSKYGIEDYLEIKYLCLSV

SEQ ID NO: 1750 - protein, 484 aa, Oryza sativa (japonica cultivar-group)
MANNSSYGENVRRKSHTPSAIVIGSGFAGIAAANALRNASFEVVLLESRDRIGGRIHTDYSFGFPVDLGASWLHGVCEENPLAPIIGRLGLPLYRTSGDDSVLFDHDLESYALYDTKGHQVPQELVEKIGKVFETILEETGKLREETKEDISIAKAIAIVMERNPHLRQEGIAHDVLQWYLCRMEGWFATDADAISLQGWDQEVLLPGGHGLMVRGYRPVINTLAKGLDIRLGHRVVEIVRHRNRVEVTVSSGKTFVADAAVIAVPLGVLKANTIKFEPRLPEWKEEAIRELSVGVENKIILHFSEVFWPNVEFLGVVSSTTYGCSYFLNLHKATGHPVLVYMPAGRLACDIEKLSDEAAAQFAFSQLKKILPNAAEPIHYLVSHWGSDENTLGSYTFDGVGKPRDLYEKLRIPVDNLFFAGEATSVQYTGTVHGAFSTGLMAAEECRMRVLERFRELDMLEMCHPAMGEQTATVSVPLLISRL

SEQ ID NO: 1751 - protein, 145 aa, Nicotiana plumbaginifolia
GASKTYPQQAGTIRKNGHIVIKNRPCKVVEVSTSKTGKHGHAKCHFVAIDIFTGKKLEDIVPSSHNCDVPHVNRTDYQLIDISEDGFVSLLTENGNTKDDLRLPTDDNLLALIKDGFAEGKDLVLSVMSAMGEEQICGIKDVGPK

SEQ ID NO: 1752 - protein, 174 aa, Microbulbifer degradans 2-40
MLACTFTASTHAAEESAQCPSYLDHSFKKLHSTQTVNLCELYTGKPLLIVNTASHCGYTKQFGGLEKLYQSYKDQGLQVIGFASDDFKQAAKSEMEAATICYKNYGVTFTMLAPTTVTGEKANAVFSHLNANTSAPSWNFNKYLITKNGQNIEKFNSDVTPLASDLEKKVQKAL

SEQ ID NO: 1753 - protein, 386 aa, Aspergillus parasiticus
MTGLDMEIIFAKIKEEYARTDDVGKRQIQGHIRELQVGFYSDWDVVMRLSSGPLQVALTKVGIDLGIFRSLKESDTPITLAEIVKKTGASPRLLGRILRTQAAFGLIKETGPQEYTSSAFTDVFANSDAAGAVVQLFDISGPCTQILPDFLAERNYQDITSNKDCVFQKAFGSDLTMFEWMPQHPKHMESLGHLMALERPVSWVDHYPVLEELGGFPAPDKVLMVDIGGGFGQQSKALRAKFPDLPGRLIVQDIPQTLANAQPAAGIEFMEHNFFEPQPIQNAKFYYLRHVFHDWPDEQCVLILKQIIPAMGPESQILIDEMVIPSTGVPWQAAFTDLLMMNSLGGVERTRAEWDDLMEQVGLEIIQSKVYDSKEQAILVAVPKRT

SEQ ID NO: 1754 - protein, 331 aa, Synechococcus elongatus PCC 7942
MDASLLLRQITTGYWGSQALYVAAKLGIADQLVNGPRSCEDLAIVVGAKPEVLYRLLRALASLGIFTEVSDRQFALTPAAELLRSGTAGSLRNLVMMFGEEHYVAWGELLHSIQTGENAFEHHYGAPVFAYYAQHPASADIFNGAMSDMSRPDTAAVLSSYDFQGIRCLVDVGGGHGQLLSQILAAYPDLTGILYDQPAVVAGADSVLADVSDRCEVVGGDFFASVPAGGDAYLLKHIIHDWDDADSLKILANCRQVMQPGDRLLLLEQVVRAGNEPNLAKWLDLNMLVMTQGGRERTQAEFATLLADAGFQLSQIHGTASEVCIIEGRAI

SEQ ID NO: 1755 - protein, 528 aa, Triticum aestivum
  misc_feature (215)..(215): Xaa can be any naturally occurring amino acid
  misc_feature (381)..(381): Xaa can be any naturally occurring amino acid
  misc_feature (443)..(443): Xaa can be any naturally occurring amino acid
  misc_feature (472)..(472): Xaa can be any naturally occurring amino acid
  misc_feature (479)..(479): Xaa can be any naturally occurring amino acid
  misc_feature (522)..(522): Xaa can be any naturally occurring amino acid
MSAIKPPPPDRPPQAARLPSPSSSSSAAAAAKQGATGSRGLLMGRYELGRVLGKGTFAKVYHARHVQTGESVAIKVLDREKAVRSGLVSHIKREIAVLRRVRHPNIVHLFEVMATKTKIYFVMELLVRGGELFSRVSKGRLKEDIARRYFQHLISAVGFCHTRGVFHRDLKPENLLVDEAGNLKVSDFGLSAVAEPFQPEGLLHTFCGTPAYVAXPEVLARRGYEGAKADIWSCGVILFVLMAGYLPFHDQNLMAMYRKVYKGEFRCPRWFSKDLTSLIMRFLDTNPSTRITLPEVMESRWFKKGFRPVKFYIEDDQLYNVIDAENDMLDLGLPDPLPQPLPPPPPSPSPQQVDGDDSGSESDASVVSCPATSSFEERHRXPGPLPRPASLNAFDIISFSRGFNLSGLFEEKGDEVRFISGEPMPDIITKLEEIANGKSFAVXRKKDWRVSLEGTREGGKGPLTICAEIFEXRPSLVVXEVKKKAGDKEEYDDFCNKELKPGMQHLVHQMAPVPITPTISEXAERPSR

SEQ ID NO: 1756 - protein, 190 aa, Griffithsia japonica
ARGTGGVYATAERCAVTTTLAGATGGVVTLIVIKIRDHIFDLLACLNGILAGLVAITACCAFVDPWAAVVIGAIGAVVYIGAAMLLLKFQIDDPLEAFPIHGASGAWGCLAGTLFNKQGHQVTAGFTDQIWGLFYGGGGRLLGVNALGMVVITVWTVGLVTPLFLVMKFTGILRISPEEEIIGNDVSKHG

SEQ ID NO: 1757 - protein, 502 aa, Pseudomonas fluorescens
MTRSLTMNSSLPAIDGLRLPHQMLIGGQWVNAQSDKTLNVYNPATGDTLTDVPDGDVEDVNAAVESAAATLQSDAWRRMPPSARERILLRLADLLEAHGDELARLETLNNGKLLIYSKMMEVGASAQWLRYMAGWATKLTGSTLDLSLPLPPDVRSRASTQRVPVGVVAAIIPWNFPLLMAVWKIAPALACGNTVVLKPAEETPLTALRLAELAMEAGLPAGALNVVTGRGETAGDALVRHPKVAKVAFTGSTEVGRIIGSACGRSLKAVSLELGGKSPVIVLADCDPQEAAEGAAAAIFFNHGQVCTAGSRLYVHESIYEDVIQRLAVIGESIVVGSGLEQGVHMGPMVSKKHHENVLRHIRNGIEDGADLICGGTEAPCAQGFFVKPTIFANREKKDIRLLSQEVFGPVLVATPFSDIAEVVNEANRSVYGLGASIWTNDLSAALRINDELEAGTVWVNTHNMVDPNLPFGGFKDSGVGREHGAAAIEHYTTTRSLVIAY

SEQ ID NO: 1758 - protein, 456 aa, Triticum aestivum
FIRHHRTATEEGGMAAAGGGPRRTTRVGPYELGKTVGEGSFAKVKIAKDTRNAATCAIKVLDRNHVLRHKMVEQIKGEIATMKLIRHPNVVQLHEVMASKSKIYMVLEFVEGGELFDKIVNSGKLGEDEARRYFHQLINAVDYCHSRGVYHRDLKPENLLLDSYGALKVSDFGLSAFSPQTKEDGLLHTACGTPNYVAPEVLADKGYDGMAADVWSCGIILFVLMAGYLPFDDPNLMTLYKLITRANVSCPPWFSTGARNLIKRILDPNPHTRITIAQILEDEWFKKDYKPPHSEHNEDVSLEDVDAAFDSSEEHLVAERREKPESMNAFALISRSEGFNLGNLFEKEMMGMVKRETSFASQRTPQEIMSKIEEACGPLGFNVRKQNYKMKLKGDKTGRKGHLSVATEVFEVAPTLHMVELRKTGGDTLEFHSFYKNFSSELKDIVWKTESNTIAK

SEQ ID NO: 1759 - protein, 117 aa, Prunus avium
MACSAMTKLALVVALCMVVSVPIAQALTCGQVSSNLAPCIAYVRGGGAVPPACCNGIRNINNLAKTTADRQTACNCLKQLSASVPGVNANNAAALPGKCGVNVPYKISPSTNCATVK

SEQ ID NO: 1760 - protein, 1362 aa, Ustilago maydis 521
MNPSYTERRASAHPTMSSSAHHASSTPSAASIDPTTSHAISSGIPITSPAALSYFAAHPRRQQVHFGNYLLLQTLGEGEFGKVKLGVHKEWGEEVAVKLIKRDKVANDAAPLHLDDSAQKDPAKMSKVEREIQVLKDVRHPNIVRLYEVIESDRYIGIVLEYASGGELFDHILAHKYLKEEHACRLFAQLISGVSYLHHKKIVHRDLKLENLLLDRNRNVIITDFGFANNFEHKRNDLMATSCGSPCYAAPELVVQDGLYAGSAVDVWSCGVILYAMLAGYLPFDDDPANPDGDNINLLYKYILATPLSFPEYITAQPRDLLSKMLVPDPTRRATLEQVMQHSWLRHYRELFKFSVDDLERAAMEQQTKKRQMYRQQMMYQQQLQEQQRRQQMERSQSVRHNVSHLPVGTAYTANTAVSAVSAANVAHRQTLPISATVPDRLYEPIGSASRGADHSVTPQRAPTASSHQPPVAPTASADAAIAPLPRASTHNNVAAAADAAAAVAAAPSPVDPVTALGNARGEPRTRLDDAVPTIAAAYETEPRQLAAQKVQRHTIQLEYGGDERPRKESAPGSRQASQTQRNASASSTSSKLAEIERTKTAADKPAANANAIVPPSVLQSTSVQVPATSVVVPESEKANISKAGAPDMMRSVSASAASRVSVPPPIMEQTQPSVSAHRSTQPTSSSRVRAPSSASRNNADSGSTGHATRIPTSASQRVVSTSSAASEPVGFPSSATERTIPSADADAAAGRISASRRASNGAEITEPSHRSPSATRHATADNAPVTSASASARHRKGMSTDKFFLSRLLGSNSANQPNGAGVAGDKVSANGSDAAGDKTKRDSMNRPAPERAPSSSSTGKNGRRKAMSLVVGHASGEASSAAADRNRALKAGMPHSATRATFGTQVSGKADDSVSSAQKQRKGSASLASQTTSTSRAAQSSTRPQPLQPSLQQQQQQQDKAFNDGSTIASSSTAGPSSNAAKKVMDWFRKKSLSRGTFNEQPPLGLFERSPTSSYMHGSASQTPSVIVTSAPNGTSRHAEAPSGGSSVPSSRSTSGTHSENSEATEMTQLTNLSDASHQEGDGLKSSASTVQQQATPKASLSAVSNVSDASAAGSLVSTRSQQQQRPQPRVATATSASTTPARFNEARLRYHLGAVDQSALTSRSPIEVLKEVQRVLYEMGIDVRTEKDEDFKLECVRRKRAKTLMSATHGFGMSIRSSVFPPTQADVERSSRMSHRDSLTPSASSPGGGSLRSFLKRSSLQPGATSPKMGSSTLPSSATVTSNLGGAVHDENQPPPLYGDASVDGGQEIRFSVEVTRIKNLTGLYSLDIRRMKGNLWAYKFVYQALLDRCQLGSSTAAVG

SEQ ID NO: 1761 - protein, 402 aa, Arabidopsis thaliana
MLPVKDVVTTSVLSKPWRSLWKLVPTLKFDYENNQSEDETYSEIVCRLLLSNKAPFLESLHLGFRFGECRSVEVGMWIGIAYARHVRDLVLHVESVKGSFIFPTGLYNCETLESLTLRSWVLVDVPSPACLKSLRTLRLENVDYKYDDSVYNLLSGCPNLENLVVYRGNLLEVETFTIAVPSLQRLTIYDDNDGEYCTGYVINAPSLKYLKIDGFKALESCLIENAPELVEATIMNVSKIINEKLLETLTSVKRLSLALSPLELKFSCNNYSEWWNLLVLMLDSSPKLQVLKLIGKLSGENNHLASMNWDQPKNIPGCLLFNLETFMWKGCKRIGEDEKEVAKYILRNTNRLKRATFTREIYEENNSQDMFENLEMVEELESVVRASKSCKLAFETSLWSLS

SEQ ID NO: 1762 - protein, 191 aa, Nicotiana tabacum
MASTLSTITLRSPSPSTASSTHASIPFPKKALEFPIRTPKLHHRRATFLRPLAAVEAPEKVVQLGDEISNLTLADAQKLVEYLQDKLGVTAASFAPAAVAAAPGAAAEAPAVVEEKTEFDVVIDEVPSNARIATIKAVRALTSLALKEAKELIEGLPKKFKEGVSKDEAEDAKKQLEEAGAKVSIANLNFW

SEQ ID NO: 1763 - protein, 499 aa, Sphingomonas sp.
MATQLKSGTNEYGIKSEYGHFIGGEWISSDSGKTIDLINPATGAVLTKIQAGNAKDIQRAVAAAKAAFPKWADSSAAERQEILIEVARRLKARHQHYATLETLNNGKPIRESMHFDMPQAIGQFELFAGAAYGLHGQTMDYPDAVGIVHREPLGVCAQIIPWNVPMLMMACKIAPALASGNTVVLKPAETVCLSVIEFFVEMADLLPPGVINVVTGYGADVGEALVTHEDVRKVAFTGSVGTARRIMQYASTNIIPQTLELGGKSAHIVCADADIDAAVESATMSTVLNKGEVCLAGSRLFLHESIQDEFLAKFKVALEGIRQGDPLDFATQLGAQASQMQMDKVISYLELATEEGANVLTGGSANDKLADGNFIRPTVFTNVNNSMRIAREEIFGPVTSVISWKDEDDMMKVANDTNYGLAGGIWTRDIARAHRMARKLETGTVWINRYYNLKANMPLGGYKQSGFGREFSHEVLNHYTQTKSVVVNLQEGRTGMFDQ

SEQ ID NO: 1764 - protein, 115 aa, Pyrus communis
MASSAVIKLALVVALCMAVSVAHAITCSQVSANLAPCINYVRSGGAVPPACCNGIKTINGLAKTTPDRQAACNCLKNLAGSVSGVNPGNAESLPGKCGVNVPYKISTSTNCATVK

SEQ ID NO: 1765 - protein, 409 aa, Arabidopsis thaliana
MSVLSKRWRSLWKMLPRLKFDDWMFPDNVNRCLLSHQASFLQSLHLVIDYDFVSHMHTGILMGIAFGRHIRELVLYVNGFQESFTFPLSLCNCESLETLTLGHNVLIDVPSPVFLKSLRTLHLDGVEYTDDESVVNLLSGCISLENLVVHRVIQADVTTFTIAVPSLKRLTLTTEFDDDEDSVYVINAPSLKYLKILGDKAYLIENSPELVEVSLTDRQVTVDGYPIASYVENLLRSLTSVKRMSLKISSYLEIKFPTGSIFYQLVSLELYTNKAEWWNLLVLMLDSSPKLQVLKLNGKLSGENNHLASMNWDQPKNIPGCLLFNLETFIWKGCKRIGEDEKEVAKYILRNTNRLKRATFTREIYEENNSQDMFENLEMVEELESVVRASKSCKLVFESTLWSLSNYDV

SEQ ID NO: 1766 - protein, 402 aa, Phaseolus acutifolius
MDEALGSSCSLPPFLAKTYEMVDDLSTNSIVSWSVSSKSFIVWNPPEFARDLLPRFFKHNNFSSFIRQLNTYGFKKIDPEQWEFANDDFVRGQPHLMKNIHRRKPVHSHSLQNLQAQGPLGDSERQGFTDGIEKLKRDKERLLVELQKFQHEWQTYEIQIHCSNDRLEKLEQKQHKMVSSISHVLQKPVLAVNILPLTETMDRKRRLPRSGHYYDESSIEDAIETSQMLPRENAENTTVLTLNVERLDQLESSVAFWEAIAHDIGDNFAQIQSNMDFDESTSCADSPSISCAQLDVDVRPKSSGIDMNSEPTAAAVPDPLASKDQPAGITVAATGVNDVFWEQFLTEDPGASETQEVQSERKDCDGRKNEGKPNDHSKFWWNIRNANNLSEPMGHVGQAEKT

SEQ ID NO: 1767 - protein, 355 aa, Claviceps purpurea
MSRANPPNAGGSRKISFNVSEHYDIQDVVGEGAYGVVCSAVHKPSGQKVAIKKITPFDHSMFCLRTLREMKLLRYFNHENIISILDIQKPRGYDSFNEVYLIQELMETDMHRVIRTQDLSDDHCQYFIYQTLRALKAMHSANVLHRDLKPSNLLLNANCDLKVCDFGLARSAASQDDNSGFMTEYVATRWYRAPEIMLTFKEYTKAIDVWSVGCILAEMLSGKPLFPGKDYHHQLTLILDVLGTPTMEDYYGIKSRRAREYIRSLPFKKKVPPRVLFPKTSDLALDLLEKLLAFNPVKRITVEEALKHPYLEPYHDPDDEPTAPPIPEAFFDFDKHKDNLSKEQLKLLIYEEIMR

SEQ ID NO: 1768 - protein, 494 aa, Sorghum bicolor
MAAADVPRPSFIGGDWREPCLPVCQPSTEATIGDIPAGTAEDVEMPVARGRVSDGGALVACLWGRASQLSHTIAAKIKDRKSESLALLETLDSGKPLDEASADMDDVAACFEYYADLAEALDGKQRSPISLPMENFKSYVLKEPLGVVGLITPWNYPLLMATWKVAPALAAGCTAVLKPSELASVSCLELGAICMEIGLPPGVFNVITGLGLKLVLHYPHIPCGIRLLLLGSTETGKRIMTSAAQMVKPVSLELGGKSPLIVFDDIRDIDKAVEWTMFGILPNAGQVCSAASRLLLHEKMAKKFLDRLVHGAKNIKVSDPLEEGGRLGSVVSEGQYEKIKKFISTARSEGATILYGGARPQHLKRGFFLEPTIITDVSTSMQIWREEVFGPVICVKEFRRESEAVELANDTQYGLAGAVISSDQERCRAISKALQSAIDNCSQPCFVQAPWGGNKRMFGRELGEWGLDNYMTVKQVTKYCSDEPWGWYQPPSKL

SEQ ID NO: 1769 - protein, 1462 aa, Candida albicans SC5314
MSTVVNRRSSHQFDSPSNHLDHSSSMNVDKVVQSVTNATKRLSQISTNTNNSNKKRKTQNKIGPWKLGRTLGRGSTGRVRLAKNTTTGQLAAVKIVPKSNFKKLENPKYKRSKEDATRLPYGIEREIIIMKLISHPNIMGLYDVWENKNDLYLILEYIEGGELFDYLIKRGKLQEYEAINYFKQIINGINYLHQFNICHRDLKPENLLLDFNKNIKIADFGMAALEVKEKLLETSCGSPHYASPEIVAGKNYHGAPSDIWSCGIILFALLTGHLPFDDENIRKLLLKVQSGKFNMPPELSFEAKDLITKMLKVNPRERITIDAILTHPLLAKYPEPTVSYSSTTTLDINSINIKQIESVDKIDKEILKNLSVLFHNCDEKTIISRLLSPNRCPEKMFYYLLMKYRNEHLSNSNSFNSSNDVDSARSLPRSTSYVKTTVTDHATGEKHTTVKKIQQSSSIYSNRSLLKKSTSAKGNVLSNITNRPNTPKQFSASSSFNKKKALHSKTQIYASRSRNASSRSLKSNSSTGRNGNNASVTSVNKIPEITGATVLQPIPSMAMNRGDEQQNKTKKNLTGTFGNKSLLNFQLICEEVFENDKENSKPVSKTPVSQLPPPPPPPIETPTSRTNSVKRGKTWSLARRERELAEQVRQRNEARENKLKAEELARKELEQEKKRIAEEKKRLEQQERELDEKQKLQEKQKAALEKLQKHQSAHDFEGLFASNRRSVTDMAPSSGMSSLDPRAHMVSRANTIGSPNLSSSSVNIDENASKVLHKFGIDVAPSPKRFSRASKTSTSKNLSSFLAPTVSRNLSSQLKTSSSKNLAGYLHGTTDTNGSAIAAKKKDDSTNEALTIEEFNAKERTSMSPSISKASVNKRNSNQSSYYRSMFSDNGNDDNVTKVRTGESHLSVQEEEEMDMENAIDEDISLIPNPRFSRFSFGGLLGSNTVANEEGDWTIMNSTLNHSNTVVRGTHNKSSTMLGLGIKMRDTTTIKEDEEFEDEKPFISVPSSEDDEGNTHKNKRGGLRDSGNYDFDEEHSVASTANTEYSDVASQGQQMPGSHTIHQLETELSNFDLLSYRVADIGKVNKHKPSIVDSKETLLKNHSSDEATIEVKEDNNEHDFNDKIKQHYDDNGDSEEDDEDEDEEEEDDDDDDDARSSFEARPHSHNYSLAEITSESPVGGGYESPSIANDFKKSRHSTGIFSTTQFPRSPYVVNNNGDSNKDENSQQQTKHMLNDGHKGLITSPVQDTFGSKKPVESNSLFRRLSLNPNRAAPKAPAPPPPSAPISSAAKANISQPLSSPTKGHNRFSRISIGSKNMLQKEDKSTKSNWFKKFFHSLTTPSAKDQSGNSSSKVASKDIKIIDTSLTAAQLIRVIKYQLELKKIEGSISKVDIDEEFGLISGVIPSKFANGRKLKFKIEVIDLINSSSLHVIKMKGNDKGFQSLVNIVTFIIKKEEQDKISRR

SEQ ID NO: 1770 - protein, 105 aa, Citrus sinensis
GEGTATQDSNNSGANSNGTATNGGEEDLKSWDTDFVKVDQATLFDLILAANYLNIKGLLDLTCQTVADMIKGKTPEEIRKTFNIKKDFTPEEEEEVRRENQWAFE

SEQ ID NO: 1771 - protein, 191 aa, Suillus bovinus
MQTIKVVVVGDGAVGKTCLLISYTTNKFPSDYVPTVFDNYAVTVMIGEDPYTLGLFDTAGQEDYDRLRPLSYPQTDVFLVCFSVTSPPSFENVREKWIPEVHHHCPGVPCLIVGTQIDLRDDAQVIEKLSRQKQRPVPTEHGERLSRELGAVKYVECSALTQKGLKNVFDEAIVAALEPPVVKKTHKCVVV

SEQ ID NO: 1772 - protein, 302 aa, Gonyaulax polyedra
MEALDLDRIIVQLLEVRGCRPGKLVQLTEGEICALCIRSRDIFMDQPILLELECPLKVCGDVHGQYSDLLRLFECGGLPPEANYLFLGDYVDRGKQSLETICLLLAYKVKYPENFFLLRGNHECASINRIYGFYDECKRRYSIRLWKTFTDCFNCLPVSAVIDDKILCMHGGLSPELSNLEQIKRVVRPTDVPDTGLLCDLLWSDPEKEISGWGENDRGVSFTFGPDVVQRFLRQHGLDLVCRAHQVVEDGYEFFARRALVTIFSAPNYCGEFDNAGAIMTVDESFCCAFQILRPLTRMGVP

SEQ ID NO: 1773 - protein, 180 aa, Triticum aestivum
MAGVGRNMVAPLLVLNLIMYLIVIGFASWNLNHFINGLNNRPGVGGNGATFYFLVFAILAGVVGAASKLAGVHHVRTWHGDSLATSASSSLVAWAITALAFGLACKEIHIGGYRGWRLRVLEAFVIILVFTQLLYVLALHSGLFGNMLGNHAGGYGAEHGGYGAGDPHNKGMGTGGVARV

SEQ ID NO: 1774 - protein, 335 aa, Nicotiana tabacum
MVHEKQVIEEVSGWLTVFEDGSVDRTLTGPPEDKFMAEAVPPHDDFIDGVADKDVVADENSGSRLRIYLPERNDNSVNKLPVILHFHGGGFCISQADWFMYYTVYTRLARVANAIIVSVFLPLAPEHRLPAACDAGFAALLWLRELSRQQGHEPWLNNYADFNRVFLIGDASGGNIVHQVAVRAGEENLSPLRLAGAIPIHTGFVRSYRSKSELEQEQTPFLTLDMVDKFLGLALPVGSNKDHPITCPMGEAAPAVEELKLPPYLNCVAEKDLMKDTEMEFYEAMEKGEKDIELFINNGVGHSFYLNKTAVEIDPVTASETEKFLEAVAEFINKR

SEQ ID NO: 1775 - protein, 326 aa, Triticum aestivum
MASTTAVPEVALRSGDARPMPAIGMGTAKLPVVPETTVKAVLEAVVVGYRHFDTASMYATERPLGEALAEAVRRGLLASREEVFVTSKLWCTQCHPHLVLPSLRESLQNLQMEYVDLYLIHWPISLKPGPTVFPVKREDAVPFDFEGVWRAMEECHRLGLAKAIGVSNFTTSHLDKLLAAATVHPAVNQVELNPVWQQRKLRGYCAEKGIHVAAYSPLGGQNWNGDGNAVLDSEVLAEIAKARGKTVAQVALRWIYEQGVTPIVKSFSKERLKENLGIFDWGLTDDDLRKIGQIPQKKIVKAETVLFSAEGEFTSADLADMEIVED

SEQ ID NO: 1776 - protein, 126 aa, Zea mays
  misc_feature (112)..(112): Xaa can be any naturally occurring amino acid
YNHVLQVDYACTPEEVQQHFQACGTVNRVTILTDKFGQPKGFAYVEFLEQEGVQEALNLNESELHGRQIKVAPKRTNVPGMKQRPPRGYNPYHGYPYRSYGAPYFPPYGYGXAPRFRRPMRYRPYF

SEQ ID NO: 1777 - protein, 512 aa, Gloeobacter violaceus PCC 7421
MEVRPMVVAAPAASASESIFKPRYDNFIGGQWRAPLKGQYTDNITPVNGRVLCQVPRSTVEDIELALDAAHAARESWGALSAAERSNILLKIADRMEANLHKLAVAETWDNGKPIRETTGADVPLAVDHFRYFAGCIRAQEGSISEIDGNTIAYHFPEPLGVVGQIIPWNFPILMAAWKLAPALAAGNCVVLKPAGPTPASILVWLEVVGDLLPAGVLNVVIGPGPEVGKALAASKRVAKVAFTGETETGRQIMQYAAQNIVPVTLELGGKSPNLFFADVMNADDDFLDKAVEGFVMFAFNQGEVCTCPSRALVHESIYEKFIDRAVRRVASIKQGNPLDPETMLGAQVSQAQMEKIARYVELGKQEGAEVLIGGERNSEPGEGLAGGYYYKPTVMKGHNQMRIFQEEIFGPVLAVTTFKDAEEAVRIANDTPYGLGAGVWSRDINTAYRVGRGIQAGRVWVNCYHVYPAHAAFGGYKASGVGRETHKMMLSHYQQTKNLLVSYDTKPQGFF

SEQ ID NO: 1778 - protein, 181 aa, Raphanus sativus
MASSMLSSAAVVTSQLQATMVAPFTGLKSSAAFPVTRKTNTDITSIASNGGRVSCMKVWPPIGKKKFETLSYLPDLSDVELAKEVDYLLRNKWIPCVEFELEHGFVYREHGSTPGYYDGRYWTMWKLPLFGCTDSAQVLKEVQECKKEYPNALIRIIGFDNNRQVQCISFIAYKPPSFTDA

SEQ ID NO: 1779 - protein, 486 aa, Oceanobacillus iheyensis HTE831
MLKTDKQSYLNFINGRWKSSEGGETKEVLNPADKNDVVGVIQRSTIDDVNEAIASAKSAKESWRKLSGNERGNYLYKVANILESRLDDVAETLTREMGKTLPEAKGETARGVAILRYYAGEGLREVGDVIPSTDSSGIMYTTRTPLGVVGVITPWNFPVAIPIWKMAPALIYGNTVVIKPATEAAATAAKVMECFADAELPDGVVNMVTGSGSIVGNRIAEHPDVNGVTFTGSDQTGKHIGQTALARGAKYQLEMGGKNPVIVADDADLDLAVKATISGGLSSTGQKCTATSRVIVQRSVYDAFKEKLLTQIQALTVGNGLEDGNWMGPSVSESQLETVLHYIKKGKEEGATLLTGGHRLTDAEHKDGNFVEPTVFEDVTNDMTIAQEEIFGPVLALIKVETFEEAMKLANDTEYGLSAAVFTENIRKMLTFIDDIEVGLVRVNAETAGVELQAPFGGMKSSSSHSREQGKAAIEFFTSIKTVFIK

SEQ ID NO: 1780 - protein, 163 aa, Triticum aestivum
  misc_feature (95)..(119): Xaa can be any naturally occurring amino acid
VAPFQGLKSTAGLPVSRRSNGASLGSVSNGGRIRCMQVWPIEGIKKFETLSYLPPLSTEALLKQVDYLIRSKWVPCLEFSKVGFIFREHNASPVXXXXXXXXXXXXXXXXXXXXXXXXXEVEEVKKEYPDAYVRIIGFDNMRQVQCVSFIAFKPPGCEESGKA

SEQ ID NO: 1781 - protein, 361 aa, Ocimum basilicum
MGSATNTPQINSDEEENFLFAMQLASASVLPMVLKSAIELDLLELIKKSGAGAFVSPVDLAAQLPTTNPDAHVMLDRILRLLTSYAILECRLKTLPDGGVERLYGLAPVCKFLTKNEDGVSMAPLTLMNQDKVLMESWYHLSDAVVDGGIPFNKAYGMTAFEYHGTDPRFNKVFNQGMSNHSTITMKKILETYTGFDGLKTVVDVGGGTGATLNMIVSKYPSIKGINFDLPHVIEDAPSYPGVEHVGGDMFVSVPKGDAIFMKWICHDWSDEHCVKFLKNCYDALPQNGKVILAECVLPEAPDTGLATKNVVHIDVIMLAHNPGGKERTEKEFQGLAKAAGFKQFNKACCAYNTWIMELLK

SEQ ID NO: 1782 - protein, 361 aa, Ocimum basilicum
MSSTANNPQINSDEEENFLFAMQLASASVLPMVLKSAIELDLLELIKKAGAGAFVSPAELAAQLLTTNAEAHVMLDRILRLLTSYAILECRLKTLPDGGVQRLYGLAPVCKFLTKNEDGVSMAPLALMNQDKVLMESWYHLKDAVLDGGIPFNKAYGMTAFEYHGTDPRFNKVFNQGMSNHSTITMKKILETYTGFDGLKTVVDVGGGTGATLNMIISKYPSIKGINFDLPHVVEDAPSYPGVEHVGGDMFVSVPKGDAIFMKWICHDWSDAHCVKFLKKCYEALPENGKVILAECVLPEAPDTGLATKNVVHIDVIMLAHNPGGKERTEKEFQVLAKASGFKQFNKVCCAYNSWIMELLK

SEQ ID NO: 1783 - protein, 283 aa, Enterococcus faecalis V583
MTIQWFPGHMAKARREVSEKIKYVDIVFELVDARLPLSSRNPMMDQIVQQKPRLVLLNKGDLADNDQNKKWQHYFQKKGYQTLVINAQQNKGINKIVPAAKEALKEKLAREQAKGLKPRAIRAMCIGIPNVGKSTLMNRLVGKKIAQTGNKPGVTKGQQWLRSGSQLELLDTPGILWPKFEDEEIGKKLALTGAIKDQLLHLDDLAIYGLEFFARFYPQRLTERYGLTEEELFLPAPEQLMLISQKRGFRDDYNRASEMIILEIRSGKLGTYTLDRWEELGDE

SEQ ID NO: 1784 - protein, 402 aa, Bacillus anthracis str. Ames 0581
MHKVHQGKLETVSKVKVENAKDLSLAYSPGVAEPCKEIYDDKSKVYEYTMKGNMVAVVTDGTAVLGLGNIGPEASLPVMEGKAVLFKSFAGVDAFPIALNTNDVDKIVETVKLMEPTFGGVNLEDIAAPNCFIIEERLKKETNIPIFHDDQHGTAIVTVAGLVNALKLVGKKMSDIKVVANGAGAAGIAIIKLLYRYGVRDIIMCDRKGAIYEGRPTGMNPVKDEVAKYTNKNRIEGSLADVVQGADVFIGVSAEGALTEEMVRTMNDDAIIFAMANPVPEIMPELAKAAGAAVVGTGRSDFANQVNNVLAFPGIFRGALDVHATQINEEMKMAAVQAIAELVAEDELNADYIIPAPFDARVAPQVAAYVAKAAMETGVARRQVDPNEVAEKTKQLALIGKE

SEQ ID NO: 1785 - protein, 207 aa, Zea mays
  misc_feature (98)..(98): Xaa can be any naturally occurring amino acid
MTTGEGAEAAAVPRVVSILSALLQRVAERNDAAAAAPPPAAAAGPPVLSAFQGLTKPAISIGGYLERIFRFAGCSPSCYVVAYIYLDRFLRRRPPRVXVDSYSVHRLLITAVLAAVKFMDDICYNNAYFAKVGGISLVEMNYLEVDFLFGVGFDLNVAPETFGDYCAVLHSELLCAEAAPAPLRLQHCCLSEDDAGAGCSAQQQLAA

SEQ ID NO: 1786 - protein, 110 aa, Triticum aestivum
MDSQFGALERGGSRQRRSPVLARPNTTKRHIQQQRANAADKKVVMPNYFSIEAFFVLACLTVSLLILPLVLPPLPPPPSLLLFVPVCLLILLMVLAFMPTDMRSMATSYL

SEQ ID NO: 1787 - protein, 238 aa, Oryza sativa (indica cultivar-group)
ENTMNRQVTFFKRRNGLLKKAHEISVLCDADVALIVFSTKGKLYEFSSHSSMEGILERYQRYSFDERAVLEPNTEDQENWGDEYGILKSKLDALQKSQRQLLGEQLDTLTTKELQQLEHQLEYSLKHIRSKKNQLLFESISELQKKEKSLKNQNNVLQKLMETEKEKNNAIINTNREEQNGATPSTSSPTPVTAPDPIPTTNNSQSQPRGSGESEAQPSPAQAGNSKLPPWMLRTSHT

SEQ ID NO: 1788 - protein, 363 aa, Glycine max
  misc_feature (57)..(57): Xaa can be any naturally occurring amino acid
  misc_feature (60)..(60): Xaa can be any naturally occurring amino acid
  misc_feature (97)..(97): Xaa can be any naturally occurring amino acid
  misc_feature (112)..(112): Xaa can be any naturally occurring amino acid
  misc_feature (123)..(123): Xaa can be any naturally occurring amino acid
MGEIRDLNMIDNTACLSAMFLSTLIANLVYPDVLNAVIELNMFEIIAKATPAVSFIXISXNAPTLPPQHPDRPNRLLRLLRLLVSSSFLTTPPRTTXTLEPFKQFMDSHKFXVPFGTRGNLGXFTLFDSISPLLQVWPMNFLKEALVDADIDLFKKIHGVTMYQYMENDPKMNQIFNKSMANLCATEMSRILEIYTGFEGISTLVDVGGGNGQNLKMIISKYPLIKGINFDLPQVIENAPPLPGIEHVGGDMFARVPQGDAIILKAVCHNWSDEKCIEFLRNCHKALSPNGKVIVVEFILPEEPEPTEESQLVSTLDNLMFITVGGRERTQKQYETLCKLSGFSNFQVACRAFSSLGVMEFYK

SEQ ID NO: 1789 - protein, 458 aa, Arthrobacter oxydans
MSSKLATPLSIQGEVIYPDDSGFDAIANIWDGRHLQRPSLIARCLSAGDVAKSVRYACDNGLEISVRSGGHNPNGYATNDGGIVLDLRLMNSIHIDTAGSRARIGGGVISGDLVKEAAKFGLAAVTGMHPKVGFCGLALNGGVGFLTPKYGLASDNILGATLVTATGDVIYCSDDERPELFWAVRGAGPNFGVVTEVEVQLYELPRKMLAGFITWAPSVSELAGLLTSLLDALNEMADHIYPSVFVGVDENRAPSVTVCVGHLGGLDIAERDIARLRGLGRTVSDSIAVRSYDEVVALNAEVGSFEDGMSNLWIDREIAMPNARFAEAIAGNLDKFVSEPASGGSVKLEIEGMPFGNPKRTPARHRDAMGVLALAEWSGAAPGSEKYPELARELDAALLRAGVTTSGFGLLNNNSEVTAEMVAEVYKPEVYCRLAAVKREYDPENRFRHNYNIDPEGS

SEQ ID NO: 1790 - protein, 202 aa, Glycine max
MRYILGEHNILFLKSFAFTILFLSCIAIRLNLCLSSIPSSLKSIPLEGHLKFDQVSLSHAARDFGNRYQYNPMAVLQPESVSDIVATIRHIWLMGPGSHLTIAARGHGHSLQGQAQAHGGLVINMESLKVPEMQIHVDEGNKSPPYVDVSGGELWINILHETLRYGLAPRSWTDYLHLTVGGTLSNAGVSGQTFMHGAQISN

SEQ ID NO: 1791 - protein, 570 aa, Triticum aestivum
MAGGGVEDVYGEDRATEEQLITPWSFSVASGHQLLRDPRHNKGLAFSEAERDAHYLRGLLPPAIVSQEHQEKKIMHNLRSYTVPLHRYVAMMDLQERNERLFYKLLIDNVEELLPVVYTPVVGEACQKYGSIYRRPQGLYISLKDKGKVLEVLKNWPERSIQVIVVTDGERILGLGDLGCQGMGIPVGKLSLYTALGGVRPSACLPITIDVGTNNETLLNDEYYIGLRQRRATGEEYHELLQEFMNAVKQNYGEKVLVQFEDFANHNAFDLLAKYSKSHLVFNDDIQGTASVVLAGLLAALRMIGGGLVDQTYLFLGAGEAGTGIAELIALEMSKHTELPVDDCRKKIWLVDSKGLLVESRKESLQHFKKPFAHEHEELKTLLEAVQSIKPTVLIGTSGVGKTFTQEVIEAMASFNEKPVIFSLSNPTSHSECTAEEAYTWSKGTAVFASGSPFDPVEYEGKTFVPGQSNNAYVFPGFGLGVVISGAIRVHDDMLLAASEALAEEATQENFDKGLIFPPFTNIRKISASIAAKVAAKAYDLGLASRLPRPDDLVKYAESCMYTPLYRSYR

SEQ ID NO: 1792 - protein, 500 aa, Citrus sinensis
LLLIPLLLILKKLKAQNKQQLPPSPPKLPVIGNFHQLGELPHQSLWQLSKKYGPVMLLKLGRVPLVVISSAEAARDVLKVHDLDCCSRPPLIGSGKFTYNYSDIAFSPYSDYWRELRKISVLEVFSLRRVQSFGFIREEEVALLMNSISESSSSASPVDLSEKMFALTGSIVFRMAFGRRFRGSNFDNHSFQELVHAVESLLGGFAAAECFPYVGWIIDRLNGYHAKLERVFQELDTLFQQIIDDHLKPAETTKQEHVQQDIIDVMLKIERDQAESHESEAWLTKNHIKAVLLNIFLGGVDTSAITVIWAMAELCKNPRLMKKAQAEIRNHIGNKGRVTEADIDQLQYLKMVIKETLRLHPPAPLLIARDTLYRFKVNGYDIYPKTLIQVNAWAIGRDSKYWESPEEFIPERFIDKPVDVKGQDFEYLPFGSGRRICPGINLGLIMSELALANLLYCFDWKLPNGREEDCVNMNMEEATGVSLTLSKKTPLILVPVNYLQ

SEQ ID NO: 1793 - protein, 371 aa, Candida albicans SC5314
MLIKSNYNCINIKRFLLNQTRVSVTASNSFSFYFYFKPYKFNCYKSYSTMSTTTPTIKLNSGYEMPIVGFGCWKVTNATAADQIYNAIKTGYRLFDGAEDYGNEKEVGEGINRAIKDGLVKREELFIVSKLWNNYHSPENVEKALNKTLTDLNLEYLDLFLIHFPIAFKFVPLEEKYPPGFYCGDGDKFHYENVPLLDTWKALEKLVNLGKIKSIGISNFNGGLIYDLIRGATIKPAVLQIEHHPYLQQPRLIEFVQNQGIAITAYSSFGPQSFLELQSKRALDTPTLFEHETIKSIADKHGKSPAQVLLRWATQRNIAVIPKSNNPDRLAQNLAVVDFDLTEEDLQAISKLDIGLRFNDPWDWDKIPIFV

SEQ ID NO: 1794 - protein, 488 aa, Listeria monocytogenes str. 4b H7858
MADVRKLKNYIDGEWVESKTDKYEDVINPATGEVLCQVPISTRAELDQAAVIAEQAFEKWSQVAVPRRARVLFSFQQLLIQHKEELARLITLENGKNLSEARGEVQRGIENVEFAAGSPTLMMGDSLASIATDVEAANYRYPVGVVGGIAPFNFPMMVPCWMFPMAIALGNSFILKPSERTPLLMEKLVELFSEAGLPKGVFNVVYGAHDVVNGILENEIIKAVSFVGSKPVGEYVYKTGSANLKRVQALTGAKNHTIVLNDADLEDTVTNVISAAFGSAGERCMACAVVTVEEGIADEFLAALRTAAQNVKIGNGLDDGVFLGPVIREENQKRTIAYIEKGLEEGAKLTVDGRETGLSEGHFVGPTILEDVTTDMTIWKDEIFAPVLSVIRVKNLQEAVRVANQSEFANGACIFTNNAKAIRYFREKIDAGMLGVNLGVPAPMAFFPFSGWKSSFYGTLHANGKDSVDFYTHKKVVTARYSLKGYEE

SEQ ID NO: 1795 - protein, 483 aa, Caulobacter crescentus CB15
MQVRNDSGDSKANLDAVIVWFRKDLRIADNPALRHAAQSGRPVIPLYILDETPGIRPMGGASLWWLDKSLKSLAASLETLGTKLVLRKGVAAEVLDQLIAQSGARSVVWNRLYDKPSTDRDAAIKAALRDRGVDCQSFNAGLLNEPWTVKNGSDQPYKVFTPYWRAAREHLTDVAVTAAPGHLVAPARFPASESLASWNLHPTKPDWSKGFDLWTPGEAGAHARLDAFLKGPIKGYGDQRDIPGVEATSKLSPHLHFGEIGPRQVWLATRSAADQGDIPLAEADKFLSEIGWREFNHSILYNWPHMPSANFKPEFDGFPWVKDEGALEAWKRGQTGYPIVDAGMRELWTTGFMHNRVRMIVASFLIKHLMIDWREGEAWFWDTLLDADLANNVGNWQWTAGSGADAAPYFRIFNPIAQGEKFDPKGDYVRRWVPELRNVSDDVIHKPWTKPLHLPAGAKRLYSRPIVDHAMARARALEAYHGL

SEQ ID NO: 1796 - protein, 474 aa, Ustilago maydis 521
MLSLTVPRLALRAAAPSRQFAAAAGVGAVRFASTKSLKDAVAEIIPAKQEQLKKLKAEHGESKLGEIQLQHLLGGMRGLKVMLWEGSVLDSETGITFHGKSIPDSQKVLPTAADLGLNGNEILPESMLWLLLTGNVPSKDEVKGLSAELAAKGALPAHVEKIIDSFPKTLHPMTQFAAAVAALNHDSKFAAAYAKGIKKTEYWAPVLEDSIDLIAKLPAVAARIYYNVFGRGDGKQAIDSNLDLIGNYSNMIGYGDNQGMTDYLRLYIAIHGDHEGGNVSAHTAHLVGSALSDPYLSYSAALLGLAGPLHGLANQEVLGWALSMQEAVGENASEEQIKEYLWSTLKSGRVVPGYGHAVLRQPDPRFTALSKFCDTRPELRDSSIVKLVQKVSQVAPGVLKEHGKTKNPFPNVDAASGCVLYQYGLTEFTYYTVIFGISRAIGALPQLVADRYLGMPIERPKSMSMDSLEAFLKK

SEQ ID NO: 1797 - protein, 298 aa, Candida albicans SC5314
MPMQKEFRTSAYHSRFQTPFRRRQEGKTDYYQRKRLVTQHKAKYNSPKYRLVVRFTNKDIIAQIVSAHITGDVVFTAAYAHELPRYGIKYGLTNWSAAYAVGLLVARRALQKLGLDETYTGVEEVEGEFELTEAVEDGPRPFKVFLDIGLQRTTTGARVFGVLKGASDGGLYVPHSPNRFPGWDIEAEELDAELLRKYIFGGHVAEYMEELLDDDEEKYKSIFKNYIEEEIESEDVEEIYANAHEAIRADPSFKPTEKKFTKEQYKAESKKYRQQKLTRAERQAKVAKKIAEFKAQQE

SEQ ID NO: 1798 - protein, 1230 aa, Cryptococcus neoformans var. neoformans
MSSFTPAFRLHHTHSSSVSPTASNDVAPSSPTPNQPHQLAARSPLYANSPNCASKITKGSSLSSSTAHHGLKYVRPSTSPLLRSPKGESFSAYLGNWGSQELITFLNIHKCGQYLAIFQKNDINGKILLDLDMTALKSMGIGKISERVRLIGGIKDLRRCVADESIRAPFTQRSYPSERTLLPSLPSHSNVLLDKWDCSSSASRLGKRQITLRPPPLDLQGHMPPRLLSHASLGIATIDTHDIHTTNSKIEVYIQQNPPGQPQSMPTKRSDSLTLCAAPSRNVGRRSPSSRHFEGCKSQTDGLTTLNLTLDRQVPSSTMNNVTLREDCHLQREERLPLSHQVPHSRNAFASPHKTSLSGRCPLARGDTTSHQPSGPAIAEQDSPVNYRISNTVTNTKEISQGDLKQPFVMKSLESQSHLLAGVSDMSHDPVTDGFKPKGKASVPLTVMSSSDISAVNANPAALSLADLRRQLVKFINTEDDTIRTVNVMHVTSGVEILERALKKFGKFGTGIHGSPDVYGDEDGDGTLEIGGWEVYTESTPDESSKPLSEFNLLKTCTFHREGTAIQDKGLFLRKKQRMQKRKNIQDFFGETPPPSMSPTSPTLITGPHLSLVQGKSQPTSGSAFSSSSRLSTLTHKGRNRASMISVMSGLGVPIINTLPSPQGNGLRLTGSVHSHEKKSMYNFFGHRPPSELISNHLTDYFPSAKKSDVEKARHSLLRLSGGTVAYKKSGIYEGDSTPDHWSKPGDNQPPSLPPFEPSQDTLSDSLQAFASSTPVHLSRPKHTVALRRRRDSDSSSRSHTSMLMQTRRNRDHSDTTSLLTVDEITAEVENRRVSTIQRGDYIEETEDSSSIEGDTLPQDDESKGVLRAICSDSNKLVDSGKSYQGDSDIDQQHELEDEEEDKLDDDEEEEEEEEEEDNEQGKAFTSTGSKRIIKWIKGALIGAGSFGSVYLGMDAQSGLLMAVKQVELSAGSAKNEDRKRSMLSALEREIELLKELQHENIVQYLDSSVDANHLNIFLEYVPGGSVAALLNNYGAFEEALVRNFVRQILTGLNYLHMRGIVHRDIKGANILVDNKGGIKISDFGISKKVENSLITGLRTNRPSLQGSVFWMAPEVVKQTSYSPKADIWSVGCLVVEMLTGTHPWADLTQMQAIFRIGSLARPAPPSDISVQADEFLRKTFEIEHAKRPTAAQLLKHPFIGSPRVRTAASNFINGAIASETMEVQVVEES

SEQ ID NO: 1799 - protein, 491 aa, Nicotiana tabacum
MVLSKTSSESDVSVHSTFASRYVRTSLPRFEMAENSIPKEAAFQIINDELMLDGNPRLNLASFVTTWMEPECDKLMMDSINKNYVDMDEYPVTTELQNRCVNMIARLFNAPLEEKETAVGVGTVGSSEAIMLAGLAFKRNWQNKRKAEGKPYNKPNIVTGANVQVCWEKFANYFEVELKEVKLREGYYVMDPVQAVEMVDENTICVAAILGSTLNGEFEDVKLLNDLLIEKNKQTGWNTPIHVDAASGGFIAPFLYPELEWDFRLPLVKSINVSGHKYGLVYAGIGWVIWRTKQDLPEELIFHINYLGADQPTFTLNFSKGSSQVIAQYYQLIRLGYEGYRNVMENCRENAIVLREGLEKTGRFNIVSKDEGVPLVAFSLKDNSRHNEFEVSETLRRFGWIVPAYTMPADAQHVTVLRVVIREDFSRTLAERLVLDIVKVLHELDTLPARLSAKLEEVKLVKNGKKFELEVQREVTNYWKKFVLARKAPVC

SEQ ID NO: 1800 - protein, 212 aa, Wolbachia pipientis
ASCSSAITFIDGDEGVLKYRGHSIADLAENNNFTTVIYLLLYGELPNLEQHKKFLLKIGELSELPEQVVNVVKAFPKTAHPMSILIACFAGLSALYHERHGNNVNSEDLDFGISAIAQVPAIIAMIYRYINNQEFTNANNGLSYSENFLRMMFGDTFDNDKSALFAKALDKIFTLHADHEQNASTAAVRLVGSAGSSLFTSLSAGVATLWGP

SEQ ID NO: 1801 - protein, 198 aa, Triticum aestivum
  misc_feature (96)..(97): Xaa can be any naturally occurring amino acid
  misc_feature (99)..(99): Xaa can be any naturally occurring amino acid
  misc_feature (124)..(124): Xaa can be any naturally occurring amino acid
  misc_feature (127)..(127): Xaa can be any naturally occurring amino acid
  misc_feature (134)..(134): Xaa can be any naturally occurring amino acid
  misc_feature (141)..(141): Xaa can be any naturally occurring amino acid
  misc_feature (153)..(153): Xaa can be any naturally occurring amino acid
  misc_feature (160)..(160): Xaa can be any naturally occurring amino acid
  misc_feature (165)..(165): Xaa can be any naturally occurring amino acid
MAPTVMASSATSVAPFQGLKSTAGLPVSRRSNGASLGSVSNGGRIRCMQVWPIEGIKKFETLSYLPPLSTEALLKQVDYLIRSKWVPCPSSSAKGXXCXSFFVERPTAIAPGVTLRWAPGIGSXCWXKLPLCVXVAPDGHXQVINEVEGARRXPDAYVRXIGFDXMRQVQCGDVHRLKPPGCEESGKAYNGSLTTRHI

SEQ ID NO: 1802 - protein, 427 aa, Vibrio parahaemolyticus RIMD 2210633
MVMTLTLMHRMSALQITEINIMSVTADQVHGVVQALTQSSDTLFLLLGAIMVFLMHAGFAFLEVGTVRQKNQVNALVKIIADFGISAIAYFFIGYWVAYGGTFFSDAQTLSQDNGYELVKFFFLLTFAAAIPAIVSGGIAERARFYPILIATFFTVGVVYPLFEGMIWNGNFGVQAWFESTFGYGFHDFAGSVVVHGVGGWIALVAVTFLGMRRGRIRAGKHTNFAPSNIPFLALGAWILCVGWFGFNVMSAQTLSGISGLVAMNSLMAMVGGIVASLLAGKNDPGFIHNGPLAGLVAVCAGSDLMHPLGALVTGAVAGVLFVYLFTYLQNRTKIDDVLGVWPLHGVCGAWGGIAAGVFGQSGFGGMGGVSFAVQVLGTFFGISIAVLGALVVYGAINALTGLRLSEEDEFNGADLAIHKISSTNED

SEQ ID NO: 1803 - protein, 160 aa, Zea mays
MSDSEEHHFESKADAGASKTYPQQAGTVRKNGFIVIKNRPCKVVEVSTSKTGKHGHAKCHFVAIDIFNGKKLEDIVPSSHNCDIPHVNRTEYQLIDISEDGFVSLLTSDGNTKDDLRLPTDETLVAQIKEGFESGKDLVVTVQSAMGEEQICALKDVGPK

SEQ ID NO: 1804 - protein, 190 aa, Triticum aestivum
  misc_feature (90)..(90): Xaa can be any naturally occurring amino acid
  misc_feature (106)..(106): Xaa can be any naturally occurring amino acid
  misc_feature (125)..(125): Xaa can be any naturally occurring amino acid
  misc_feature (139)..(139): Xaa can be any naturally occurring amino acid
  misc_feature (151)..(151): Xaa can be any naturally occurring amino acid
  misc_feature (156)..(156): Xaa can be any naturally occurring amino acid
  misc_feature (160)..(160): Xaa can be any naturally occurring amino acid
  misc_feature (163)..(163): Xaa can be any naturally occurring amino acid
  misc_feature (169)..(169): Xaa can be any naturally occurring amino acid
  misc_feature (174)..(174): Xaa can be any naturally occurring amino acid
MAPTVMASSATSVAPFQGLKSTAGLPVSRRSNGASLGSVSNGGRIRCMQVWPIEGIKKFETLSYLPPLSTEALLKQVDYLIRSKWVPCLXFNKVGFIFREHNASPXGTMMAGTGQCGNCLSSVQXRHTMINKVEEVKKXYPDPMSAIIGFXKMRKXKWVXFNXLKPPGXKDPGXAKKSPKGNKGIDFLNN

SEQ ID NO: 1805 - protein, 163 aa, Triticum aestivum
  misc_feature (77)..(77): Xaa can be any naturally occurring amino acid
  misc_feature (87)..(87): Xaa can be any naturally occurring amino acid
  misc_feature (94)..(94): Xaa can be any naturally occurring amino acid
  misc_feature (103)..(103): Xaa can be any naturally occurring amino acid
  misc_feature (112)..(112): Xaa can be any naturally occurring amino acid
  misc_feature (118)..(118): Xaa can be any naturally occurring amino acid
  misc_feature (120)..(121): Xaa can be any naturally occurring amino acid
  misc_feature (125)..(125): Xaa can be any naturally occurring amino acid
MAPTVMASSATSVAPFQGLKSTAGLPVSRRSNGASLGSVSNGGRIRCMQVWPIEGIKKFETLSYLPPLKHGGLLKAXSDYLIRSKWXVPCLQFXSKVGSSSRXAQRIPLGYXDGRYWXMXXLPSXGCTDPTSDRGGSQRRYTFRITVIASCSIALTTGASPEG

SEQ ID NO: 1806 - protein, 461 aa, Burkholderia fungorum LB400
MTFLKSPPPTPEDVADEYAATISGSSLPKYRIPEASSDRRAVFDLVRDELFMDGNSRQNVATFCTTYADDEVRHLMDLSIDKNMIDKDEYPQTAEIEMRCVHMLADLWHASKAWKTTGCSTTGSSEACMLGGLALKWQWKKRREAQGKPTDKPNFVCGPVQVCWAKFARYFDVEMRQVPLRGEATGLTPEDLAEYCDENTIGVVATLGITFTCVYEPVKALAGALDALQANVGLDIPIHVDAASGGFVAPFIQPDLEWDFSVPRVKSINASGHKYGLAPLGVGWVVWRSTQDLPDELIFRVDYLGGDMPTFALNFSRPAGQIIAQYYMLLRLGREGYRRIQQECADTAQALADGLAKIDQLEMIYDGRGALPAVCYKLKHPETAGFTLFDLSDQVRMRGWQIASYELPAGREDTIVQRVLIRRGVTRDMAAMLLEDIRHAIGHLTKNPVLHSSAGPTFHHN

SEQ ID NO: 1807 - protein, 316 aa, Shigella flexneri 2a str. 301
MNELDGIKQFTTVVADSCDIESIRHYHPQDATANPSLLLKAAGLSQYEHLIDDAIAWGKKNGKTQEQQVVAACDKLAVNFGAEILKIVPGCVSTEVDARLSFDKEKSIEKARHLVDLYQQQGVEKSRILIKLASTWEGIRAAEELEKEGINCNLTLLFSFTQARACAEAGVFLISPFVGRIYDWYQARKPMDPYVVEEDPGVKSVRNIYDYYKQHHYETIVMGASFRRTEQILALTGCDRLTIAPNLLKELQEKVSPVVRKLIPPSQTFPRPAPMSEAEFRWEHNQDAMAVEKLSEGIRLFAVDQRKLEDLLAAKL

SEQ ID NO: 1808 - protein, 153 aa, Chorispora bungeana
MNSVSAFSEMFGSDYEPQGGDYCPTLATSCPKEPAGRKKFRETRHPIYRGVRQRNSGKWVSEVREPNKKTRIWLGTFRTAEMAARAHDVAALALRGRSACLNFADSAWRLRIPESTCAKDIQKAAAEAALAFQDETCDTTTTNHGLDMEGRCG

SEQ ID NO: 1809 - protein, 153 aa, Chorispora bungeana
MTSVSTFSEMLGSEYESPTLSGEYCPALAASCPKKPAGRKKFRETRHPIYRGIRLRNSSKWVCEVREPNKKSRIWLGTFLTAEIAARAHDVAAIALRGKSACLNFADSAWRLRIPETTCPKDIQKAAAEAAVAFQAEINDTTTDHGLDRGDVG

SEQ ID NO: 1810 - protein, 154 aa, Chorispora bungeana
MTSFSAFSEMLGSEYESPTLSGEYCPALAASCPKKPAGRKKFRETRHPIYRGVRLRNSGKWVCEVRGPNKKSRIWLGTFLTAEIAARAHDVAAIALRGKSACLNFADSAWRLRIPETTCPKDIQKAAAEAAVAFQAEINDTTTDHGLDMERRWW

SEQ ID NO: 1811 - protein, 231 aa, Burkholderia pseudomallei
GPVASRLGLSGVPVAAETIALHTLFELMRVTGARVHVARLSSAAGVALVRAAKAEGLPVTCDVGANHLHLIDVDIGYFDAQFRLDPPLRAERDREAIRAALADGTIDAICSDHTPVDDDEKLLPFAEATPGATGLELLLSLTVKWAREAGVPLARALAAITSAPADVLKLPAGRIGEGAPADLCVFDPNAHWRVEPRALKSQGHNTPFLGYELPARVCATLVAGQVAFERR

SEQ ID NO: 1812 - protein, 274 aa, Mycoplasma penetrans HF-2
MENEKKINWFIGHMKRTVDILESKKKNIDFVIEVVDARLPYGSSNLELLSVFENKPIIKIALKSDLVKKDHYQNGFFYASIKNPADRKKIINYIDSCLKEKKDRLIKKGLRNPTFIGIVVGLPNIGKSSLINYLSNKKSLNVENRPGVTRKTENIKISDSLFLIDTPGVFLKNVTDYQMGLSLALINCVKREVVDKKDLVLFLISKFIENNNLNSFNETLNTNINSNNPSEVLSELLKVLKIDEDNNQKISVFYDFVFKKTIDNPKISLFLEKI

SEQ ID NO: 1813 - protein, 457 aa, Staphylococcus aureus subsp. aureus MW2
MAIAVLLNRMFRMEHNPLFEYIYQQKEDIDACYFIIPEEDMSSASDLKAQFYRGTLQRFYQSLHAEKLTPYVMSYDDIISFCKENNISEVVTAGDIMSYHLEEYDILHQRSLFNEARIAVTLIRGNHYFKASKTMNQQGEPYKVFTSFYKKWRPYLRHRDVYHYDLKSFEDFVIASPDDLVFDDIAFGSSQIIEQNKWQHFLDQDIQNYESGRDYLPEVLTSQLSVALAYGLLDIIEIFNDLLARYDEDEANYEAFIRELIFREFYYVLMTQYPETSYQAFKPKYRQIKWSQNEADFNAWCEGQTGFPIIDAAIMELTQTGFMHNRMRMVVSQFLTKDLFIDWTWGEKFFRKHLIDYDAASNIHGWQWSASTGTDAVPYFRMFNPIRQSERFDAKALYIKTYLPIFNQIDAKYLHDTQRNESNLFEQGIELGSHYPRQIVDHQEKRTQVLATFKALD

SEQ ID NO: 1814 - protein, 335 aa, Shewanella oneidensis MR-1
MSKRTITVIPGDGIGPSIIDSALKILDKAGCDFEYEFADAGLAALEKQGELLPQRTLELIEKNRITLKGPLTTPVGEGFTSINVTLRKKFGLYANVRPVLSFKGTQARYENIDIITVRENTEGMYSGHGQKVSEDGSTAEATSIVTRQGAEQIATFAYELARKESRKKVTIVHKANIMKSTSGLFLKVAREVSLRYPDIKTEEMIVDATCMKLVMNPENFDVIVTTNLFGDILSDLCAGLVGGLGMAPGANIGRDAAIFEAVHGSAPDIAGKNLANPTSVILASIQMLEYLGMADKAAPIRKAVSAVIEEGDRTTRDLGGTHGTTDFTQAVLDRL

SEQ ID NO: 1815 - protein, 176 aa, Chorispora bungeana
KKFRETRHPIYRGVRQRNSGKWVCELREPNKKTRIWLGTFQTAEMAARAHDVAAIALRGRSACLNFADSAWRLRIPESTCAKEIQKAAAGAALNFQDEMCHMTTDAHGLDMEETLVEAIYTPEQSQDAFYMDEEAMLGMSSLLDNMAEGMLLPSPSVQWNYNFDVEGDDDMSLWSY

SEQ ID NO: 1816 - protein, 143 aa, Glycine max
MAMAFKMATTGMWVTDECKNSFMEMKWKKVHRYIVFKIDEKSRLVTVDKVGGPGESYGDLAASLPDDDCRYAVFDFDFVTVDNCRKSKIFFIAWSPTASRIRAKMLYATSKDGLRRALDGISYEVQATDPAEMGFDVIQDRAK

SEQ ID NO: 1817 - protein, 497 aa, Vibrio vulnificus CMCP6
MAQHASSVIVCNGYKDREYIRLALIGEKLGHKVFIVLEKMSELDLVLREAKSLGVTPRLGIRIRLASQGAGKWQASGGEKSKFGLSASQVLNVISRLKKENQLDTLQLVHFHLGSQMANIRDVRNGVNESARFYCELRTLGANITYFDVGGGLAIDYDGTRSQSSNSMNYGLVEYARNIVNTVGDVCKDYKQPMPVIISESGRSLTAHHAVLISNVIGTETYKPETVTEPEEDFPLLLNNMWRSWLNLHNGTDARALIEIYNDTQSDLAEVHSQFATGVLTLEHRAWAEQTSLRIYYELNRLMSTKNRFHRPILDELSERLADKFFVNFSLFQSLPDSWGIDQVFPVLPLSGLQNAADRRAVMLDITCDSDGAIDAYVDGQGIESTLPVPAWNEDEPYLMGFFLVGAYQEILGDMHNLFGDTHSVVVNVGDQGEINIDFINEGDTVEDMMRYVHIDVDQIRKNYHSLVSQRVDQEEQQQILAELEQGLSGYTYLEDF

SEQ ID NO: 1818 - protein, 347 aa, Streptococcus agalactiae 2603V/R
MFVKKGLFVFLLLCILSMWLMIFGVAFYYFGSLHQSLTSRIIYQFVLTVLLTTTAWFMGAYFLAFEGHFKTVFQFQEADGKQIVNCLFQLCFALYAVVMLIGSIIDRVQTKRLLLAVVSWLFLVYTPLAYLIWNSEGVFAKMGVLDFSGGMIVHLSAGLSSYILAHVIGKSEHQHNKVKNDSLFLGMILITFGWFGFNMGPVGEWNSQAIMILLNTIFAIIGGGLAWTLAAKWNGEEEKTGSLLNGIIVGLVTSTAGVGYLLTWQLLAVTFFASLFTYFVTDYVAKAFAIDDVVSSFGMNGIGGLLGSLGVGLFKLSHMPVQLLALATTILLSIIMTYIISKAIFRK

SEQ ID NO: 1819 - protein, 175 aa, Chorispora bungeana
KKFRETRHPIYRGVRLRNSGKWVCEVREPNKKSRIWLGTFLTAEIAARAHDVAAIALRGKSACLNFADSAWRLRIPETTCPKDIQKAAAEAAVAFQAEINDTTKGHGLDVEETIVEAIFTEENSDGSYMDEEESMFGVPTLLASMAEGVLLPPPSVQFEYNYDFDGDTDVSLWSY

SEQ ID NO: 1820 - protein, 286 aa, Thermotoga maritima MSB8
MQVPKVTLNNGVEMPILGYGVFQIPPEKTEECVYEAIKVGYRLIDTAASYMNEEGVGRAIKRAIDEGIVRREELFVTTKLWVSDVGYESTKKAFEKSLKKLQLEYIDLYLIHQPFGDVHCAWKAMEEMYKDGLVRAIGVSNFYPDRLMDLMVHHEIVPAVNQIEIHPFYQRQEEIEFMRNYNIQPEAWGPFAEGRKNIFQNGVLRSIAEKYGKTVAQVILRWLTQKGIVAIPKTVRRERMKENISIFDFELTQEDMEKIATLDEGQSAFFSHRDPEVVKWICSLKR

SEQ ID NO: 1821 - protein, 314 aa, Aspergillus flavus
METPFAAPWRQFVEDLGQTPCLEGKDLNSVLAGWGQLAGTLATRYGFPPPDESVTTEDVQLDGLWLRCYTPPNATGQEPVGLYFHGGGWVMGGVKEEDGFCRVISRQCQMRLVSVEYRKAPETRYPGALNDGVSAALWALSRYENQPLVLMGTSAGGNLAFGTALRLIDQDMADKVSGVVALAPITVHPDAVPDHLKEQYTAYEENAELTVNSRAAMQVFFDCYKAPVDDVYTSCILHPKLHALPKVYIAELGLDTLRDDARLMKGALDTAKVPVMYDAYPGYPHCSFMFPFKSLGEHQKAFLEGVAKAVRWMS

SEQ ID NO: 1822 - protein, 152 aa, Picea glauca
MAMDPSLITVQHLLGVPDDLEKLLNAPTHSYMRDTKAMASTPVDVKEYPNSYVFIIDMPGLKSNDIKVQVEDENVLNISGERKRNEKDEEGEVKYIRMERRVGKFMRKFTLPADCNLEAISAACQDGVLTVTVPKLPPPEPKKPKTIEVKIG

SEQ ID NO: 1823 - protein, 414 aa, Thermoplasma acidophilum
MCMDRAICGNFYYGGKFDYLEVIVSDGKIAGIKKDAGNVPKTNYDGAILPAATDIHVHFRTPGETEKEDFGSGSLSAIYGGTTYVMDMPNNRFPITDYNAFGDKLGSIDSTSFADFSLYSMETGKNAMLLDRRSIGLKVYLGGSTNSTGTEVIEEGDIRKINEMNYPVVFHGESERCLKTHQMEEKNLRDHNLARPIDCEIEAAKYVSGLDIKTKIMAHVSSPDVTGNFLREVTPHHLLLNDEMPLGSFGKVNPPLRDSRTQKRLLDDYISGKFDILSSDHAPHTEDDKREFEFAKSGIIGVETRVPLFLALAQKKIVPLDVLYRTAIENPPSIFGIKKGKIEIGYDADFMVIDFTSMKRINDNRLHSKFPVSPFNGMDAIFPSHVIMRGNVVIDRYEDISDPMGVFIPKPQKE

SEQ ID NO: 1824 - protein, 174 aa, Triticum aestivum
  misc_feature (29)..(29): Xaa can be any naturally occurring amino acid
MAPAVMASSATTVAPFQGLKSTAGLPVSXRSSASLGSVSNGGRIRCMQVWPIEGIKKFETLSYLPPLSTEALLKQVDYLIRSKWVPCLEFSKVGFVFREHNSSPGYYDGRYWTMWKLPMFGCTDATQVLNEVEEVKKEYPDAYVRVIGFDNLRQVQCVSFIAFRPPGCEESGKA

SEQ ID NO: 1825 - protein, 386 aa, Aspergillus flavus
MTGLDMETIFAKIKEEYARTDDVGKRKIQGHIRELQVGFYSDWDVVMRLSSGPLQVALAKVGIDLGIFRSLKESDTPITLAEFVKKTGASPRLLGRILRTQAAFGLIKETGPQEYTSSAFTDVFANPAAAGAVVQLFDISGPCTQILPDFLAERHYQDITSNKDCVFQKAFDSELTMFEWMPQHPKHMESLGHLMALERPVSWVDHFPVLEELGDFPAPDKVLMVDIGGGFGQQSKALRAKFPNLPGRVIVQDIPQTLTNAQPAAGVEFMEHNFFEPQPIRNAKFYYLRHVFHDWPDEQCVLILKQIIPAMGPESQILIDEMVIPSTGVPWQAAFTDLLMMNSLGGVERTRAEWDDLMEQAGLQIIQSKVYDSKEQAILVAVPKRT

SEQ ID NO: 1826 - protein, 147 aa, Zea mays
MDASAATARRKRKRPDADNTGDATAAAAAAPAAVDEASDAEVEEFYAILRRIRDASRRLCGAGARPAPRAPAWRPSFSWEDFATPAPGAPAPETPTPGAAQEPAQPRPDEPVAVVRATAPSPRAGLDLNAEPEPEAPATPRSARVQA

SEQ ID NO: 1827 - protein, 116 aa, Neurospora crassa
MTDAPASAPVVKKNTAAESKGKKADGKPRFEVKKWNAVALWAWDIVVDNCAICRNHIMDLCIECQANQSSATSEECTVAWGICNHAFHFHCISRWLKARQVCPLDNRDWEFQKYGR

SEQ ID NO: 1828 - protein, 318 aa, Zea mays
  misc_feature (20)..(20): Xaa can be any naturally occurring amino acid
  misc_feature (126)..(126): Xaa can be any naturally occurring amino acid
  misc_feature (198)..(198): Xaa can be any naturally occurring amino acid
  misc_feature (289)..(289): Xaa can be any naturally occurring amino acid
  misc_feature (312)..(312): Xaa can be any naturally occurring amino acid
MSTTKVKRRVGKYELGRTRXTGEAVAIKILDKEKVLKHKMVEQIKREISTMKLIKHPNVVRIYEVMGSKTKIYIVLEFATGGELFDTIVNHGRMREDEARRYFQQLINAVDYCHSRGVYHRDLKPXNLLLDSYGNLKVSDFGLSALSQQIKDDGLLHTTCGTPNYVAPEVLEDQGYDGAMADLWSCGVILFVLLAGYXNAEFTFPPWTSFPAKRLLTRILDPNPMTRITIPEILEDEWFKKGYKRPEFDEQYDTTLDDVDAVFNDSEEHHVTEKKEEEPVALNAFELIXSMSAGLNLGNLFDSEQEFKRETXFTSKVP

SEQ ID NO: 1829 - protein, 430 aa, Streptococcus agalactiae NEM316
MYIIKNGLIIDPQSGFNQVSDMLIDQGKIKQISKEIDIKGIPIIDASNKIVAPGLVDIHVHFREPGQTHKENIHTGALSAAVGGFTTVLMMANTNPTISSPEIVKQVKESAAKEAIKIETVATITKSLNGKDLVNFEELLEAGVAGFSDDGIPLTDTKVLQEAMNLARKHDVVLSLHEEDPSLNGVLGINEHIAQKIYHVCGASGLAEYSMIARDAMIAYQTQAKVHIQHLSSSESVEVVDFAQKLGANLTAEVTPQHFSKTENLLLTKGANAKLNPPLRLEKDRQALIDGLKSGVISIIASDHAPHHIMEKAADNISQAPSGMTGLETSLALGITYLVSTKELSMIDFLAKMTCNPAQLYGFDAGYLREGGPADIVIFDQAEERIIKAEFASKSSNSPFIGDKLKGVIHYTICNGEIVYQKDSHAATLV

SEQ ID NO: 1830 - protein, 281 aa, Lactococcus lactis subsp. lactis Il1403
MQRKLTLNDGNVIPQFGLGLYQLPEGTETQNIVKTALELGYRHLDTSHAYQNETSVGQAIQDSEISNSEIWITSKLWPSDYEQAPEAIERMLKRLKVKQIDLLLLHQQVGNYRKAWIALENAVKEGKVKSIGISNFDGERLVDLFNFADIKPSVIQVETHPYHQQVELQEFLKPYGTKIESWYPLGHGDKNLLEEKIFKKMAKKYNKTVAQIILRWHIQEGIIVFPRSTQKEHLAENINIFDFELSCSEIKEIRKLNKKQPYFTMTYEEQEKNFLSWKLED

SEQ ID NO: 1831 - protein, 112 aa, Bartonella sp. sh8200ga
ANEACLKMLQEIGSVERIPEFIARAKDKNDPFRLMGFGHRVYKNYDPRAKIMQKTCHEVLKELNIQDDPLLDIAIELEKIALNDEYFVEKKLYPNVDFYSGITLKALGFPTE

SEQ ID NO: 1832 - protein, 400 aa, Streptococcus pyogenes
HNLNKLVWRYGLTSAAAVLLAFGGGASSVKADSNVLSPKDREAKIKQFKEDLKKYPQTNQSQFWNKAWYGKSYFNEEEYLKSLKEFTEKRLSEIVELIEKGATQGPAGPEGKPGPKGDKGETGARGPRGERGETGLQGPKGEAGKDGAQGEKGEKGDRGEKGEAGIQGPKGEAGKDGAPGEKGEKGDRGETGAQGPVGPQGEKGETGAQGPAGPQGEAGKPGEQGPAGPQGEAGKPGEKAPEKSPEVTPTPETPEQPGEKAPEKSPEVTPTPEMPEQPGEKAPEKSPEVTPTPEMPEQPGEKAPEKSPEVTPTPEMPEQPGEKAPEKSPEVTPTPEMPEQPGEKTPEKSPEVTPTPEMPEQPGEKAPEKSKEVTPAPEKPADKEANQTPERRNGNMAKTP

SEQ ID NO: 1833 - protein, 124 aa, Triticum aestivum
  misc_feature (57)..(57): Xaa can be any naturally occurring amino acid
RGRGRGLSVFSLLPDVWGIKWRFPIMPVSRLNEEPTRMSTLIDLTCDSYGQIDKFIXNAETLPLHPLDPERGGCYYLAVLLSGAYQEALSNKHNLFGGPSIVWVEKSTDAATGFQLHTDWAQRD

SEQ ID NO: 1834 - protein, 109 aa, Glycine max
  misc_feature (63)..(63): Xaa can be any naturally occurring amino acid
  misc_feature (96)..(96): Xaa can be any naturally occurring amino acid
ASSMISSPAVTTVNRAGAGMVAPFTGLKSMAGYTTIKTNNDITFIAINGGRVQCMQEWPPIGXTKYEILYYLSDLDDAQLAMEIEYLLTKGWILYXEFNWEHCFMYREH

SEQ ID NO: 1835 - protein, 57 aa, Zea mays
MPFTASDICKILLAIILPPVGVFLERGCGADFFINILLTILGYIPGIIHALYIILKY

SEQ ID NO: 1836 - protein, 146 aa, Saccharomyces cerevisiae
MAGDSDNVSLPKATVQKMISEILDQDLMFTKDAREIIINSGIEFIMILSSMASEMADNEAKKTIAPEHVIKALEELEYNEFIPFLEEILLNFKGSQKVKETRDSKFKKSGLSEEELLRQQEELFRQSRSRLHHNSVSDPVKSEDSS

SEQ ID NO: 1837 - protein, 151 aa, Picea glauca
MAMDPLLNTVQQLLVVPDDLERILHAPTRSYMRDTEATASTPVDVKEYPNSYVFIVDMPGLKSNDIKVQVEDENILNISGERKRNEKEEGEVKYIRMERRVGKFMRKFSLPADCNLEAISAACQDGVLTVTVPKLPPPEPKKPKTIAVQIG

SEQ ID NO: 1838 - protein, 1128 aa, Bordetella pertussis Tohama I
MGKGNMKQVTGYCTLCRSRCGSVNHVENGRLVAVTPLAGHPTGGALCAKGRAAPEMMAESHRLLRPLRRTNPRGAADPGWREIEWSEALDEVAARLAVARRRDGAESVAFAVTTPSGTPMVDSFEWVERFVRVFGSPNLIYAVEVCGWHKDYAHALTFGRGIGVPDLEHTDTMLLWGHNPARTWLAQAARIAAARQRGARVVVVDPNREGSSQQADLWLRVRPGADGALALGAIRHLLHTGRFDHDFVARWSNGPYLVDGASGALLRAVDLWPDADPAARVVMQDGSPAASGRGADTARAELFGSWTLRLHDGRACEAVTVMHALRVAVERYTPDEVARLAWLDEAELAQFNAIFENAPRLSYHSWTGVGQHTNATQTDRAIATLYALTGACDRKGGNLWTVAPPYRAVNGYRELLSPVQRAKALGLDELPLGPPSLGWITARDFCRAVLQQDPYPVRTLVSFGSNLLVSQAETARNLEALQALDFHVHVDMSMNPTAMNADIVLPANMPWEREALKLGFEITQAAVEHVQLRPRMVEPAGESRADYEIVLELARRLGLRDAFFGADMDACWNHQLAPLGIDVQALRRQPEGIRFPQPFVHEKYKAVRDGQPVGFPTQDGRVQIHCAALRDIGQPALPVHVEPADTPARHAGAYPLVMSTAKSGWFVHSSHRYVASLRRKSPEPQVYLSVQAARARGIASGDWVRVRTPYGEVALRAKINADLHENVAIAEFGWWQGCEGLGRVDGAIVGPASSNINAIMTDRHRDPVSGSVPLRATVCDIVRDDARNRGSWSGAREFVLAQKRGIAHDVAEFRLLPCDAQALPDFLPGQHVIVSMPGGAARRAYSLTGPNREPAHLSIAVRRVRDGDGPAGVMSNALHELAEGARVLLSAPAGVFTPPLRTARPVILMASGIGITPFHGYLEALAQDAGPAPSVLLVHACRDGSSHPYGAELKRLAQRIGSVCTLTVYAEPASDDAPGRDYQQRGRLDFAWLPPATVAARPLVYLCGSPGFLAFCTDALAARGIPRFDIFSETFTSEKRVPATLAPQPIEIEAEQGGFTWDPSAGTLLDAAERAGLSLPSGCRVGQCESCAMHIVSGQVAHLIDFDGSADTCLTCQAVPITPLTLRR

SEQ ID NO: 1839 - protein, 433 aa, Sulfolobus solfataricus P2
MLCLFIFRRDLRLDDNTGLIKALEDCEKVIPAFILDPRQVGNENEYKSEFAINFMINSLNELNDELRKRGSRLYVYFGLAEEVIKNLLKDVDAVYLNEDYTPFSKMRDERIRKYCEDTGKIMKSFEDYLLTSKNDFKNYRNFTTFYNVVKNKQIKKPVQNNYTNYYKNSLGDEHELPPRQGERGGRKEGIKLIERARQINYDRKDFVAEDNRTFLSPHLKFGTLSIREVYYSLLDSQAIIRQLYWRDFYTLLAYYNERVFHEPLKREYNCIEWENNERLFQAWLEGKTGYPIIDAGMRQLNRTGDMPNRVRMLTAFFLVKVLIIDWRIGEKYFASKLIDYDPSVNNGNWQWIASVGTDYIFRVFDPWKQQVTYDPEAKYIKRWVDELESYDAEIIHNAYKYTLKSYPKPIVDWRIRVNLAKRLYEVCRKSKIK

SEQ ID NO: 1840 - protein, 501 aa, Suaeda liaotungensis
MSIPIPSRQLFIDGEWREPIKRNRLPIINPSTEETIGEIPAATAEDVEAAVSAARRALKRNKGRDWAATSGAHRARYLRAIAAKVSEKKDHFVKLETMDSGKPLDEAVLDIDDVSTCFEYFADQAEALDNKQKYPVKLPMDRFKSHVLRQPIGVVGLISPWNYPLLMATWKIAPALAAGCTAVLKPSELASVTCLEFGEVCNEVGLPPGVLNILTGLGPDAGAPLVSHPDVDKVAFTGSSATGSKVMGSAAQLVKPVTLELGGKSPIIVFEDVVDLDVAAEWTIFGVFWTNGQICSATSRLLVHESIAAEFVEKLVKWSKKIKISDPFEEGCRLGPVISKGQYDKIMKYISTAKSEGATILCGGSRPEHLKKGYFIEPTIVTDITTSMQIWKEEVFGPVLCVKTFSTEEEALELANDTEYGLAAAVFSKDLERCERVTKALEVGAVWVNCSQPCFCHAPWGGVKRSGFGRELGEWGIENYLNIKQVTSDISDEPWGWYKSP

SEQ ID NO: 1841 - protein, 274 aa, Arabidopsis thaliana
MANQTQISDKYILGRELGRGEFGITYLCTDRETREALACKSISKRKLRTAVDVEDVRREVTIMSTLPEHPNVVKLKATYEDNETVHLVMELCEGGELFGRIVARGHYTERAAATVARTIAEVVRMCHVNGVMHRDLKPENFLFANKKENSALKAIDFGLSVLFKPGERFTEIVGSPYYMAPEVLKRNYGPEVDVWSAGVILYILLCGVPPFWAETEQGVALAILRGVLDFKRDPWSQISESAKSLVKQMLEPDSTKRLTAQQVLDHPWIQNAKK

SEQ ID NO: 1842 - protein, 467 aa, Listeria monocytogenes str. 4b F2365
MTSVMWFRRDLRVNDNKALYHACKENDLLLLFQVNPAQFITGSPSHQAFFASVAHFKQEIDKTAHLQIMFGEPIECFQQLKDSLPSWDKVYFNRDETGYGAKRDEAAQAFFDEQKIEVQAFHDSYLHSAEEVKKSPTEYYKIFTPYYKKWREEIKETPFKVTLKHENIRKESLFLKYEEQFAEMTSDLPILDIGERAANTRLANFIKHDVADYDKARDFPELDKTSHLSRYLRTGEISIRTIWQSLQETEATEGRATFEKELCWRDFYNMIYVSFPNQKNEPIQENYRFIEWENNREYFKAWQEGKTGFPLVDAAMRQLKETGWMHNRLRMITASFLTKDLLIDWRFGEKYFQQMLIDYDPASNIGGWQWAASTGTDAVPYFRIFNPTTQSQKFDSTGKFIRKYVKELANLPDKYIHQPEKMSETEQKEHGLLLGKDYPFPIVDHKERRKLAIARYEFSKEHSRGNI

SEQ ID NO: 1843 - protein, 475 aa, Aspergillus nidulans FGSC A4
MLEDPSYAEIVRWGDDGDSFVVLECEKFTKTILPKHFKHSNFASFVRQLNKYDFHKVRQNNEENGQSPYGQNAWEFKHPEFRANSKESLDNIRRKAPAPRKQAQAHDDSVPTQQIDLLNQQIVAQQQQIQHISDRYAQMSVDHQLMLQEVLRVQKTVVNHENVIHQLVNYLVSIDARQKRDNKAGSFQAQVGASPSQVTPMDDGVSTPLQQASKLLSDMNAEVQFNLVPVESMGEPPKTGVVSTPTMETAPRRVAPQPAAAATNPALVYPKMNGEMEPVVYPVGATNGIDPMYGEHVNNVPYTVPPKQDMDDRRQFPENRKKSNHVDPGWMRSPRILLVEDDATCRQIGGKFLYSFSCEIDTALDGLEAVNKVQDGSKYDLILMDIIMPNLDGVSACHLIRQFDRTPIIAMTSNIRSDDIQLYFQHGMDDVLPKPFTRKSLLEMLEKHLVHLKTVPQGMEAPPTCDRSHVGTSLN

SEQ ID NO: 1844 - protein, 290 aa, Arabidopsis thaliana
MARCVGRCYVSPAFGESESHRLSERRFLKLSSSTNSDPAGSKSLKLRGKIHRRMSYFRPIMAKDESISSRSGETKQINGKQKNIVWHDCPVTKSDRQELIKQKGCVIWITGLSGSGKSSLACALSRALHNRGKLSYILDGDNVRHGLNSDLSFEADDRAENIRRVGEVAKLFADSGIICIASLISPYRIERAACRALLPQGDFIEVFMDVPLHVCEARDPKGLYKRARAGKIKGFTGVDDPYEAPLDCEVHIISNFSSSSSLCEMADIVVSYLDQNGYLKKHSTKSRNCM

SEQ ID NO: 1845 - protein, 340 aa, Streptomyces fradiae
MKALVFEAPERAVLTHRDIPAPAPGEALVRVAYNSVCGSDLSFYKGVWHGFTYPVVPGHEWSGSVVDVNGPRGADLVGRNVVGDLTCSCGTCAHCAAGTPTLCEDLGELGFTRDGACAEYMTVPVANLRPLPDTLPLRTACQVEPLAVALNAVDRLGVTPGEKVAVMGAGGIGLLLVQAVRLRGGTVTAVAEPVPERRAAALALGVPAAVGGDPGALVELTRSDPAAVPDVVLEASGYPTAVQEAVEAVRPGGRVGLVGYRIEEAAVMAPHHIVLKVLTVRASMGPGTRFEEAVDVLASGAVDVDALLSHEFALDDYAKALDVALRRADGNTRSYFNLRA

SEQ ID NO: 1846 - protein, 224 aa, Magnetospirillum magnetotacticum MS-1
MQGPYSMKFFIDTAEVAEIRELAATGLVDGVTTNPSLIAKSGRKILDVIAEICDIVPGPISAEVAATDFDTMLAEGRKLAALRPNVAVKVPLTLAGLKTCKVLADDGVKVNVTLCFSANQAILAAKAGAAFISPFVGRLDDIGQDGMDLIADIVSIYREYPAFRTEVLAASIRHPMHVTEAARLGAHVVTMPASVLRQMVQHPLTDKGLAAFMADWAKTGQSIL

SEQ ID NO: 1847 - protein, 504 aa, Sinorhizobium meliloti 1021
MLSNFIAPDSNDPRLRIKSRYQMLVDGKSVDAASGSTIDRVSPGHAGEVVGTWPEASADDVRKAVAAARKAFDAGPWPRMSGAERSRLMFKVADLILARQEELALIESLEVGKPIAQARGEIGFCADLWSYAAGQARALEGQTHNNIGDDRLGLVLREPVGVVGIITPWNFPFIIASERVPWAIGSGCTVVLKPSEFTSGTSIRLAELAREAGIPDGVFNVVTGYGDPAGQVLAEDPNVDMVAFTGSVRVGTKLGEIAARTVKRVGLELGGKGPQIVFADADLDAAADGIAYGVYHNAGQCCISGSRLLVQEGIRDALMERLLDISRKVAFGDPLNERTKIGAMISEAHAEKVHSYVTAGITSGAELLLGGERIGREAGLYYAPTVFAGVTPDMSIAREEIFGPVLSTLTFKTADEAVALANATEFGLSASVWSTNLETALQTIRRIRAGRCWINSVIDGTPELPIGGYKKSGLGRELGRYGFDEYSQFKGVHVTLGRPAPWFT

SEQ ID NO: 1848 - protein, 287 aa, Listeria monocytogenes str. 4b F2365
MTIQWFPGHMAKARREVTEKLKLVDVIFELVDARIPLSSSNPMLEEIIHQKRRVIILNKADTADEKTTKEWIDYFAEKGLPAVAVNAQEGKGLFKIEQAAEKLMAEKFDRLRSKGMKPRAIRAMILGIPNVGKSTLINRLAKKNIARTGNKPGVTKAQQWIKVGKTLELLDTPGILWPKFEDQEIGYKLALTGAIKDDLLQMEEIAGYGLRFLEKHYPDRLQNWLKVETVSEDPIETLAFIAEKRGLLDRYNDPDYSRAAETVVREIRQQKLGRMSFDFPNWEDEVE

SEQ ID NO: 1849 - protein, 328 aa, Glycyrrhiza echinata
MASSTSTTTSKEIDRELPPLLRVYKDGTVERFLGSSFVPPSPEDPETGVSTKDIVISENPTISARVYLPKLNNTTEKLPILVYYHGGAFCLESAFSFLHQRYLNIVASKANVLVVSIEYRLAPEHPLPAAYEDGWYALKWVTSHSTNNNKPTNADPWLIKHGDFNRFYIGGDTSGANIAHNAALRVGAEALPGGLRIAGVLSAFPLFWGSKPVLSEPVEGHEKSSPMQVWNFVYPDAPGGIDNPLINPLAPGAPNLATLGCPKMLVFVAGKDDLRDRGIWYYEAVKESGWKGDVELAQYEGEEHCFQIYHPETENSKDLIGRIASFLV

SEQ ID NO: 1850 - protein, 369 aa, Triticum aestivum
  misc_feature (77)..(77): Xaa can be any naturally occurring amino acid
  misc_feature (117)..(117): Xaa can be any naturally occurring amino acid
  misc_feature (146)..(146): Xaa can be any naturally occurring amino acid
  misc_feature (254)..(254): Xaa can be any naturally occurring amino acid
MGSTAADMAASADEEACMYALQLVSSSILPMTLKNAIELGLLETLVAAGGKLLTPAEVAAKLPSTANPAAADMVVSXSARPCGRVSRLPCHRKNGVVTARGGQGGRFSRRKGPRPGXKDLTPHGGGFSKSGLGFMSRDKFLLGNWXIFQEFVGDGGIPFNKAYGWSAFEYHGRNVGFNRVFDEGMRNHSIIITKKLLELYKGFEGLNTLVDVGGGVGATVAAITAHYPAIKGINFDLPHVISEAPPFPGVTHVXGGDMFQKVPSGDAILMKWILHDWSDEHCAMLLKNCYDALPAHGKVVLVECILPVNPDATPKAQGVFHVDMIMLAHNPGGRERYEREFEALAKGAGFAAMKTTYIYANAWAIEFTK

SEQ ID NO: 1851 - protein, 365 aa, Candida glabrata
MAVTKTIVVPPGDHVGQEITEEANKVLNAIQECRPDKVNFKFDHHLIGGAPIDATGVPLPDEALEASKKADAVLLGAVGGPKWGTGAVRPEQGLLKIRKELQLYANLRPCNFASDSLLDLSPLKPEIARGTDFVVVRELVGGIYFGERKEDEGDGVAWDSEKYSVPEVQRITRMAAFMALQHNPPLPIWSLDKANVLASSRLWRKTVEETIKNEFPQLTVQHQLIDSAAMILVKNPTHLNGIIITNNMFGDIISDEASVIPGSLGLLPSASLASLPDKNTAFGLYEPCHGSAPDLPKGKVNPVATILSAAMMLKLSLDLFEEGEIIEQAVKKVLDSGIRTADLKGTNSTTEVGDAVAKAVRELLA

SEQ ID NO: 1852 - protein, 171 aa, Aquifex aeolicus VF5
MLGSLIVNFKLFSAGGAIMEVFSRSFKNGEEIPKVYTCDGKDISPHIGWEDVPEGTKSFVLIMDDPDAPIGTFTHWVVYDIPSQTRELLEDFPKVPEVSGIKQGINDFGRVGYGGPCPPRGHGYHRYFFKVFALSVESLGLPPGASRKDVELKMNGKILAQAHIIGLYKRD

SEQ ID NO: 1853 - protein, 336 aa, Pseudomonas aeruginosa
MGRRYLSGAAGAIRRRGSTCHCRQRRMRAFLRGAGKSRCQIAALPGRSRPMSDYQETLYQGYGQRFSIDNMLHEVRTEHQHLVIFENARMGRVMALDGVIQTTEADEFIYHEMLTHVPILAHGAARRVLIIGGGDGGMLREVAKHKSVERITMVEIDGTVVDMCKEFLPNHSQGAFDDPRLNLVIDDGMRFVATTEERFDVIISDSTDPIGPGEVLFSENFYQACRRCLNEGGILVTQNGTPFMQLEEVRTTAARTDGLFADWHFYQAAVPTYIGGAMTFAWGSTHEGLRRLPLETLRQRFRDSGIATRYYNADIHLGAFALPQYVLQAIGKQDND

SEQ ID NO: 1854 - protein, 94 aa, Zea mays
FSGGLNPFLWGTLSFANLAGQKASSPWATMFNSFCLALKGSLNLKAARELPDSLATLNIKFNSTVKNGFTPLKALFYKTKPSKVTTIRTSPPFF

SEQ ID NO: 1855 - protein, 217 aa, Triticum aestivum
LILEIHPTKGNKSWSSTAVAAARQRGRPPPGRSSPSPRAPPSPSSSSIPMQQRRGRPSGTDGSDFSYRMVVDSRYQRVADGRSRLARLMLVQTLHQVAGGALLLLSLSKGTEINKFAVLSLAAGLLAILLGEFGRRRTVAVFLRLYTSLSSIAIAFSVTCIIRSDLFVKITKQNTAAITSYEMFDVVRVALGVLLQLVVIATTTRLLQNMSPPKRTS

SEQ ID NO: 1856 - protein, 217 aa, Ophioglossum pedunculosum
RSGLLKKAYELSVLCDAEVALIIFSGTGKLFEFASSSMKKILERYRKYGGGLHDNSIATRDAEYWRNEVMRMKEHIACLEESQRHLLGENLVSLSVKNLQKLEHQLEIGANRIRTRKTQILLEQIQELQKKEHFLHGENNILKTKLEQLSTRQVPSLGTLIYTSTVTTTSTTSAGAGVEDNAGGHDSMNAMQKMTLHSNFQPATSAQNTLQLGYYPD

SEQ ID NO: 1857 - protein, 189 aa, Glycine max
  misc_feature (124)..(124): Xaa can be any naturally occurring amino acid
  misc_feature (140)..(140): Xaa can be any naturally occurring amino acid
  misc_feature (154)..(154): Xaa can be any naturally occurring amino acid
MASSMISSPAVTTVNRAGAGMVAPFTGLKSMAGFPTRKTNNDITSIASNGGRVQCMQVWPPVGKKKWETLSYLPDLGDAQLAKEVEYLLRKGWIPCLEFELEHGFVYREHNRSPGYYDGRYWTXWKLPMFGCTDALRVLXELQEAKTAYPHGFXRISGFDDGVPSAMALIVSGVQPPGLLSERRYAKLW

SEQ ID NO: 1858 - protein, 162 aa, Shewanella oneidensis MR-1
MTSTIYRHNAIDIQGNPTPLTQYQGKVILIVNTASECGFTPQYKGLEALYQEYKARGFVVLGFPCNQFGAQEKANEQGIKSFCELNFGVSFPLFSKIEVNGEHTHPLYQYLKKAAPGMLGTERIKWNFTKFLINRQGEAVARFAPTTKPEDIRDKIESLLNK

SEQ ID NO: 1859 - protein, 488 aa, Arabidopsis thaliana
MESGGKTNRQLRKAICVSTDEKMKKKRSPSVIVIGGGMAGISAARTLQDASFQVVVLESRDRIGGRVHTDYSFGFPVDLGASWLHGVCKENPLAAVIGRLGLPLYRTSGDNSVLYDHDLESYALFDKAGNQVSQELVTKVGENFEHILEEICKVRDEQDEDMSIAQAFSIVFKRNPELRLEGLAHNVLQWYLCRMEGWFAADAETISAKCWDQEELLPGGHGLMVRGYRPVINTLSKGLDIRLSHRVTKISRRYSGVKVTTEKGDTFVADAAVIALPLGVLKSGMITFEPKLPQWKQEAINDLGVGIENKIILNFDNVFWPNVEFLGVVAETSYGCSYFLNLHKATSHPVLVYMPAGQLARDIEKNSDEAAANFAFSQLQKILPDASSPINYLVSRWGSDINSMGSYSYDIVNKPHDLYERLRVPLDNLFFAGEATSSSYPGSVHGAYSTGVLAAEDCRMRVLERYGELEHEMEEEAPASVPLLISRM

SEQ ID NO: 1860 - protein, 351 aa, Aspergillus nidulans FGSC A4
MPINNAAVRVSHLTLAIQDRPVTPPGPNEVLVQVISTGICGSDTHNWNNPNVSRELILGHESAGLRGLIVEIDSEVKDRHVGQRMAVEPGFACATRKCPDNQEDAFCLRGNPNTCANLKYCGLDPTDGTLQQYFTCKAHMAIPIPEEISWEEAGAIQPLAIAVQLARRAALSATAKVVGDGGCGPLGLLVIAIAKAYGVCKIVVFDIEQSRLDFALSYGEDIGVLSPKISENVEPLKFVFEFTSSVVREHNLGHGVDISVEASGADSSAQMALTILKPRGTCIQAGLGKRLTKPLFFLLIANELTLRGRSGSRRDVTRKRLSLYKVKSASEAVDYEDFSLDEGTGGVSGTV

SEQ ID NO: 1861 - protein, 89 aa, Zea mays
WSCLSSSSPLARLISRRGLAGAAYGHGSAKVPLWKDPVSPSKLKEEHFVLSSLSMWGVIFFCVLYFIVVIILSNFYYSIFYYFFFFLFF

SEQ ID NO: 1862 - protein, 422 aa, Thiobacillus sp.
MVTKQDVEAAYLLLLGRPAEPGAAEYWMENVYHTIDLVTGLMASDEFRINRLPRLVEAGLSLSDFAPAAAPKALADNGPPMQAALHRGIGQIEVVEINRPEALPGTVVVKVGASGICGTDLRAYRQDPNSQDLPHGHEFAGTIVEVGEGVSRDRIGKRVTADLFLNAMCGNCQFCISGHAYHCIDKALPFRSGGFAEYLRVRNAATFDLPDSIDDALGALVEPLAVSTHAIRLVGVQPGMIGVVIGAGTIGLCAIAAALHAGATNVFVVARHAFQGELARAIGATDILPDDIGSAINRIREVAPHGADFVIEAVGGGQATIDQATRFLAPRGRVGIVGETGPGIKVVEAYPALMKELTFLYSNCYGYLDGKHDFEVAIENLALDGERLRKLITHEFLIADAPLAFQTANNKKFSSVKVQLKP

SEQ ID NO: 1863 - protein, 450 aa, Salmonella typhimurium
MPTHLVWFRRDLRLQDNLAAAACRDASARVLALYISTPQWQAHDMAPRQAAFISAQLALQTALAEKGIPLLFHEVAFNASIETVKNVCRQHDVSHFYNYQYEFNERQRDRAVEKLPSVICEGFDDSVILAPGAMTGNHEMYKVFTPFKNAWLRLKEDIPPCVPAPKIRVSGLSTPLTPVSLNYPQQEFDALFPVEENAVIAQLRQFCAQADEYALRRDFPAVDGTSRLASLATGGLSPRQCLHRLLAQPQALDGGPGSVWLNELIWEFYRHLMTWYPALCKHQPFRWTKRVAWQENPHYFQAWQGETGYPIVDAAMRQLNATGMHNRLRMITASFLVKDLLIWRLGERYFMSQLIDGDLAANGGWQWAASTGTDAAPYFRFNPTTQGERFDRDGEFIRQLPALRDIPGKAIHEPWRWAKAGVVLDYPRPIVEHKQARATLSAYEAARKGA

SEQ ID NO: 1864 - protein, 1955 aa, Ustilago maydis 521
MSFHLDSFVNSPASADQAPAWQLHSSTDSYLEWDANPKSLIEQQPSSTTTSPPPSMSRLRSTSSTVATLAPGAQTPAEPPSTDSASVLSHNGHTTSPERSVSPSYFTKLYFHPPDRTTSATSPTITFTSAIEPSLVAHAQPSPLLPTDAQSASHLPSPARESHTGRRPSISAVGSSSTTSPLTTPLSPTLSSRSSAAGGGFFASLRPSSPGNLPISTSKPQDGDNLGKPRRPSSVFDHVGNVWERFGRKVHHTRTATSEHHSSSSSHTRRSASQASPPIGLTPESADPFDTARNSPSGSFISQASPSQSTTTDSECRTPATPGGEPPAQLSTPQPLPSAPAYTSVSALDSSVNAPQQEEAEELPYLAPESPRPQPQSFNTIGSPRIPSGQRSATSHRRTSSLLERVLIQVTDDNERFSVVDISGVDSADAIKERMFAKLHLFDADHSSFQLFRTEIGQSEATGPVVSDDALLVLCLQMGDDRGTLKFLVQQIAPPPNSTVRALPPPTSTIVSQRAINNIRRTSGTGSAPGQHLRTESQSSKSSLSDALVYPEMIGADAAHEGSNRNSGSSLTRSKAQTRRALPSAPPVDDLRSPTHSCISSTTQSAVQDRRSIASSGDGSANESWARHGASASDGAPSAIPTQRSSSVNANASAAQSSSSGSAGRHPSNLEDDRQRYDAEPGVNRSLHAPATGSSHWQERSDEGARESLRVQTTAQLPGLTLHNAKSMDDLHRPSQSASQPSTLTTQAEVRKQAGMDRDGRYPTPAIMRPSTAAPAGAGARESASSHRQYSSDALGSSRSPQEPTLGLDPRMLQRNRSAQAAIPSGQQLVNHGPTRMSSTPQIRSPPMQHVYLGQGQIDPRFNTQPPHSAHPMQAHPSNMVARPPYSAAPSFASQPAYQSQSFGQAALRPMGHGFVNEFGARAPAASVNFNTYHGHDPRMNASAMQGSLTPRPYSYYEQPSMHQQQPMYRPYAQPSLVTASPYRTREDPFTTRYFPASSSRQVSEFQMQAGRLEPGMTVQQTLRTQEAIWGHTSAGSPGQAYQSAHAHPPGPSYGPRDPRQPGQSNQYTGMQAYPNASAAPQMQQRPSYQGSAMPNLHHVPPPRPQSYPSAQPQPQPPRNAHDRHPAPPAGHSGPQMMPQSSGSSAGRAPMQPQQNQQLSQPSQPSQREQPGHAQAMPGSESHRRDPPVRTNASERSSGSSFSSQGSFQHGRPHNDDCNSRNSIEESFSAPTSARSSQSEAASAKPVNVEHRSSYADQERDLADDELEHVRPLPKLPHSSATTRTDAFKSSSCDASGATVGGSVRRSEDEDTLRAGEWAQLWRALDPKSDGTVSGTAISGSSGGDGDTVRAEPSTPGASRPQTKDGATLPISLEPPRIPSPSLAPEENGTVSSFGTFDDDETESGTWAQPLDSDVNAPRLPLRLDADSEALSDDHATLLPGQDTLLQASTRGTRGFSAASNSPKRPELRLTIDPAAGPTVMTWTASQASTNSPRASTSHLSSALNSGGITRSNSFARRDDDWAFRPPPEQLYENLDDFFPKHDLDKPLLDTTAGPESGLVSSPRAEASVPSVASVGAQQGLSQRSRHKKSIRLVAEDRKRILERADTRRAAQGAELSSGLVRRRSTKLWGTKVVEMTPGQELATPASATSAESPWSDTASTTGQPVFKWVKGDLIGKGTYGRVYLALNATTGEMIAVKQVELPRTASDREDSRQKGVVAALKSEIETLKDLDHPHIVSYLGFEETRQFLSIFLEYVPGGSVGSCLRKHGKFEESTIKSFLHQILEGLAYLHSKGILHRDLKADNILVDFEGTCKISDFGTVRRSDDIYGNVENMSLQGSIFWMAPEVVSLSKKGYSAKIDIWSLGCVVLEMFAGRRPWSDDEAVQAMFKIGAQRKAPPIPADVKLTKQAAHFLKNCFEIDPAKRPTAQRLLDHVFTVPVPGWQFSHSALCRSLHR

SEQ ID NO: 1865 - protein, 121 aa, Saccharomyces cerevisiae
MSNEVDRMDVDEDESQNIAQSSNQSAPVETKKKRFEIKKWTAVAFWSWDIAVDNCAICRNHIMEPCIECQPKAMTDTDNECVAAWGVCNHAFHLHCINKWIKTRDACPLDNQPWQLARCGR

SEQ ID NO: 1866 - protein, 169 aa, Rhizobium etli
LGRLVSIEVGKITSEGLGEVQEMIDICDFAVGLSRQLYGLTIATERSEHRMMESWHPLGAIGIISAFNFPVAVWSWNAALAMVCGNSTVWKPSEKTPLTALAVQALFEKALKRFVAEGGKAPANLSTLIIGGREVGEVLVDHPKIPLVSATGSTAMGRAVGPRLSQRFA

SEQ ID NO: 1867 - protein, 510 aa, Xanthomonas campestris pv. campestris str. ATCC 33913
MSADLLKALDLAPSNAGTYLGEGTWSQATGAGVLQPLNPTTNAVIADVQATTPQDYELIVARAQAAFKVWRTTPAPRRGEAVRLCGEALRAHKDALGSLVALEMGKSKPEGDGEVQEMIDIADFAVGQSRMLYGYTMHSERPGHRMYEQYQPLGLVGIISAFNFPVAVWAWNAFLAAICGDICIWKPSNKTPLTAIATMKICNAALKEAGFPDIFFLINDAGTSLSEKLVEDGRVPLISFTGSTQIGRVVAEKVARRLGRCLLELGGNNAIILDETADLKLAVPGIVFGAVGTAGQRCTTTRRLIVHESIYDNVLATLVKAYKQLDSKIGDPTDPANLMGPLNSRGAVEQFLESIAKAKAAGGTVEVGGTAIDRPGNFVLPAIVTGLKNSDAVVQHETFAPILYVMKYSTLDEAIDLQNGVPQGLSSSIFTQNLKAAEKFLSAAGSDCGIANVNIGTSGAEIGGAFGGEKETGGGRESGSDAWKVYMRRQTNTINYSDSLPLAQGIKFDL

SEQ ID NO: 1868 - protein, 497 aa, Arabidopsis thaliana
MDKKKNSFPDNLPEGTISELMQKQNNVQPSVIVIGSGISGLAAARNLSEASFKVTVLESRDRIGGRIHTDYSFGCPVDMGASWLHGVSDENPLAPIIRRLGLTLYRTSGDDSILYDHDLESYGLFDMHGNKIPPQLVTKVGDAFKRILEETEKIRDETANDMSVLQGISIVLDRNPELRQEGMAYEVLQWYLCRMEAWFAVDANLISLKCWDQDECLSGGHGLMVQGYEPVIRTIAKDLDIRLNHRVTKVVRTSNNKVIVAVEGGTNFVADAVIITVPIGVLRANLIQFEPELPQWKTSAISGLGVGNENKIALRFDRAFWPNVEFLGMVAPTSYACGYFLNLHKATGHPVLVYMAAGNLAQDLEKLSDEATANFVMLQLKKMFPDAPDPAQYLVTRWGTDPNTLGCYAYDVVGMPEDLYPRLGEPVDNIFFGGEAVNVEHQGSAHGAFLAGVSASQNCQRYIFERLGAWEKLKLVSLMGNSDILETATVPLQISRM

SEQ ID NO: 1869 - protein, 457 aa, Bordetella bronchiseptica RB50
MARPLDTLLANTLVFLEGQGLVPGSIGIADGRIAVIGSHGQDMPAARETIDCQGLWTLPGVIDPHVHFGFGSPETDFETESRNAALGGTTSVISFHRSADIRESFDAVRARAESQSCIDFGFHFGITSRLHVDTLDEISRRFGVSSYKLYMMYKGAAGLSKGFTDIDDGLLWGALNATRAIPGAVLGVHCENVEVIPWLRDPLRAAGRDDLAAWNEQSPDFLEAENVHRVCYFAGKTGTPVNIVHLSSREALREVRRHRHEGRAAPIYVETCPHYLFLDDRSPAGTYAKVNPPVRSAADIDAMWEGVCDGAITTIGSDHVPRKRATKDKDIWAASNGFPGTGMILPILLHEGYHRRQVPLETLMRVASGASARIYGMSAKGRIAVGNDADLVIVDPDLEKTVDPGELESHADYSPYEGMRLKGWPVRTLVRGRTVARDGRIADEARQTPGGRYLRRL

SEQ ID NO: 1870 - protein, 243 aa, Oryza sativa (japonica cultivar-group)
MMNALGLSVAATSTGSPFHDVCCYGAGIAGNIFALVLFISPLPTFKRIVRNGSTEQFSAMPYIYSLLNCLICLWYGLPFVSYGVVLVATVNSIGALFQLAYTATFIAFADAKNRVKVSSLLVMVFGVFALIVYVSLALFDHQTRQLFVGYLSVASLIFMFASPLSIINLVIRTKSVEYMPFYLSLSMFLMSVSFFAYGVLLHDFFIYIPNGIGTVLGVIQLVLYGYFRKGSREDSLPLLVTHT

SEQ ID NO: 1871 - protein, 431 aa, Glycine max
  misc_feature (111)..(111): Xaa can be any naturally occurring amino acid
  misc_feature (136)..(136): Xaa can be any naturally occurring amino acid
SQRKRDKTKGRCGRKKKALIDRCSTLNTQEEPQNSSFCRVQGTTGTSQAISSGSYTTTTTTTTTSSGSGSSSINSKFSVSSGGQPYPNGQILPTSNLRIFTFAELKAATRXNFRADTVLGEGGFGKVFKGWLEEKXPQRAGSGTVIAVKKLNSESLQGLEEWQSEVNFLGRLSHPNLVKLLGYCLEESELLLVYEFMQKGSLENHLFGRGSAVQPLPWDIRLKIAIGAARGLAFLHTSEKVIYRDFKASNILLDGSYNAKISDFGLAKLGPSASQSHVTTRVMGTHGYAAPEYVATGHLYVKSDVYGFGVVLVEILTGLRALDSNRPSGQHKLTEWVKPYLHDRRKLKGIMDSRLEGKFPSKAAFRIAQLSMKCLASEPKHRPSMKDVLENLERIQAANEKPVEPKFRSTHAASRQGHQAVHHRSPRQDGQ

SEQ ID NO: 1872 - protein, 120 aa, Triticum aestivum
  misc_feature (46)..(46): Xaa can be any naturally occurring amino acid
  misc_feature (93)..(93): Xaa can be any naturally occurring amino acid
MSDSEDHHLEYKADAGAFKTYPMQAVAIRKGGFLVIKNRPCKVGEXPTSDTGKHGHAKCHFVGLDIFNGKKLEDISASSHICDVPHVDRSEYXLIDISEAGFESPRTDNGCTMDDLKLPT

SEQ ID NO: 1873 - protein, 158 aa, Lycopersicon esculentum
MDLRLLGIDNTPLFHTLHHMMEAAGEDSDKSVNAPSRNYVRDAKAMAATPADVKEYPNSYVFVVDMPGLKSGDIKVQVEEDNVLLISGERKREEEKEGAKFIRMERRVGKFMRKFSLPENANTDAISAVCQDGVLTVTVQKLPPPEPKKPKTIEVKVA

SEQ ID NO: 1874 - protein, 317 aa, Desulfitobacterium hafniense DCB-2
FICLRHGYHGETVGALAVTDVEIFRDAYDPLTRRAHVVMSPDARQAARSESAADVATRALAELEALLRERAGQIAALIVEPLVQGAAGMAMYDPSYLEGARALCDRYRVHLIADEIAVGCGRTGTFFAWEQARGGDAVPAHAWPDFLCLSKGITGGYLPLSLVLSRPEIQRAFVADDIARSFLHSHSYTGNPLACRAALATLDLFESEDVLARNRERAQWLGTAMAGIAADPRVSHVRQRGMIWAADIDPQAAGANFAGRFHLAARERGVLARPIGHTLYVMPPYVFDAELANWLGEQLLDTLQAVLDPAEEARHAD

SEQ ID NO: 1875 - protein, 380 aa, Mycobacterium tuberculosis H37Rv
MSKKHTTLNASIIDTRRPTVAGADRHPGWHALRKIAARITTPLLPDDYLHLANPLWSARELRGRILGVRRETEDSATLFIKPGWGFSFDYQPGQYIGIGLLVDGRWRWRSYSLTSSPAASGSARMVTVTVKAMPEGFLSTHLVAGVKPGTIVRLAAPQGNFVLPDPAPPLILFLTAGSGITPVMSMLRTLVRRNQITDVVHLHSAPTAADVMFGAELAALAADHPGYRLSVRETRAQGRLDLTRIGQQVPDWRERQTWACGPEGVLNQADKVWSSAGASDRLHLERFAVSKTAPAGAGGTVTFARSGKSVAADAATSLMDAGEGAGVQLPFGCRMGICQSCVVDLVEGHVRDLRTGQRHEPGTRVQTCVSAASGDCVLDI

SEQ ID NO: 1876 - protein, 266 aa, Schizosaccharomyces pombe
MPANYQSVPQDDPSVPNLAQAPPAYSEYNESATENPAVDQFKNTTPVAECAKSIRMAFLRKVYAILTAQLFVTSLFGGIFYLHPAFSFWVQMHPWFLILNFFISLVVLFGLIMKPYSYPRNYIFLFLFTALEGLTLGTAITFFSARIILEAVFITLGVFVALTAFTFQSKWDFSRLGGFLYVSLWSLILTPLIFFFVPSTPFIDMAFAGFGTLVFCGYILFDTYNILHRYSPEEFIMSSLMLYLDFINLFIRILQILGMLQNNDNN

SEQ ID NO: 1877 - protein, 136 aa, Zea mays
MPMYSKSMNAAVRDVWASNFDEELSNLSAVLSRYPCICLDTEFPGAVHDSDMPRYMRGPRESYELVKRNVDDLKLLQVGIALSGPAGRFPIAWQFNIRGFDPALHPHAPASIAMLREQGMDFAMLNEFGIDPEDFA

SEQ ID NO: 1878 - protein, 491 aa, Pseudomonas syringae pv. tomato str. DC3000
MTTQPLNSHRVDPHTAQKFYIDGHWSAPLSPVSIAVVNPATEEVVAHVASGSAADVDRAVAAARAAFAGWSGTSPEVRAQVIGRIHELIIERKEELAQAISLEMGAAISSARAMQVPLAAEHVRVARDLLATYRFQTVEGGTAIEREPIGVCALITPWNWPLYQITAKVAPAIAAGCTVVLKPSELSPLSALLFAQLVHDAGLPPGVFNLVNGSGPEVGGAMAAHPDIDMISITGSNRAGALVAQAAAPTVKRVTQELGGKSPNILLPDADFANAVPPGVMAAFRNVGQSCSAPTRMIVPRNRLAEVEALAAQTAGTIVVGDPQLEHTVLGPIANEAQFHRVQAMINAGICEGAKLVCGGPGRVQGHEQGFYTRPTVFSEVDSSMRIAREEIFGPVLCLIAYDTIDEAVAIANDTVYGLGAHVQGQDLELARSVASRIRAGQVHLNYPSWNPMAPFGGYKRSGNGREYGVHGFEEYLETKAIVGFAPADLM

SEQ ID NO: 1879 - protein, 506 aa, Pseudomonas aeruginosa UCBPP-PA14
MIYAAPGTPGAVVTFKPRYGNYIGGEFVPPVKGQYFTNTSPVNGQPIAEFPRSTAEDIDKALDAAHAAADAWGRTSVQERSNILLKIADRIEQNLELLAVTETWDNGKAVRETLNADIPLAADHFRYFAGCIRAQEGSAAEINDSTVAYHIHEPLGVVGQIIPWNFPLLMAAWKLAPALAAGNCVVLKPAEQTPLGICVLLELIGDLLPPGVLNVVQGFGREAGEALATSKRIAKIAFTGSTPVGSHILKCAAENIIPSTVELGGKSPNIYFEDIMQAEPAFIEKAAEGLVLAFFNQGEVCTCPSRALVQESIYPAFMEEVLKKVRAIKRGDPLDTETMVGAQASQQQYEKILSYLDIAQQEGAEVLTGGSVEKLEGNLASGYYIQPTLLKGHNKMRVFQEEIFGPVVGVTTFKDEAEALAIANDTEYGLGAGLWTRDINRAYRMGRGIKAGRVWTNCYHLYPAHAAFGGYKKSGVGRETHKMMLDHYQQTKNLLVSYDIDPLGFF

SEQ ID NO: 1880 - protein, 64 aa, Triticum aestivum
TDDGYVTLLTESGNLKDALKLPPDNVLFGQIKTGFFYGKDLILFLMSPMGEKQICPFKEIGGGK

SEQ ID NO: 1881 - protein, 126 aa, Malus x domestica
EPMVIGHECAGIVDKVGSEVKHLVPGDRVAVEPGISCAHCQQCKGGRYNLCPDMKFFATPPVHGSLANQIVHPADLCFKLPENVSLEEGAMCEPLSVGVHACRRANVGPETTVLIVGAGPIGLVSV

SEQ ID NO: 1882 - protein, 140 aa, Triticum aestivum
  misc_feature (117)..(117): Xaa can be any naturally occurring amino acid
TLSLSRSSTSLKLDTTSEPSTGSQQPAAMDMSLEHSSSASSSSTTERGGTAWPWPPKRPAGRTKFRETRHPVFRGVRRRGNAGRWVCEVRVPGDRGTRLWLGTYFTAEAAARAHDAXMLMLRGRSAACLNFRDSAWLLSV

SEQ ID NO: 1883 - protein, 181 aa, Arabidopsis thaliana
MASSMLSSTAVVTSPAQATMVAPFTGLKSSASFPVTRKANNDITSITSNGGRVSCMKVWPPIGKKKFETLSYLPDLSDVELAKEVDYLLRNKWIPCVEFELEHGFVYREHGNTPGYYDGRYWTMWKLPLFGCTDSAQVLKEVEECKKEYPGAFIRIIGFDNTRQVQCISFIAYKPPSFTEA

SEQ ID NO: 1884 - protein, 105 aa, Brassica napus
MSAINITNVSVLDNPAPFVSPFQFEISYECLTSLQDDLEWKLVYVGSAEDETYDQTLESVLVGPVNVGNYRFVLQADPPDPSKIREEDIIGVTVLLLTCSYMGQE

SEQ ID NO: 1885 - protein, 159 aa, Triticum aestivum
  misc_feature (54)..(54): Xaa can be any naturally occurring amino acid
  misc_feature (73)..(73): Xaa can be any naturally occurring amino acid
  misc_feature (83)..(83): Xaa can be any naturally occurring amino acid
  misc_feature (96)..(96): Xaa can be any naturally occurring amino acid
  misc_feature (109)..(109): Xaa can be any naturally occurring amino acid
  misc_feature (136)..(136): Xaa can be any naturally occurring amino acid
MAPTVMASSATSVAPFQGLKSTAGLPVSRRSNGASLGSVSNGGRIRCMQCWPIXEGIKNSETLSYLPPLSTEXLLKQVDYLIXRSKWVPCLQFSKXGSSSREHNASPGXYYDGRYWAMWNCLFPEHRPTQVINEVXGVQEGYLTLCRINRHNSACVNTP

SEQ ID NO: 1886 - protein, 181 aa, Arabidopsis thaliana
MASSMLSSAAVVTSPAQATMVAPFTGLKSSAAFPVTRKTNKDITSITSNGGRVSCMKVWPPIGKKKFETLSYLPDLSDVELAKEVDYLLRNKWIPCVEFELEHGFVYREHGNTPGYYDGRYWTMWKLPLFGCTDSAQVLKEVEECKKEYPGAFIRIIGFDNTRQVQCISFIAYKPPSFTEA

SEQ ID NO: 1887 - protein, 1017 aa, Geobacter sulfurreducens PCA
MPILITALIYLIFFLSGATALVYEVVWVRKLSLVFGGSHLAVTTVLAVVMGGLALGSWLFGRRVRTTRNLLRLYGALEIGIAFFALLFIALLNLYSLMPAYSFESLTEHSHQLPRVALLTLRIVLAAIALIVPTTLLGGTLPVLAAFMVRGRRAVGRGVAYLYALNTFGAVAGCFGAGFYLLGRFGVSNTMAGAITVNVLLGIACFALQGPAARYLEAGEDEAPAPLSAVTLPEEKARIGLVVWGIGVSGFCALGYEVLWTRVLGIVIGTNVYGFTLMLAAFLTGIAAGSGAYGLWARRLRPPEEGGCPVSKLIGGFGVVQIVIGLSALLVTILIRDLPTRVFFLQDLFLSQSTDLFRARQFANFALVFSYLFIPAFFMGVAFPLAGTLDACRRRKVGHAVGEVLTCNTIGAILGTVVSGFVLIQVFGIERSLYLLATVNAGFGLLILARLLRGTPRRLATAGTVLAVVGVMAVAGTMPRIWDAKYFAIYRTNQPEVFRTPDLIAEAKRHTDVLYYAEGIQSIVSSIRIRGGYQAFLRNGRIEASDHNESLQNQYALGHLPMLLHRNPRKVLVIGAGSGITLGAVSLHPSVSEMTLAEVEPKVLGVTRSFAAYNHGVLGDRRLRVAFSDGRNYLATTGERYDVITADPIHPWLSGAGYNYTREYFELAAEHLRAGGIMCQWLPLYDLSADDLRSVVRTFRQAYRHVLVWMTQGDAMLIGSNAPILLSEDELAARIAVPAVAADLARVQMGSATDLLSYFVMGTAGADRFSRTGRINTDDNLYLEFSVPRSTGKSALPEVNVNALARHRESVLAYLDDSVPPADRLARENRWMRLDRAAALALEARAIFLGGRYDSPRFGLLVSELEGNYAAFAPWRFLRSEYLEEMASSPLPLDQLALALLDESGRRVVVNVAAVMSRVSRELTVVDFVDSDERVIIGQADINGRGRDGSAKRLAAEVMEAVRLAYNEELSGAEARGKPLPDQAEFVRRMREIIATMTGRQHGNPYPAQGRPIKESA

SEQ ID NO: 1888 - protein, 159 aa, Capsicum annuum
MSDEEHHFESKADAGASKTYPQQAGTIRKNGYIVIKGRPCKVVEVSTSKTGKHGHAKCHFVAIDIFNGKKLEDIVPSSHNCDVPHVNRTDYQLIDISEDGFVSLLTENGNTKDDLRLPTDDTLLSQVKGGFEEGKDLVLSVMSAMGEEQICAVKDIGKN

SEQ ID NO: 1889 - protein, 158 aa, Picea glauca
METTFYSILGVNKDSSSAEIRSAYRKLAMKWHPDKWSTDPSSSETAKLRFQQIQEAYSVLSDDTKRALYDAGMYEPSEDMDAFCDFLDELSSLIATVKVQSNKDDELLQLQEMFTKMLEEDWFSTDNFEAFKEISSQHSDDKPENGQDHEPYGSVDDL

SEQ ID NO: 1890 - protein, 477 aa, Bordetella pertussis Tohama I
MKQHFIDNASVPGSSGERIPVIDPSTGQEFDSIARGNAADIDLAVQAARRAYEGAWGRLSAAERGRLMLALSLKVLEHRDELTALESRDCGKPLKQARADVIAIARYFEYYGGAADKLHGETIPYQQGYTVLTLREPHGVTGHVVPWNYPLQIFGRSVGAALAAGNACVVKPAEDACLSLLRVAELAAETGFPAGALNIVTGYGHEAGDALTRHPGIDHISFTGSPRVGVLVTQTAAERHVPVTLELGGKSPQIVFADADLDALVPVAVNAIVQNAGQTCSAGSRLLVERGAYERVLERLGAAFAALRAGPAQSDLDCGPLIRKTQQERVRGFLDLARGDGIATVAQGRIVPEAPAEGYYQAPTLLRDVPVDHPLAQEEVFGPVLAAIPFDDEADAVRIANATEYGLAASVWTRDGGRQLRIARKVRSGQVFINNYGAGGGIELPFGGVKASGHGREKGFEALYGFTVLKTISIKHD

SEQ ID NO: 1891 - protein, 487 aa, Sinorhizobium meliloti 1021
MTFHAKFSGYADPALHAAGLYIGGKWQSGSGITVLDPSTGNLLAEVADASIEDAQRAVDAADAAAAGWRATPARQRSEILRRWYQLMTQHAEELATLIALENGKALADARGEVAYAAEFFRWYAEEATRIPGEFRHTPSGSHNILVDHEPIGIAVLITPWNFPAAMATRKIGPALAAGCTVILKPASETPLTAYAMARLGEEAGVPPGVVNVLTTSNPGGITNAMLADPRVRKLSFTGSTGVGRVLLAEAAKSVVSCSMELGGNAPFIVFDDADLEVALDGAMIAKMRNAGEACTAANRFYVQAGIHDAFVAGLTARMKSLKLGPGYDPETQCGPMITQNAVRKIDRLVSEALAAGARATTGGKPLTENGYFYPPTVLENVPVNASIAREEIFGPVAPVYKFESDDEAIRLANNTEYGLAAYIYSRDLKRAMKVGKRIETGMLGINRGLMSDPAAPFGGVKQSGLGREGGVTGILEFMEPKYFAVDY

SEQ ID NO: 1892 - protein, 294 aa, Glycine max
MAHANPMIFVVGILGNLVSFCCFLAPVPTFYRVCKKKTTEGFQSLPYVAALFTSMLWIFYAYIKTGEILLITINAFGCFIETVYLVIYITYCPKKARFFTFKMIFLFNVGVIFLVVLLTHVLAKERTARIELLGWICVVLSTSVFAAPLSIIKVVIRTKSVEFMPITLSLLLTVSAMMWMAYGILLRDIYVTLPNFVGITFGTIQIVLYLIYRKNKPVKDQKLPEHTDDVANDENVNTAVSGENRRANATGFVDIEIGEKTQVQEQADKTQDQQAANARDQTEHNNNSIITREG

SEQ ID NO: 1893 - protein, 507 aa, Petunia x hybrida
MVLSESNFLLCLISISIASVFFFLLKKTSRSYKLPPGPSGLPIVGNMFDLGDLPHIKMEGMRNQYGPVMWLKIGAINTLVIQSAQAATAFFKNHDANFLERVVVEVNRVCNYLQGSLALAPYGNYWRMLRRICSMELFVHSRINNSESIRRKSVDKMIQWIETHGKKEQGQGIEITRFVFLASFNMLGNLIMSKELAADPDSTTASEFFDAMMGQVEWSGTPNISDVFPLLRWLDIQGLRRKMKRDMGKGKEILSTFIKERIKEQENGRAKGTDFLDVLLAFEGKGKDEPAKLSEHEINIFILEMFLAGTETSSSTTEWALTELLRNPETMARVKAEIAEVVGPNKKFEESDIDKVPYMQAVVKETFRLHPPLPFLLPRKATQDTKFMGYDVPKGTQIFINAWAIGRDPECWHDPLDFIPERFIGSKIDFKGLNYELIPFGAGRRMCVGVPLGHRMVHFVLGTLLHEFNWELPHNMSSKSIDMTERLGTTVRKLEPLKVIPNKCKLS

SEQ ID NO: 1894 - protein, 499 aa, Escherichia coli
MTEPHVAVLSQVQQFLDRQHGLYIDGRPGPAQSEKRLAIFDPATGQEIASTADANEADVDNAVMSAWRAFVSRRWAGRLPAERERILLRFADLVEQHSEELAQLETLEQGKSIAISRAFEVGCTLNWMRYTAGLTTKIAGKTLDLSIPLPQGARYQAWTRKEPVGVVAGIVPWNFPLMIGMWKVMPALAAGCSIVIKPSETTPLTMLRVAELASEAGIPDGVFNVVTGSGAVCGAALTSHPHVAKISFTGSTATGKGIARTAADHLTRVTLELGGKNPAIVLKDADPQWVIEGLMTGSFLNQGQVCAASSRIYIEAPLFDTLVSGFEQAVKSLQVGPGMSPVAQINPLVSRAHCDKVCSFLDDAQAQQAELIRGSNGPAGEGYYVAPTLVVNPDAKLRLTREEVFGPVVNLVRVADGEEALQLANDTEYGLTASVWTQNLSQALEYSDRLQAGTVWVNSHTLIDANLPFGGMKQSGTGRDFGPDWLDGWCETKSVCVRY

SEQ ID NO: 1895 - protein, 510 aa, Petunia x hybrida
MVLDWCYFAWFSIFLVPFFFLVLSRKKSCSHRLPPGPPGWPIFGNLFDLGTLPHQTIAGMKLRYGPVVLLRIGSVKTIAILSAKVATEFFKNHDACFADRKIIDTMLVHNYNKSSLVLAPYGTYWRVLRRICTVEMFTNKRINETAHLRQKCIDSMLQWIDKEAKSMKKGSGIEVARFIFLASFNMMGNLMLSRDLVDPESKKASEFFTAMEGLMEWSGQPNISDIFPCLRWLDIQGLRQKAGRDMGKAIEVASTFVKERLKEHKEGEYKKDFLEVLLEFEGSGKDEPAKLSEHQINIFILEMFIAGSETSSSSVEWALAELLCNPEAMTRVKAEINEVVGSNRKFEESDIDNLHYMQAVVKETLRLHPPAPLLVPRRAIQDTSFMGYDISEDTQVFVNAWAIGRDPECWEDPWAFKPERFLNLSSKTTDFKGQNFEFIPFGAGRRMCAGLPLGNRMSHLLLGSLLHAFDWELPSNVTPKSMDMKERMGMTVRKLQPLQVVPIKNEHILY

SEQ ID NO: 1896 - protein, 205 aa, Arabidopsis thaliana
IQKIDDSTSRQVTFSKRRKGLIKKAKELAILCDAEVCLIIFSNTDKLYDFASSSVKSTIERFNTAKMEEQELMNPASEVKFWQREAETLRQELHSLQENYRQLTGVELNGLSVKELQNIESQLEMSLRGIRMKREQILTNEIKELTRKRNLVHHENLELSRKVQRIHQENVELYKKAYGTSNTNGLGHHELVDQFMNPMHRLGCS

SEQ ID NO: 1897 - protein, 203 aa, Methanosarcina acetivorans C2A
MQGLVLYMNRKDGAVFLVFLLAGVLLISGCVKNERAETPADEQSETSNTGKGDENMDIQIIKVFSSAFESNGTIPRKYTCNGENINPPLEFTDIPEGTESLVLIMDDPDAPMNPFTHWIVWNIEPVAKIEEDSIPGIEGINNFREIGYGGPCPPSGTHRFFFRVYALDRQLELKAGAGRKELESEMIGHIIAEGELMGKYGET

SEQ ID NO: 1898 - protein, 299 aa, Zea mays
CCFSFPTVLSSVTSDGFLQCLSDNIPVGLIYTQGSSNFTDVLVSSVRNPRLFTSATVRPLCIITPVDASHVQAAVRCGRASGVRLRVRSGGHDYEGLSYRSERPEVFGVVDLSNLRAITVSADDDERPVPPTAPSAWVDSGATLGELYYTVAKNNPELAFPAGICPTIGVGGHLSGGGIGMMMRRFGLSVDNVLDAKLVNASGDLVDRAAMGEDHFWAIRGGGGESFGVVVSWKVGLVKVPSTVTAFNIVKTVADQGAVDALTKWQDVAPGLPTDITIRVIIQGQRATFQSLYLGRGTE

SEQ ID NO: 1899 - protein, 334 aa, Thermus thermophilus HB27
MAYRICLIEGDGIGHEVIPAARRVLEATGLPLEFVEAEAGWETFERRGTSVPEETVEKILSCHATLFGAATSPTRKVPGFFGAIRYLRRRLDLYANVRPAKSRPVPGSRPGVDLVIVRENTEGLYVEQERRYLDVAIADAVISKKASERIGRAALRIAEGRPRKTLHIAHKANVLPLTQGLFLDTVKEVAKDFPLVNVQDIIVDNCAMQLVMRPERFDVIVTTNLLGDILSDLAAGLVGGLGLAPSGNIGDTTAVFEPVHGSAPDIAGKGIANPTAAILSAAMMLDYLGEKEAAKRVEKAVDLVLERGPRTPDLGGDATTEAFTEAVVEALKSL

SEQ ID NO: 1900 - protein, 104 aa, Zea mays
  misc_feature (2)..(2): Xaa can be any naturally occurring amino acid
  misc_feature (14)..(14): Xaa can be any naturally occurring amino acid
  misc_feature (98)..(98): Xaa can be any naturally occurring amino acid
AXDGCEKTTEGHTXKELEDMKKRLKEIEEEASALREMQAKVEKEMGAVQDSSGTSATQAEKEEVDARSIYVGNVDYACTPEEVQQHFQSCGTVNRVTXTDRQIG

SEQ ID NO: 1901 - protein, 109 aa, Oryza sativa (japonica cultivar-group); identical to SEQ ID NO: 366

SEQ ID NO: 1902 - protein, 230 aa, Triticum aestivum
  misc_feature (167)..(167): Xaa can be any naturally occurring amino acid
  misc_feature (182)..(182): Xaa can be any naturally occurring amino acid
MGERVKGTVKWFNVTKGFGFISPDDGGEDLFVHQSAIKSDGYRSLNENDAVEFEIITGDDGRTKASDVTAPGGGALSGGSRPGEGGGDRGGRGGYGGGGGGYGGGGGGYGGGGGGYGGGGGGYGGGGYGGGGGGGRGCYKCGEDGHISRDCPQGGGGGGGYGGGGYXGGGGGGRECYKCGEXGHISRDCPQGGGGGGYSVRVRARVRVSGIAFRAADRLSSEHNTLSMLQ

SEQ ID NO: 1903 - protein, 230 aa, Thermotoga maritima
MGSDKIHHHHHHMKIFLDTANLEEIKKGVEWGIVDGVTTNPTLISKEGAEFKQRVKEICDLVKGPVSAEVVSLDYEGMVREARELAQISEYVVIKIPMTPDGIKAVKTLSAEGIKTNVTLVFSPAQAILAAKAGATYVSPFVGRMDDLSNDGMRMLGEIVEIYNNYGFETEIIAASIRHPMHVVEAALMGVDIVTMPFAVLEKLFKHPMTDLGIERFMEDWKKYLENLKK

SEQ ID NO: 1904 - protein, 446 aa, Bacillus subtilis subsp. subtilis str. 168
MAYDMVIKGAKAVTPDGVIEADIVVQNGVIAEIGSDIEASGTEIIQADGKYVFPGVIDCHVHFNEPGREDWEGFETGSQMMAAGGCTTYFDMPLNCIPSTVTAEHLLAKAELGRQKSAVDFALWGGLVPGHIEDIRPMAEAGAIGFKAFLSKSGTDEFRSVDERTLLKGMAEIAAAGKILALHAESDAITSYLQMVLANKGKVDADAYAASRPEEAEVEAVYRTIQYAKVTGCPVHFVHISTAKAVRLIREAKQEGLDVSVETCPHYVLFSHDDLRQRGSVAKCAPPLRSRQSKETLIETLIAGDIDMVSSDHSPCRPSLKREDNMFLSWGGISGGQFTLLGMLELALEHQIPFETIAEWTAAAPAKRFGLQKKGRLEAGCDADFVLVSMEPYTVTRESMFAKHKKSIYEGHTFPCSISATYSKGRCVYNDGEKVTEIDGALVVPS

SEQ ID NO: 1905 - protein, 361 aa, Glycine max
MASQLLRRTFGSRILANPRAFSFSSAASTPIRATLFPGDGIGPEIAESVKQIFQAADVPIEWEEHYVGTEIDPRTQSFLTWESLESVRKNRVGLKGPMATPIGKGHRSLNLTLRKELNLYANVRPCYSLPGYKTRYDNVNLITIRENTEGEYSGLEHQVVRGVVESLKIITRQASLRVAEYAFHYAKAHGRERVSAIHKANIMQKTDGLFLKCCREVAEKYPEITYEEVVIDNCCMMLVKNPALFDVLVMPNLYGDIISDLCAGLIGGLGLTPSCNIGEGGIALAEAVHGSAPDIAGKNLANPTALLLSGVTMLRHLNLHDKAEQIQKAILNTIAEGKYRTADLGGSSKTTEFTKAIIDHL

SEQ ID NO: 1906 - protein, 381 aa, Haloarcula marismortui ATCC 43049
MSDDLKKGLEGVIVAESELSVIDGDAGKLVYRGYTIEDLAKGASYEEVLYLLWHGHLPNRDELSEFKQAMVDARGVDDDVISTVRQLAEADENPMAALRTAVSMLSAFDPAPEDAEPTDEMVNLETGRRITAKIPTIIAAFTRIRDGKEPVEPHDDLDHAANFLYMLNGEEPDDVLADVFDQALVLHADHGLNASTFSAITTASTLSDVHSAVTSAIGTLKGPLHGGANQDVMEMLKEVDDAESDPLDWVKNALDEGRRVSGFGHRVYNVKDPRAKILGERSKELGEAAGTLKWYEMSTTIEDYLMEEKGLAPNVDFYSASTYYQMGIPIDIYTPIFAMSRVGGWVAHVFEYIEDNRLIRPRARYVGKNTDETEFVPLDER

SEQ ID NO: 1907 - protein, 330 aa, Methanocaldococcus jannaschii
MLKESEDIEGIAIEGPWLEDDISLEEIIKKYYLKIGFQASHIGKAIKIWKHIEEKRKKGDEITVFFGYTSNIVSSGLREIIAYLVKHKKIDIIVTTAGGVEEDFIKCLKPFILGDWEVDGKMLREKGINRIGNIFVPNDRYIAFEEYMMEFFEEILNLQRETGKIITASEFCYKLGEFMDKKLKSKEKEKSILYWAYKNNIPIFCPAITDGSIGDMLYFFKKYNKDEELKIDVANDIVKLNDIAINSKETACIVLGGSLPKHSIINANLFREGTDYAIYVTTALPWDGSLSGAPPEEGVSWGKIGAKADYVEIWGDATIIFPLLVYCVMK

SEQ ID NO: 1908 - protein, 405 aa, Triticum aestivum
KTGCLLIKAVAVHLPPPGCGVDGVERPRAPPQPPAHHLFDETPLSSDPMAEASGDGSMEDRISALPDDLLIHVLSHLRSREAVQTCVLARRWRYLWRSVTCIDVSFEEFEDRAAANDLEREEMFKMFVNHLLILRERVDLKEFHLEYSLVVGVSRLSAKSDEANLWIRHALQYKAQTVKIGNHSEPLQLLPSVFTSTYLKRLHITNAQLILGFFDRLRKGCPALEYLFLSTCDIEDLDIFSDTLKVLILSDAIGFSFSFEHDAQVSISAPSLISLSVKECPSGARLPILKNMSSLETASVLLSEGDITTCDADGIRQFLGGLSGVRSLDFYYGDRQLEVKNNHGWCPTFNNLTNLTLDRWCMHADLYAMIVFLQNSPNLKKLTLKLNEPRYHNEVVSAVIGELEG

SEQ ID NO: 1909 - protein, 323 aa, Pyrococcus horikoshii OT3
MVKSVTDKIKFYEFEGGLSVFKKYGVPIREEDLEEIRKMDAILFGATTTPFDVPRYKSLIITLRKELDLYANLRIIPNFKLRKEIIIVRENSEGLYSGEGAYDSNKVVDFRIITRKGAERIAKFAVKLAKDRSTFLTFVHKANILESDRFFRKIVLDIARKEDVKVREEIVDSFTIKLVKDPWNLGIILSENMFGDILSDLATIHAGSIGIVPSGNYGEDIALFEPIHGSAPDIAGKGIANPIGAILSAAMMLDYLGLDGSIIWKAVGRYVRRGNLTPDMEGRATTLEVTNGIISEIYRLDEYEIDEVWRDEVRLGRILLEIS

SEQ ID NO: 1910 - protein, 107 aa, Hyacinthus orientalis
GDIISDLCAGLIGGLGLTPSCNIGEGGICLAEAVHGSAPDIAGKNLANPTALLLSSVMMLRHLQLNDKADRIQNAILKTIAEGKYRTGDLGGTSTTSEFTEALCDNL

SEQ ID NO: 1911 - protein, 361 aa, Aspergillus nidulans FGSC A4
MVQQMPPQGGSRKISFNVSDQYEIQDVIGEGAYGVVCSAIHKPSGQKVAIKKITPFDHSMFCLRTLREMKLLRYFNHENIISILDIQRPRNYESFNEVYLIQELMETDMHRVIRTQDLSDDHCQYFIYQTLRALKAMHSANVLHRDLKPSNLLLNANCDLKVCDFGLARSAASTDDNSGFMTEYVATRWYRAPEIMLTFKEYTKAIDVWSVGCILAEMLSGKPLFPGKDYHHQLTLILDVLGTPTMEDYYGIKSRRAREYIRSLPFKKKIPFKALFPKSNDLALDLLEKLLAFNPTKRITVEEALRHPYLEPYHDPDDEPTAPPIPEGFFDFDKNKDALSKEQLKSKYLAPIDSISYATIN

SEQ ID NO: 1912 - protein, 437 aa, Beta vulgaris subsp. vulgaris
SSNLDLRSELQELIPEQQERLKKIKKEFGSFQLGNINVDMVLGGMRGMTGLLWETSLLDPEEGIRFRGFSIPECQKLLPAASAGAEPLPEGLLWLLLTGKVPSKEQVDALSADLRKRASIPDHVYKTIDALPITAHPMTQFCTGVMALQTRSEFQKAYEKGIHKSKFWEPTYEDCLSLIAQVPVVAAYVYRRMYKNGQVIPLDDSLDYGGNFAHMLGFDSPQMLELMRLYVTIHSDHEGGNVSAHTGHLVGSPLSDPYLSFAAALNGLAGPLHGLANQEVLLWIKSVVDECGENISTEQLKDYVWKTLNSGKVVPGFGLGVLRKTDPRYTCQREFALKHLPDDPFFQLVSKLYEVVPPILLELGKVKNPWPNVDAHSGVLLNHYGLTEARYYTVLFGVSRSLGICSQLIWDRALGLPLERPKSVTMEWLEKFCKRRA

SEQ ID NO: 1913 - protein, 167 aa, Aspergillus nidulans FGSC A4
MPDASSELIDEIGIVKIFRCFSPDIETARICIKVPSTREGLIACRTLEMAGVRTLATTLFTFVQAALAAEVGCTYIAPYVNQLKVHFESGFVDPQKLLPLCVSAQNYYEAIGVRTQVLPASLTSTDEIFALAGAHHITIALSLLQQLSLPLYPRLCSTLNRRVQVPK

SEQ ID NO: 1914 - protein, 398 aa, Ustilago maydis 521
MIEDIVDTLSVPLLGACASHVSRPTLMPSLASRSGPPAASSSDPKTSSSSTEKVAKSVGSASPLRSSPNRPYALSDFEVVETLGTGTFGRVLLVRLKDRDVADRSAYFALKVLAKTDVIKLKQVSHINSERCILTKVDHPFLVNMIASFQDSKNCYMLMEYVVGGEIFSYLRRAGHFSADVARFYISTIVLAIEYLHSNKVVYRDLKPENLLIDSNGYTKITDFGFAKEVEDRTWTLCGTPEYLAPEIIQCSGHGSAVDWWSLGILLFEMLAGYPPFYDPNPILIYEKILAGNLVFPEEIDPLSRDLISSLLTADRSRRLGNLRGGANDVKNHPWFHGVDWKALQEGRILPPIVPYLGRPGDTSNFSKYEPARPSAMPGLYGADSGHHDLYADLFPDF

SEQ ID NO: 1915 - protein, 293 aa, Enterococcus faecium
MKGMERTMTIQWFPGHMAKARREVSEKMKYVDIVFELVDARLPLSSRNPMLDQIIQQKPRLVLLNKADLADPQQTKLWQEYFRKQGHLALAITAQESKGIKGLVPAAKEALKEKRARDAARGIKPRAIRAMVLGIPNVGKSTLMNRLVGKKIAQTGNKPGVTKGQQWLRLGNELELLDTPGILWPKFEDEEIGKKLALTGAIKDQLVHLDDLAIYGLDFFARYYSGRISDRYGLSIEQEEKLAPELLMDITAKRGYKEDYDRGSELVVHDIRQGKLGRYTLDRCEEMEQKSDD

SEQ ID NO: 1916 - protein, 208 aa, Helicosporidium sp. ex Simulium jonesii
MQCASLFRYKTPVIQANSVSCNAPPSLVHMPRPRPASSRVRLAPLSANAKPLETRTVGNSTNIRWHKASVAREDKERLLGQRGCVLWFTGLSASGKSTVATETERQLHERGHLTLLLDGDNVRHGLNCNLGFSAEDRTENIRRVGEVAKLVAESGVMALTSFISPYREDRDAVRERVGSGSFLEVFLAVPIELCEERDPKGLYKKARC

SEQ ID NO: 1917 - protein, 362 aa, Zygosaccharomyces rouxii
MSKNIVVLPGDHAGQEIAQEAIKVLEAISEVSPEAKFNFQHHLIGGAAIDATGSPLPDDALAAAKKADAVLLGAVGGPKWGTGSVRPEQGLLKIRKELQLYANLRPCNFASESLLDLSPLKPQHAKGTDFVVVRELVGGIYFGERKEDEGDGVAWDSEKYTKPEVQRLTRMAAFLALQHNPPLPIWSLDKANVLASSRLWRKTVEETIKNEFPQLKLNHQLIDSAAMILVKSPTQLNGIVLTSNLFGDIISDEASVIPGSLGLLPSASLASLPDTNEAFGLYEPCHGSAPDLPKGKVNPIAMILSAAMMLKLSLNLSKEGEAVEKAVKQVLDSGVRTGDLGGSNSTSEVGDAIAKAVKEILA

SEQ ID NO: 1918 - protein, 161 aa, Zea mays
MDGRMFGLETPLMVALQHLLDVPDGDAGAGGDKAGGGGPTRTYVRDARAMAVTPADVKELPGAYAFVVDMPGLGTGDIKVQVEDERVLVISGERRREEREDAKYLRMERRMGKFMRKFVLPDNADMDKISAVCRDGVLTVTVEKLPPPEPKKPKTIEVKVA

SEQ ID NO: 1919 - protein, 345 aa, Triticum aestivum
  misc_feature (324)..(324): Xaa can be any naturally occurring amino acid
  misc_feature (332)..(332): Xaa can be any naturally occurring amino acid
PLPASFPPPTAYSSKSRHHPTNATSPAHRIAHALPLPSVLRSHFTLADGPASTAAGSPDEIAKLFPCLYGQPSAAVVQSAEPVETKPLKIGVVLSGGQAPGGHNVICGIFDYLQERAKGSTMYGFKGGPAGVMKGKYVELTTDFVYPYRNQGGFDMICSGRDKIETPEQFQQAEDTVNRLDLDGLVVIGGDDSNTNACLLGEYFRGRNLKTRVIGCPKTIDGDLKCKEVPTSFGFDTACKIYSEMIGNVMTDARSTGKYYHFVRLMGRAASHITLECALQTHPNVALIGEEVAEKKETLKNVTDYITDVVCKRAELGYNYGSCXLYPEALIXFIPEIQKLIAELN

SEQ ID NO: 1920 - protein, 364 aa, Glycine max
MGKGGMSIDEHGEGKEENMAAWLVGMNTLKIQPFKLPTLGPHDVRVRMKAVGICGSDVHYLKTLRCAHFIVKEPMVIGHECAGIIEEVGSQVKSLVPGDRVAIEPGISCWHCNHCKHGRYNLCDDMKFFATPPVHGSLANQIVHPADLCFKLPDNVSLEEGAMCEPLSVGVHACRRANIGPETYVLIMGAGPIGLVTMLAARAFGAPKTVIVDVDDHRLSVAKSLGADDIVKVSTNIQDVAEEVVQIQKVMGAGIDVTFDCAGFDKTMSTALSATQPGGKVCLVGMGHSEMTVPLTPAAAREVDVVGVFRYMNTWPLCLEFLRSGKIDVKPLITHRFGFSQKEVEEAFETSARGGNAIKVMFNL

SEQ ID NO: 1921 - protein, 401 aa, Thermosynechococcus elongatus BP-1
MAVPAVEFPWEEQPMSAFATPITPAPIPDNISLTELIDKYFTAYNSARLREICQLLSQRVFKPEVTVGLSLSGAMTPTGLGISALAPLVRAGFVDYIISTGANLYHDIHYALGMDLYAAHPFVDDVQLRKESKIRIYDIIFDYDVLLETDAFLRQVLRSETFQRRMGTAEFHYHLGHYVRELEVQRGQPHSCLLATAYECGVPIYTSSPGDSSIGMNVAAIALEGSKLIIDPAIDVNETAAIAYFAREAAGGKGKSAALIIGGGSPKNFLLQTQPQIHEVLGLEERGHDYFIQITDARPDTGGLSGAVPSEAVSWGKVDPQGLRDTVVCYTDSTIALPILTAYCLNRCQPRPLKRLYDRRGEMVERLQQLYLQAQLQHKVKELPTEAPVATYPCGTPIRRP

SEQ ID NO: 1922 - protein, 496 aa, Crocosphaera watsonii WH 8501
MVSTRTKKDVPIWQPLKVIARSFSPYWIACIPLAAIITIVWNKAVVAESVELITAEGNSEAIAQLQGTLNAIWVLIAAILVIFMNAGFGMLETGFCRQKNAVNILSKNLIVFALATLAYWAIGYSLMFGGPENPFIGFGGWFLSGEPATYGLDPFPAGLPISVAFLFQAAFAGTAATIVSGAVAERIKFTDFIIFSLLLVGISYPITGHWVWTGNGWLGSIGFSDFAGSTVVHSVGGWAALMGAAILGPRMGKYVEGRPQAIPGHNMSIATLGCLILWIGWFGFNPGSQLAADEAVPYIAVTTNLAAAAGGVAATFVAWFKDGKPDLSMIINGILAGLVGITAGCDGVSYFGAVIIGAVAGVIVVYSVSMIDSLLKIDDPVGAVSVHLVNGIWGTLAVGLFNTESGLFYGGGFAQLGSQIVGIVAIGAFTAIFSGIVWTVLKSTMGIRVSPEEELEGLDVGEHGMEAYAGFLKETDTFSGSGSSTADEDVTTGAGI

SEQ ID NO: 1923 - protein, 10820 aa, Neurospora crassa
MIPRDQRRRSPERERRRRADRRQSREQLAAAALAAAAVGQTAAKTAGPSSTHRSRANSSTSSSAVTSSDEDSAPKNTGWGFRSFFSLASSKKVRKRRSFRKKNYSSSSIDSNLAYGGYQSRSSLESQRGARRRSGPQRKISQTYSQHSHHDKEYQQHNQDQYRDHPQYEQPQHEYQRPEYVPQDQYAHSDQTTPRPGQPTQHPHAQPEPYYRHQHQQYHQQQPHAYQHPAQPYHGQPEYDPELFTPDGRPNLARTTTDEEIIELGRKISDLARASNLRDLERAGKQRPSQLVGAATAISNFRRQNPRRNGRRGLAPSKSSKRDEQSDDDQGWDTASDSDSDSDSGDNAEEASASDSDLAYGSSPQYSDEKLSSSPAPAPAPPPPTISPQKPYIRNKAIDPSKFGPVNSLHGLVTPLNGFRPTEDVLPPRQSKPWLSRFENDPLPDYPTPTDELDTPTQMHYPIATPDLRRFDAVTSPTLVSGSPLITSRPVTVAIQAPKPRVPVSTRALEEHPMPRQRSADGRLMTADSALAKSMGNAAGKHEVIRDDTPPSNYRQHRSRAQSNVSAHPSHTSHHSHALSHTSRTSHTSQVPVHVQVPLPTTHDLEFDDWHDFEDRNTRLASDVPQFTDPAAAGVAATLIGTALFQDRYRRDDEEDRNLDPNHVLAEYKQRVQQEEEQRRKAEEAEKERLEKERQEREARAAAAIKREREAREAQEAAEREAREKKEAEERAAAVALELAAQRQREEREAREALEKMEREAEERAAAAAAAQQELEALEKARREAHEREVQEAIEKVRREAQEREVQEAIDKARREALERDAAAAERERQEREHLEKVRREAEDLAIAARRELETRETALEAVAKEARRLRDEADYREQYERRVREAREMQYKEERRMYDARYRADRENMIIDVEPRRRSTSRQTRDESPEEKRSNAGKETEREEHHRPKREPVTIINERDVPKDEPKPKVEEPTRSVSEKKRESMGDTLDPKPKKPSKEERRAKRAETLRLLAEMQKELELEKERARKLAELEAAEQRQEKPKDEEPRKSSQPAVLEPSKSPKDQVSHDSKAAPAPGTSLSKSPSGVIDPFQFQVPDDAFATPVLATPARPLTPQVYTVPEPDFSPPKRRQLTRALTDAELEIRERVTRRDSFEIQQRQEEIRRSRNASEQPTTKDADKATIPETDKETLIAEEPERERSRSHNRAGSRVRESEPLRDATEEPERARSWSRQYSYVREAEPTPDPQTEANKWYRDYVSSRREERLRSSSPARSVVDKYDDSVFGPPTPVIVTAEPTIITAEPSWATADPADDGKPKKGKYAEPDADVRIDHVILPRDLHRFLRPAEDHSSLHAPTGQPMFSSRDPSCERERPLLNLVLPTPAPTPTPERERRERARQAVRESEVEHEESRLAPVAVDESKKPNYILNARGEIEIIAPTPKDEDTESVKSDGWVEPVADTGLTHVVVDRSRQAAVEAIKRALQPKKERKASIAWGTLAGAVLQKVAEDRKAAAEQKAEVPAAEEKSLAPEVEEKVEVLPAPVVEEKQPEEQKPREAEPETKPADVAAPTKTEVQPDVELPRQSPHPDPEPHLEPHHEATPVPAITIDEPEGPKATEEPKYEEAKEELKEEEEQSALPEGESHEEKQNEATRQILDESASSPIKPKRKLPKSLAEPSIFSPYRPTFSDNFADVVCGEHPNPEPHADTYTWRREAMATQSSIGDEWESILRKAEIGEDETTTNPTGTFNPDNREPPDRLGKEFSFEVVERENSQTNPSDENARESEKASTEQNGVADRRPSNEFIEFLKNQTNNSTSDRKHDHHIIATTEMKGNGEDEYFLGNAGTHGAGAGSAEDSEAATASDSKDAEAQSLPRPNATQASMDSTPVAEYKKEEDEEEKLYGSNAGSDSAPEPTQLQHTDSRFIDPEVLVHRPFTPAIDPQYGDLLPLPPYPTLTGPGYRYLADLPSPLDFDLEQLPALPESRPSTPPPTSSSSGTAFKAAVAAMMGTQSLIRRQRGHTRSRSALDGTAPVRVPSQTAVPIQFRLMGKKRAGSVHSLPPSEAWGQSPASRPSSAHGDAAAASEGKFPVRSSRPRPTSWEGSMREIKPLYLVERNAATATAASVLAPVVDTEEALPPPESFELPEDDDLDLLPALPDSAPESDAGSPVVAPQMESLEKDVPSEAVLPALEDTFTPETVRLPVDEDLDLLPALPESDAGSPIVTPVNLSTDLPVDEDLKHAEIPSPASTEKALPAPETVELPVDKDLDLLPALPESPTIESAVPVSLPAVAPEVVEEVPAAEIPQVVEAPKEFEIPAPETVELPVDEDLDLLPALPESGLSSPTLREPASPVSVGEDDALSTPAEDVLPVPRSVNLPEDIKLPADEELDLLPALPDSVASSPTTDTVPVSLPISASDVAKDTEEMPKAVIGVPTTVAPEVLAPEAVRLPVDEDLDLLPALPDSLATSPTTEIMPSLPFVEEVVEETSKVVEREVSVPENIKLPVDEDLDLLPALPDSVATSPTTETTPSLPILASEEATHAPKEIEVAPETITLPADEDLDLLPALPASGNTSPERSTSPVLLEKAASPVIIPEPETVALPVDEDLDLLPALPESGPASPTKEHASLATSPVVAPATEKEVDTEVELVSEVSRGLEVPEPETISLPVDEDLDLLPALPESGPASPTKEHASLATSPVAAPTLLEEIEAEVELVPAVDDEIVKELVSMPKPKPETVSLPVDEDLDLLPALPESGPASPALEHVARSASPAVPVLEKETIPEARSEGVREIIPEPENVALPVDQDLDLLPALPESGPASPTKEHASLATSPVIEAVVEKEPVVEEVPEVIPKLLPLPVDQDLDLLPALPESSPASPTKEHASLAASPIIEAVVEKEPFVEVVPDYLPLPDNEDLDLLPALPESAPVSPIKEHASLAPSPITEVVVEKEPVVEVVPELLPLPTDQDLDLLPALPESAPVSPAKEFAFPVSSPTEIPQAVPDVVPVDISKTVPEVVPELLPLPTDQDLDLLPALPESGPSSPVQEEFAAPVAQPTDISVGTEVEHPSKDTEDVLSITIPEPESVPLPAESDDGLWALPSLPQSRAGSGYASPVTVDIPTEEVSSPVKATEETSELPVSINPETVRLPSDDGLWALPSLPVSHEGSGYASPGAAMPTLGVEPPMEDLKEYFPDHYDQEVVDEVSYKQPLKIETDLPLDSLPQLPADEDLDLLPALPDSRGSSPDLAVSLPVEEYQEVPQAEESEKQLDLSELPALPVDEDLELLPGLPESRNESPEPQVETVPAVIPEQAEEEKEKEKEQEQDLSKLPPLPADEDLDVLPVLPESRNESPEPEVSLPVNTPEQADLSKLPALPVDEDLDILPALPESRNDSPEPQPSLPKVISPEVLPLPTDEDLDLLPELPESRRSTPDQETSLPVAVPQSPIAKEAVKDITEVPVAEEDLSYLPALPVDEDLELLPALPDSPAAGNFPEEEETQTTWQPEEFTQPAWEETQPTQMSDISEEDFPVPAAVKGDEVSRDLADLPALPESRSGTPLSDLPALPESRSSSRSEDMETAPSLEDPSELPPLPESREDSPEPKSPLPDLGAQPAKESLAKQIAPSQPWNESETQDEPLPASNELIVGHVRRDSSEAAHPSDIYEKPSSHNQAKSPMLIGNNDPNEIDYKLAETIYEDMCDEDDASTVAASDAPSFLSGANAEQKEQIAKALAGDSEATSSLSPESSFRVLQYLKKRDAAMKQGQTYEEPEEVVPGPSSQYEDEEEQVPQEIEDALESIEKQSKKAKGVSFESSDTPTEKRDVPEDVPADHTTSDQSTPRQELRIGIPGPSSRVANLEAVNDEVENIPDVEAQKDELSKTSTDKDKHTESPSNQESSGEPQPANITQEDSILGGGLVAEPERQRPMRVASPENQWGTLGDLDDLDDEDDDDVSEYSPGGTNLKRHSLTRLPTFPGVTAFLGRNFRSNSAPSPSDVPVQDERNYYSSDEREMLGEEQQQQQEELSGDELEKRLERVKMEEEEEVEKVEGADESQTGPEKLAETEPEPTLEGVKGEPSTTEKKGKKKKQKKKRNKGKGKADVEPEAPLPTTQADLETTLAPETEEPKELELEAEPASKPKKSKKKKNKKNKSTAASMLKGPTISDTAKPTDGPGVDRHSTWPMVKSDAVPSEKKTAPGSESTEVPPPQGSTANENTTLPEEIPLPRSRDLSPCASEEPTETATIEREPEPEIPATKHDEATTVDERQTATNELDGNGSVTPTPQQHISDGHQGKPQGDAEQGVQTAPPESSNTTEPLTSGAEQPISPQADTPMDMQPAEDPVPVEAALEGSTQQGESQTDDKGKPEEEPKIKEQLATVSPDLVSPTSDTFTPRLLRRSYPKKEKGKAGKMSNPASPTMGAGWGIASPPAMSLDKALEAADPFADGEFERRMRTVSANREAERSAKIAEKEKLERALFLQRRSTFDVGDSPTSSHTSVVGSTHSSGAAETGSNAEERPIYALKRASTDRAEKKKKLAAEKKRSKKSDWPDAWPEEFDEEATMPQEPGHPSMWPELHGRDLHGRASPSPIRGRSGYRTPTPLGQHIEVGRASGQTGDDSANHVGVLQESDRRLSAGGNSVGPDSSRSRYNNMSDPFTIGGGPKDIPPPEPIPEVPSKPIPDVGSDTATPTSEANKELGGTVRPSGKKGRKRRNSSLAIATDKEEDVDDNNSEAEQGDLDTQPSGSAPGKKTRRNRRGRKGKDKSTPSSPSVDTEGTEDQEASDGDEEPSSSGSSQDANAGAAGDASGKKRKNRKKGSQASSGLMSPPLEPNAEVAQLHAQLAQLTDLVQQLVVEKTRNSSADQGRSRRNSSVTKGNPKIRRTSSGGGGGDGEAHYDSDGNSIHDEDEELDDDDDDDAETGAADETTKAKRFMGVPYRRGSKSKSDKGEKGDKAKDKHQQQVGEDPTSELEHAVLKTTPREEDEQTGNSPQIRDVTAADNERTQQELFAIDNVNVNVIKNESRDSEAGVEFALRQQVVIERQGDEHANEQSGAEPEEQLQQGRGGGRSGRGQTPGPVQVPAVSQQAGQEQGAPSDERLVEDEGRAQSGTDSRDGVRGLGAGGRGDFASAEAGHDQSRHDGHEEFGQAGLQEAEGVVGGWGDGSSQTRNGDGCGDGVDQSGDCVDHATEGVVGHDEEGVLGHDSYHVQATSELGSAVRDRVDFRIQQAEHDEESRVGNDPGSVEATVEHGLDGRALGRTQDEHGLGVQELQHDGQVPGPVEDTGADQPGTEHRSGLAGDGQHGNQSARESSAETRSVAGSAPAAEAGNDEASVDGHEPSRLTTTAGHGGAPRIRTGSGEGEAQDARPADVRYDVKVSLDINGHGYADSGFGVQQRRTGRAGAVETGIWVGVWIKLDSSPPFAALVGKEQDQQDDEDARAGRIHKEGQAPGVGGDAAGDEQTGFVRVVSGNGHQQAQQDGSDDLRDGHVQAQEEYKPRDPSPGHGLETGNWIVNAATTAVAVPGETGSQPGAQVENGQLQQGDDAGADQGQERQDSYAQPPRAGHSDADAHGIVGERALERVEAVELEQQPVPRPTDARGEAEQVADENGQSHVCAKHPVGQQDQCLPGETGKLTPGDNDQCQLDGADGRDGRALASQPSLESDDDYHHDDDRQEGKVKDVLQERGHPGHGEQPSILEQSETQRRALVPDAAASDTTAARDAEAGTSQLWTGRFPTGISTGNIIGSGVALPASDVIGCPSSSSAGGIGVSAGNVVRVPERGDTVVRETTKGSGDGEYDESAQTGDVSENKDGDEYRESQGLEGRVGDDGDGRGEEGEEGDEHERQGELESGAEGHEGGGGHGNVYEEGQEGEGQGGLEDALSETDGSENAVGGLGVKDGVEEVTVSPEEVELPASPEVNPEEEVELPCSSPSILLLSDAAGEQLDEAVIKPIERDFDQQLEKDNSLNPQEIGLPPSPPPAMSEIEPIEHIIISQQFQTDPSSHAVNPEDVQLPASPSPSAEVAESENEPIEQGFNQRSPRHAMNPEQEVWSTLSDAGDLTESEPAVEQAKQTTVEPLSPATTTADRDQDQNPDKVWIPPLSPHVPNRMSGISLVLIHMLQFIGQQSHIPLFTPEAAQHEEPGDLVLPTSEAATTNLPSSSSPLLPCRSSRSSMSGASEELPSETTSPNLVSTTTAATIATTTTTIAATATTSSAAAVNTASSQATEASTTTDEHAPSQRAAARSSFSSSSSSLRMTEPEEVELPPSPSSPAPPHHTAPRPEEVELPASPVTTVTVNVNLNEAHHHHQFAQDIDVDNTKPKGDQHVEDDPKSDSELSLGQHADQRGQHPISEIRPTDIRLPLSPKVTPEGVVELPASPDSESTPIIIDEQLQLQPLHSSHGDDEQQLSSQSPPPKVTTTADTHAQPSSSLESPAVLMAVPSSLDMPPPPEDIELPPSPTDGVEHREEKPIVAEIHERVKSPVSGHQDVEIPTSREHSPAHSPAVEVSKSEVPTAAAEPEVSEVEDLASQSKQKTLAEELEEFDGSGSPSPEVDNRDAELVSFTGLTKDAELSSAHSSPMDAPTDVELPASPSPKPETDDQDKDLPITTESHEAIANVTIPTWTSPTVSPKVKPENIELPPSPQRPQLLPSPNIVPGYQFSPEPISDDERLPLSPDDEFEDDDDDDGSPVDVEQYERSFSDDPQEEGFASSPDEATVDHVEVQHSPPSQGSPAFASSSPRISPAQVELPASPVESPNFAPASSSPSPKSTPEDAVLSPALEAAMEFTPSSPVERSVPSTKDTTMFEERGVSSASASAPAPAPEEENVQFAPAPSSEVQHPASPKISSEDVGLPKSLLPEAEHEEMELPITAAAAQLPEDVELPMSPAETEPKIHELPITKEIPTAHELPTSTLPKISPEEVELPMSPEVEVPTPAHEVIQSLGDQSDNIHKVSSSPKIAPADIELPTSPENNVLDSPKTLLPGDSSLPESHLTEAQVEKDMDLSTAAEQDDQIVDEQSDNDLEVSTSHKIVPEEVELPRSPSSPVPVEGLDVNEIQHLHSSQIIPPHVQRADSTWGEAELEVELPSSPLTEIAHKEDELPASPVKEAATEEVEVPASPVKEAASKDIEVQKSPSPAAELDVTEIQHLHSSQIIPPHVQRAVSPAVIHEEVQSPTLPDVVPEEVELPASPVKEAALEDIEALRSPSPAAELDVTEIQHLHSSQILPPHIERAVSSNTVPEDVKAPASPSAETAPKEDVLPRSPSPGAELDVTEIQHLHSSQILPPHIQRADSTWGEVEPEEVELPKPPVEEIVHEEVHVPASFKVVSGEVENPASSPSSPKIAAEEMDIPRSPSPVDNLDVTELQHQHSTQIIPPHTQRSVLPTAQTQAVPEEIQLPASPLEQFTPEEVELPRSSSPVEAKLDIVEMQHEHSAQILPLYVQRADSTWGEVDPEDVDLPTGPLKEIMPAEAELPGSPSPVEDELDGAKLQAAHEEVELQASEPTSPKITPEEIEVPRSPSPFDESKITELQHLHSAQIIPRNIHYATSSSGSPKIIPEEVELPASPVEEVDVDELQRFHSSQIISPHIERSASPTIEEVVPEEVELPVSPVEQVDIEQLQHLHSRQIIPPHIQHPASPSPNAELLASPKVTPEEVELPASPELVPQDIELPASPIDEAEQAELPILTKESEASVDQQIDDLEEEEDARSAALELPSSPEVKHEVQPEEMELPLSPVLKPEEVDLPASPEVVPEEVELPVSPVDDLADVQHLPQPDDVPEEAVQENVNLEIPSSPVIAPEEVELPLSPKTAPEEVDVPASPVVEVEEQPATVSEPSERSINLEADIAPQEEIEPPFSPVAKPEDIQLPASPEVIPEDVELPLSPIVELEHQLPIEPVNFELPSSPKLKPEDLELPSSPEIIPEDVELPASPVVELADEQLPVEPEQSAQAIEVSEEDTKLPSTPIVKPEDLELPASPEVLAQDVELPPSPVTLSEDVELPPSPMVDLEHEQLSVEPVDLSDVQEQQVEEQLDKHTAPESSPVLLPKEVELPTSPATKSEQEPIEPVRQSFDSDLYYDAVDSKGKQPATDAEELTQQGDAAKTDSAQKWEMVDNVDDVDDLDSIDGADSEISENGLLTEAPTSKQPNQPKPTRKREEVAAAIERSEDDAPIIPRDPSSTTTTTGDGHHADILSREAEDNVDLRRSAGGSPVPTSTSIAAATAAAGAAALAAATVNELLTTTTKNDEPELSETVEVHPAVKGAINRGFDEYDYATALSPTTVGLGLIEDAPMDLYPTDGPSPKLLSASTFPLEEAGDDDGDYFNNVELPEGAIFEELPSEAEEPAHEHASHFTHDPPSEPEEHEVKKPRESIEETQGFETLFAPRTPMPYASTRETLVKESPKPTTPSPSAEQTRQPPKQAEPVRHKRIRSTEPARLSNEALAASLSPRAKSSSVRNSWPAFTTTGKAKALAASFLESSSVNRGSSPVTPRFPPSASSMHQQQPPVSVLLKEQTQRQSRELAANYLETFADDRKVRSKSRPRQPSFFGGHTAPNAANRVVPVPVDLDSLGETIVPEKEEPARPPSVSSVDSMGSPTTTHGQAQDQSMALEMAVSYLDDEGEDVGAVPMVVTPGVEMEITPSPESSPGLQPEEEEITREREAEVKVAQEPEPEPEPESEPAAEDDEHDASPEWGRGMSLPSVEIQPATPRAVPEEEEEEVESLFDIPVQHAHAPHEVETLSTVMEESEPTDEEEEPTSALAHTHEAPVVDKSEHDERPLSPEQLPEEYHDTPSVEIDVDELQRLHSRQVIPPNLQRQVPSSPKIAPEEIELPSSPELHETSRDTPADIDTAELQHSGQILPPNLQRYIAELQRLYPSQIVPPDLQRQVPSSPEVKLEEVELPSSPELHEASQDTPGDIHITELQQLHSRQIIPPKLQHPASSPPQIKPEEVELPASPALREEFQDTPADINITELQQLHSRQILPPNLHRHIAELQRLHSRQILPPNLERHIAELQRLHSGQIVPPNLQRQASPSPPPQVKPEEVELPSSPKIPEEPQDTPADINVVELQQLHSGQILPPNLQRYIAELQQLHSRQILPPSPQRQASPLPPPQIKPEEVELPSSPTLKPEDVELPSSPVEETIPVVATGLVAAGLALVSEVSKDNRDHSVEEEEEEENDSAPAPLQPVEDHNSRHVNDEFEDFYRPATPKVYPEEIELPASPEIIKPQDIELPVSPRVLTGEVELPAWPLNEPEDVQVVSDSKSEADEQDMTTPIVESHVAKPEEIELPSSPAIVPEDIDLPSSPRMVPEEVELLSSPANELEDAELSSDSDSEADEDSTPVVEAHATKPEEVELPSSPAIEARNFQLPSSSVEPENAELASDSDSESDEDSTPIVEAHVTKPEEAELPFSPQLVPEHIELPSSPVNEPEDAGFASDSDSSSEADATKLEEIKLPSSPAMVPEEIELPASPTVQPEQIEVPSTPEPEHEHEFHSEPEQETTIDPLLDSEAEYEDEEDDDYDPLADLLPSPDMSPAQHHERYERELPHPHPLMMHPVDYSAPQQHGYEESEEVHTPVYTEPVEFWHSPELRYHCSPELRSADHQEFASFPEVNPEDVQLPASPDYGAEEEEEEEDGGLSRDAPADDDEWESESGSESENYDRDDEHQVHQAQSVAIVAGTVAVLGGAALVANSLKKEERAEEQIDSENDEEREETESEDDEEKDRSEDEDDQVKPVTITRSDDKRGDSEDEESDGEPGERDGRSGDDLEDEEAGEEDVEDVHGGDNEGLPEPSLNRQDSETVPKAIREGAPMPWAMKSNRREDSSSPPVVEQRRFSFPDDIAEEEAFTVSRSNTAIEGGGDTNHGEGPAGSHATSDQSHQHQQTPSAPMSTISDYAHSYNSLPTLQEEDWATDDDRNRHDKDGDSPVNKANITGLFRYGTPIMDPNRDSVLTVAARGSPQMSRYAVFNEQYHQQQLERQAQIQEEDLRERGVDLRDFANSPSAGSDRTETGPSSPQRTTETPKVQEPVPESSEDNVEVVKEQHSSEKARKETPQDKPEQHIPKTLPGLGVALRPTGALRSVSDISKQLQSALTGQSPSPVARPIPSNTGVARLRTPEPLSATNNNNNLSLRPDSPGSSSISISSTSRSHTSTPPLRRMDKRATGNLRSLSSGSQQDAAAKSAFLGTLAEGEGGAPADAEGPGSRSSIGPVSPTTPSRAQPPRPRSDTSGSSPTAAPAAAPHQSQAPATPSPPRPNTSRATSANSVIPGAAAPALALGTSPVAHGGDDNTNNNNLVDKDKSKDKQQQQQQHKQAVATPRALSVTSATPVANEGRTRSKGSMDVPDVYDGLGEGRLGSPRSPARPPSLRKRHSAQLIDLEARLAQLMAENAALQKAKNDAEAELSQRNADLASILADKNVEIENLQREIQETQETCNRLEETYEGLKTSTSAIAVKHNETVRALEEQVRKAAEELAAAQGNHEQEYTKAIAEKDAQIAHLRAQLNAQTAQIRELQEQIESQQIARSPEPTATDDFLDLHDVDYFDQRLSQLCAHVQQWVLRFSKFSDMRHCRLTSEINDEKLIDRLDNAVLDGSDVDVYLADRVRRRDVLMSMTMTMIYEFVFTRFLFGMDRDQRQRLKYLEKQLSETGPVHAVRQWRAVTLTLLSQRRNYKAQRDRDTEAVVQAILDALDKILPPPSDKEKVILDQLRRVVREAVKLSIEMRTQRAEYIMLPPLQPEYDESGELVETVSFNAALMNERSGDVDVPSAEELERQRATVRVVLFPLVIRKGDDWGRGDDEVVVCPAQVLVQRPRKQRSAAGGRVVSGQKAREPVAQGMKGGDEMMGGMGSQV

SEQ ID NO: 1924 - protein, 459 aa, Zea mays
MMEAEKNGNILMQKYEVGKLLGQGTFAKVYHARNIETSQSVAIKVIDKDKIFKVGLMEQIKREISVMKLVRHPNIVQLYEVMATKSKIYFVLEYVKGGELFNKIAKGKLREDASRKYFQQLVSAVDFCHSRGVYHRDLKPENLLVDENGNLKISDFGLSALAESRRQDGLLHTTCGTPAYVAPEVISRKGYDGAKVDTWSCGVILFVLMAGYLPFQDSNLMEMYRKIGKADFKCPPWFPSDVRKLVSRILDPNPRTRMPITKIVECFWFKKGIDNKLIRKNIEMKGKVSALTDVNVVFSSTGIGSNNNKLVDVEQDVAKITNLNAFDIISLSEGFNLSGLFEESEKRKEARFTSSQSASTIISKLEDAATCSKMTIKKKEGGVLKMEGANEGRKGVLSIDAEIFEVTPAFHLVEIKKNNGDTLEYENLFKQDMKPALKDIVWAWQGESKDQQAKDHNQS

SEQ ID NO: 1925 - protein, 441 aa, Brassica napus
MVGAKPIENGSDGGASTGLLHGRYELGRLLGHGTFAKVYHARNVTTGKSVAMKVVGKEKVVKVGMVDQIKREISVMRMVKHPNIVELHEVMASKTKIYFAMELVRGGELFAKVAKGRLREDVARVYFQQLISAVDFCHSRGVYHRDLKPENLLLDEEGNLKVTDFGLSAFTEHLKQDGLLHTTCGTPAYVAPEVILKKGYDGAKADLWSCGVILFVLLAGYLPFQDDNLVNMYRKIYRGDFKCPGWLSSDARRLVTKLLDPNPNTRITIDKVMDSHWFKKSSTRSRNEPVAATPEAEEDVDVSVHKSKEETETLNAFHIIALSEGFDLSPLFEEKKKEEKMEMRFATSRPASSVISSLEEAAKVGNKFDVRKSECRVRIEGKQNGRKGKLAVEAEIFAVAPSFVVVEVKKDHGDTLEYNNFCSTALRPALKDIFWTSTTPA

SEQ ID NO: 1926 - protein, 131 aa, Glycine max
  misc_feature (35)..(35): Xaa can be any naturally occurring amino acid
  misc_feature (45)..(45): Xaa can be any naturally occurring amino acid
ARNSARAHCGHLYTPITKYAYHYQLLFARGFPQNXSRLTDTGGPXVARSTARAVARDAAGANCLAPSSIAALHVHALANGNQTIAADPDTIIPKMEVTPLTMPISSSHDPLHGLVIDLKPAHHIMLLGMMT

SEQ ID NO: 1927 - protein, 56 aa, Triticum aestivum
PTTPNKNHTFDSVDASASLIYPMQCSALRKNGFVLIKGRPCKIVDMSTSKTGKHGH

SEQ ID NO: 1928 - protein, 235 aa, Zea mays
  misc_feature (185)..(185): Xaa can be any naturally occurring amino acid
MARGREGEVRNLVLGKYELGRMLGQGSFAKVYYGRDLRDGQSVAIKVIDKAHLRQTDGMVEQLRREISIMRMVRHPNVVGIREVLASRQRVFVVMEYARGGELFAKVARGRLTEDAARKYFQQLVAAVAFCHSRGVAHRDLKPENLLLDEEGRLKVTDFGLAALPEQLRHDGLLHTQCGTPAYVXAPEVLRKRGYDGARADMWSCGVVLYVLLCGFLPFQHDNYVKMYQKIFKGE

SEQ ID NO: 1929 - protein, 335 aa, Malus x domestica
MADESVAGSADFPVKRPREEEENGSAAAASAVSMEPDGGKEPDSVSAVIPGWFSEISSMWPGEAHSLKIEKILFQGKSDYQNVMVFQSATYGKVLVLDGVIQLTERDECAYQEMITHLPLCSIPNPKKVLVIGGGDGGVLREVARYASVEKIDICEIDKMVIDVSKQFFPEVAIGYEDPRVTLHVGDGVAFLKAVPAGTYDAVIVDSSDPIGPAKELFEKPFFQTVANALRPGGVVCTQAESIWLHMHIIEDIVANCREIFKGSVNYAWTTVPTYPSGVIGFMLCSTEGTAVDFKHPVNSIDESKRPLRFYNSEIHTAAFCLPSFAKKVIDAKAK

SEQ ID NO: 1930 - protein, 106 aa, Glycine max
  misc_feature (10)..(10): Xaa can be any naturally occurring amino acid
  misc_feature (66)..(66): Xaa can be any naturally occurring amino acid
  misc_feature (81)..(81): Xaa can be any naturally occurring amino acid
ISSPTITRCXHSQAGMRTPFTVLKYMASFPTIKTNNDITSITTNGGRVQPMHVMTPLLMNKFKTTXYLPNLDDAQLAKEVXYLLKKVCIPCLEFELDHRFLFLEPN

SEQ ID NO: 1931 - protein, 146 aa, Brassica napus
MAIATEKEVSDVSAVAQKRWNLGDFDIGKPLGRGKFGHVYLAREKRSNHIVALKVLFKTQLQQSQVEHQLRREVEIQSHLRNPNILRLYGYFYDQKRVYLILEYAARGELYKELQKCKYFSERRAATYVASLARALIYCHGKHVIH

SEQ ID NO: 1932 - protein, 228 aa, Glycine max
MYSPGYRIAPEMIKPKPTVLIGSSGAGKTFTKEVVETMASLNEKPLILALSNPTSQSECTAEEAYTWSKGKAIFASGSPFDPVEYEGKLFVPGQANNAYIFPGFGLGLIISGAIRVRDEMLLAASEALAAQVSQENYDKGLIYPPFSNIRKISAHIAAKVATKAYDLGEFFENVFISSNTVLVILFFYILNPDFYVWWTGLASHLPRPKDLVKYAESCMYSPGYRSYR

SEQ ID NO: 1933 - protein, 335 aa, Malus x domestica
MADEIVVGSADLPLKRPREEEENGAEAAASAVSMETDGGKEPDSVSAVIPGWFSEISPMWPGEAHSLKIEKILFQGKSDYQNVMVFQSATYGKVLVLDGVIQLTERDECAYQEMITHLPLCSIPNPKKVLVIGGGDGGVLREVARYASVEKIDICEIDKMVVDVSKQFFPDVAIGYDDPRVSLHVGDGVAFLKAVPAGTYDAVIVDSSDPIGPAKELFEKPFFQTVANALRPGGVVCTQAESIWLHMDIIEDIVENCREVFKGSVNYAWTTVPTYPSGVIGFMLCSTEGPAVDFKHPVNSIDASKRPLKFYNSEIHTAAFCLPSFAKKVIDAKAK

SEQ ID NO: 1934 - protein, 237 aa, Zea mays
MAMSDLTATVIPKPDGADDESVEIREVWADNLEEEFALIRDIVDEYPFVAMDTEFPGIVCRPVGAFRSPADYNYATLKANVDMLHLIQLGLTFSGPRGVDARRFAELLMSSGVVLNDSVYWVTFHAGYDFGYLLKILTCNSLPDTQAGFFKLMKIYFPTVYDIKHLMKFCNSLHGGLNKLAELLDVERVGESHQAGSDSLVTSCAFWKLKDSFFAGSTEKYAGVLYGLNAENGVSAH

SEQ ID NO: 1935 - protein, 292 aa, Malus x domestica
MINFTPLLSYMSSSVGMQGEAHSLKIEKILFQGKSDYQNVMVFQSATYGKVLVLDGVIQLTERDECAYQEMITHLPLCSIPNPKKVLVIGGGDGGVLREVARYASVEKIDICEIDKMVVDVSKQFFPDVAIGYDDPRVSLHVGDGVAFLKAVPAGTYDAVIVDSSDPIGPAKELFEKPFFQTVANALRPGGVVCTQAESIWLHMDIIEDIVENCREVFKGSVNYAWTTVPTYPSGVIGFMLCSTEGPAVDFKHPVNSIDASKRPLKFYNSEIHTAAFCLPSFAKKVIDAKAK

SEQ ID NO: 1936 - protein, 182 aa, Triticum aestivum
  misc_feature (160)..(160): Xaa can be any naturally occurring amino acid
VPPPSKLYTYIVQPWRPTVMASSATSVAPFQGLKSTAGLPVSRRSNGASLGSVSNGGRIRCMQVWPIEGIKKFETLSYLPPLSTEALLKQVDYLIRSKWVPCLEFSKVGFIFREHNASPGYYDGRYWTMWKLPMFGCTDATQVINEVEEVKKEYPDAYVXINGFTTSSVNANSPATGSRSEG

SEQ ID NO: 1937 - protein, 291 aa, Corynebacterium glutamicum ATCC 13032
MTFTLNNGLAIPDIGFGVFQTPPDETRNSVNAALEAGYRHIDTAAAYGNEREVGEAIAASGIGRDEITIETKIWVTDYGFEETLHAFDKATGKLGVDTLDILILHQAVPSSFDRTIAAYKALEKLLFDGAVRAIGVSNFMPEHLDKLLLETSIVPALNQIECHPYFQQRDVLARNEQLGILTQAWSPIGGITFYRDGQLPSTLENEVIAGIAAEVGKTPAQVMLRWHLQRRRHAIPKSVTPSRIVENFEIFDFELSDEQLQQIDALNTDLRGGPEPENITMENYYREIPEA

SEQ ID NO: 1938 - protein, 509 aa, Zea mays
  misc_feature (122)..(122): Xaa can be any naturally occurring amino acid
  misc_feature (169)..(169): Xaa can be any naturally occurring amino acid
  misc_feature (204)..(204): Xaa can be any naturally occurring amino acid
  misc_feature (216)..(216): Xaa can be any naturally occurring amino acid
  misc_feature (234)..(234): Xaa can be any naturally occurring amino acid
MATANGSSKGPFEVPKVEVRFTKLFIDGKFVDAVSGKTFETRDPRTGEVIASIAEGGKADVDLAVKAAREAFDNGPWPRMTGYERGRILHRFADLIDEHVEELAALDTVDAGKLFAVGQGAXDFPGAAHLLRYYAGAADKVHGATLKMAQRMHGYTLKEPRGGVVGHHXVPWNYPTTMFFFKVGPAARRRLAPVVVKPAEQTPXLSALFYAHLARXEAGVPAGVLNVVPGFGPXTAGAAVAAHMDVDKVSFTGSTEVGRLVMRAAAESNLKPVSLELGGKSPVIVFDDADLDMAVNLVNFATYTNKGEICVAGTRIYVQEGIYDEFVKKAAELASKSVVGDPFNPSVSQGPQVDKDQYEKVLRYIDIGKREGATLVTGGKPCGDKGYYIEPTIFTDVKDDMTIAQDEIFGPVMALMKFKTVEEVIQKANNTRYGLAAGIVTKNIDVANTVSRSIRAGAIWINCYFAFDPDAPFGGYKMSGFGKDMGMDALDKYLQTKTVVTPLYNTPWL

SEQ ID NO: 1939 - protein, 542 aa, Zea mays
  misc_feature (461)..(461): Xaa can be any naturally occurring amino acid
  misc_feature (464)..(464): Xaa can be any naturally occurring amino acid
  misc_feature (466)..(466): Xaa can be any naturally occurring amino acid
  misc_feature (468)..(470): Xaa can be any naturally occurring amino acid
  misc_feature (472)..(472): Xaa can be any naturally occurring amino acid
  misc_feature (477)..(477): Xaa can be any naturally occurring amino acid
  misc_feature (480)..(480): Xaa can be any naturally occurring amino acid
  misc_feature (501)..(501): Xaa can be any naturally occurring amino acid
  misc_feature (520)..(520): Xaa can be any naturally occurring amino acid
MEVAMVVSARASLLILVISLCSPYKFIQSPMDLGPLNLLPTTSTAAASSDFGRILFRAPAAVLRPQSPRDISMLLSFLSGSPSLSRVTVAARGAGHSIHGQAQAPDGIVVETRSLPGEMEFHHVRGGGEGRASYADVGGGVLWIELLERSLKLGLAPRSWTDYLYLTVGGTLSNAGISGQTFKHGPQISNVLQLEVVTGRGEIVECSPSKEADLFNAVLGGLGQFGIITRARILLQEAPEKVTWVRAFYDDLGAFTRDQELLVSIPDSVDYVEGFMVLNERSLHSSSIAFPASVDFSPDFGTRSSPRIYYCVEFAVHHHHGYQQQSQAAVEAISRRMSHMASQLYSVEVSYLDFLNRVRMEEVSLRSAGMWEEVHHPWLNMFVPKAGVAGFRDLLMDNVSPDSFQGLILIYPLLRDKWDTNTSVVIPDSGPTADDPVMYVVGILRSANPGPEEDGDGCSHXCLXEXLXXXRXIADAXEAXLGAKQYLPHHPTPARWQQHLXRRWERFADRKARFDPLRIXGPGQGIFPRTAQDAAAAAAYGS

SEQ ID NO: 1940 - protein, 479 aa, Arabidopsis thaliana
MENKPSVLTDKYDVGRLLGQGTFAKVYYGRSILTNQSVAIKMIDKEKVMKVGLIEQIKREISVMRIARHPNVVELYEVMATKTRIYFVMEYCKGGELFNKVAKGKLRDDVAWKYFYQLINAVDFCHSREVYHRDIKPENLLLDDNENLKVSDFGLSALADCKRQDGLLHTTCGTPAYVAPEVINRKGYDGTKADIWSCGVVLFVLLAGYLPFHDSNLMEMYRKIGKADFKAPSWFAPEVRRLLCKMLDPNPETRITIARIRESSWFRKGLHMKQKKMEKRVKEINSVEAGTAGTNENGAGPSENGAGPSENGDRVTEENHTDEPTNLNAFDLIALSAGFDLAGLFGDDNKRESRFTSQKPASVIISKLEEVAQRLKLSIRKREAGLFKLERLKEGRKGILSMDAEIFQVTPNFHLVEVKKSNGDTLEYQKLVAEDLRPALSDIVWVWQGEKDELTSQQETEYQQQQQQEQQEQEEPLKF

SEQ ID NO: 1941 - protein, 165 aa, Crocosphaera watsonii WH 8501
MFFIQSPIATLGCLILWFGWFGFNAGSTLELNSPAVAHILVNTLVAGATGGIIGTLSAWFMFDNKPSLTFIINGILAGCVSITASCAYVHLLSAVFIGMVGGWFVVWATDFIDRFGIDDPVGAIPVHLFCGFWGTLAVGFFSAGPGVVDWVISEKAFPIGGNRLD

SEQ ID NO: 1942 - protein, 427 aa, Enterococcus faecalis V583
MKTLIKNGKIIKKENQLIEAALWLENGVIHAIGESFDEADFEQVFDANGQLITPGLVDVHVHFREPGFTYKETIKTGSKAAARGGFTTVCAMPNLNPVPDTAEKLSEVYDLIQKDAVVKVLQYAPITEELRSEVLTNQKALKEAGAFAFTNDGVGVQTAGTMYLAMKEAAALNMALVAHTEDESLLFGGVMHEGEVSKKLGLPGILSATEASQIARDITLAKETGVHYHVCHVSTEESVRVIRDAKKAGIHVTAEVSPHHLILVDEDIPGDEGFWKMNPPLRGLADRQALIDGLLDGTIDCIATDHAPHGLEEKQQSFLNAPFGIVGSETAFQLIYTNFVETGIFTLEQVIDWMAVKPAEIFGLNAGTLTIGAPADIAVFDLATAAPIDAEAFESMAVNTPFTGWTVKGKTLMTFVDGALAWSEEAQ

SEQ ID NO: 1943 - protein, 365 aa, Triticum aestivum
  misc_feature (31)..(31): Xaa can be any naturally occurring amino acid
TFSYSILSDPHKRRQYDTSGFEAIETDSQEXLELDLSSLNTVNTMFAAIFSKLGVPLKTTVSATVLEEALNGSIVVSQLQLGNSVRKKVEKQTAHFYSIDITEQEAKKGLVCRVHSTEKSKFKLLYFELEENGGLSLALQEDSVKSSKVSSAGMYFLGFPVYRFEQNNSAPAAKDPDSAFFKRLDSFQPCDINELKPGTHFFAVYGDNFFKSATYTIEIVCAESFPTEKEKLQSVEAKILTKRAELSKFETEYREVLAKFTEMTSKYTQEMQMIDELLNERNVIHASYTNNPPLKRTSSRNKSKSSPSFKYDEEKNQRKEKKVKDQHMEACGSEDDDSSDKKTKERFPRKRWLNIPFKVDRRKPC

SEQ ID NO: 1944 - protein, 381 aa, Corynebacterium glutamicum ATCC 13032
MSDSQVRKGLNGVISDYTSISKVMPESNSLTYRGYAVEDLVENCSFEEVIYLLWFGELPTTEQLRTFNTTGRSYRSLDAGLISLIHSLPNTCHPMDVLRTAVSYMGTFDPDPFTRDADHIRSIGHNLLAQLPMVVAMDIRRRSGEEIIAPDHNKGIASNFLSMVFGNDDGSVANSADDIRDFERSLILYAEHSFNASTFSARVISSTRSDTYSAITGAIGALKGPLHGGANEFVMHTMLDIDDPNNAADWMGKALDRKERIMGFGHRVYKNGDSRVPSMEKSMRSLAARHRGQKWVHMYESMQEVMEARTGIKPNLDFPAGPAYYMLGFPVDFFTPLFVLARVSGWTAHIVEQFENNALIRPLSAYNGVEEREVVPISERT

SEQ ID NO: 1945 - protein, 433 aa, Azoarcus sp. EbN1
MTLTREQQIAAIEKDWAENPRWKGIKRNYTAADVVRLRGSIQPESTLARVGAEKLWNLVNNEPYVNCLGALTGGQAMQQVKAGIKAIYLSGWQVAADNNSYAAMYPDQSLYPVNSVPTVVERINNAFQRADQIQWSKNINKGDKGYVDYFAPIVADAEAGFGGVLNAFELMKAMIRAGAAGVHWEDQLASVKKCGHMGGKVLVPTAEAVQKLLAARLAADVMGVPTLVIARTDAEAADLLTSDYDANDKPFLTGERTAEGFYKTSKGLDQAISRAIAYAEYADLVWCETGTPNLEFARKFAEAVHAKHPGKMLAYNCSPSFNWKKNLDDATIAKFQRELGAMGYKYQFITLAGIHSMWYNMFDLAQDYAKRGMSAYVEKVQEPEFAARDRGYTFVSHQQEVGTGYFDEVTTVIQGGTSSVTALTGSTEEEQFH

SEQ ID NO: 1946 - protein, 469 aa, Medicago truncatula
MASTRRVQCLMRRFYRGSRTFGVATQPNASSSSQTIIDKEFQHSAHNYHPLPIVFAHAKGSAVWDPEGNKYIDFLSGYSAVNQGHCHPKILKALKNQAGRLTVSSRAFYNDRFPVFAEYSTALFGYDMVLPINTGAEGVETALKLARKWGYDKKKIPNDEALIVSCCGCFNGRTLGVISMSCDNEATRGFGPLIPGHLKVDFGDAEALEKILKEKGDAIAAFILEPIQGEAGVKIPPDGYLKAVRDLCSKYNVLMIADEIQTGLARTGKMLACEWEEVRPDVVVLGKALGGGIIPVSAVLADKEVMLCIKPGQHGSTFGGNPLASAVAIASLEVIKEERLAERSTKLGGELLGLLEKIQKQYPDHVKEVRGRGLFIGVELNSESLSPVSFFELSEKLKDRGVLAKSTHDTIIRFTPPLCISADEIQQGSKALADVLEIDLPMLKKMKPKDAAPPAGPSACDRCGRVVYG

SEQ ID NO: 1947 - protein, 215 aa, Zea mays
  misc_feature (141)..(141): Xaa can be any naturally occurring amino acid
MAAVEVCVKAATGKPDTLGDCPFSQRVLLTLEEKKVPYEVKLVDLDNKPEWFLKISPEGKVPVFNGGDGECIADSDVITQTIEEKFPTPSLVTPVEYASVGSKIFPAFITFLKSKDASDGSEKALLDELQALDEHLKAHGXPYINGENVSAADLSLGPKLFHLQVALEHFKGWKIPENLTNVHAYTKALFSRESFVKTKPSEEHVIAGWAPKVNA

SEQ ID NO: 1948 - protein, 477 aa, Novosphingobium aromaticivorans DSM 12444
MEFNNNYHMLIGGELVAAEARLDVVNPANEQVIACVPDAGAAELDAAVAAARKAFPGWAATPIAERKAMLDALADSIFANVDGFKRLLTAEQGKPHHEAQGEIMGAGYWLKAYTALDLPETVNEDSDERLSITRHVPLGVVGAIAPWNFPMILAMFKVAPGLLAGNTMVLKPSPFTPLCTLKFAELAKEILPAGVLNVITGGDHLGPLMTAHPGFDKISFTGSTQTGRRVMASAAPTLKRVTLELGGNDAAIVMPDVDVEKIAEQLFWAAFTNNGQICIATKRMYIHKDIYEPLRDALVAYARTVKVGDGSEQGTQIGPINNEAQYNRVLDLIQDAKDNGYKFLLGGEKAEVPGYFVPITILDNPPEDSRIVQEEQFGPVLPLIRFDDFEDVLNRVNASDYGLGGSVWGSDEDKAFELAQRVQSGTVWVNETQHLSPLAAFGGMKQSGVGVEGGLEGLLEYTSAQTLVRRKKAAFVN

SEQ ID NO: 1949 - protein, 299 aa, Glycine max
KLGIRLEHRVCVRWIRVLYSNFARFCKDQEYLISLHGKAARERFDYVEGFVIVDEGLINNWRSSFFAASNPVKITSLNADGGVLYCLEITKNYDQGNADSVDEEIQALLKKLNFIPTSVFTTDLPYVDFLDRVHKAELKLKSKGLWDVPHPWLNLFVPKSRIEDFDKGVFKGILGNKTSGPILIYPMNKNKWDHRSSVVTPEEDVFYLVAFLRSALDTETLEYLTNQNRQILRFCHDSEIKVKQYLPHYTTQQEWMDHFGDKWTQFNARKMQFDPRRILGTGQQIFQFHPSLTPNKDDM

SEQ ID NO: 1950 - protein, 480 aa, Pyrococcus horikoshii OT3
MCLIAGGFKLYTDEIIRIIELGKHRGPDSFGVWSEREVIKSSDFSALEEVKGGDKVLIQCRLAMTGSKEYTQPFYNEIALVHNGEIYNHEKLRAYLVERGISFESDVDSEVILRLLEYLLFDRNLSPWNAIKKLMWMLRGDYAVAFHYNGKFYLFRDPLGIRPLYYSSQGHFGSEKKVLWGLGEEATPVMPGEAVEISKFGINRVRLYDVTAIKSFGSEYFDGLRNLLIDSVKIRSSKKIGILFSGGLDSTLIAFIASRYSNVTLYVSGTEDSKDVEWARKVSQELGLKLKEYIFSKEEVEKELKRIMFAIEEPNPMNLSIAIPLYFSTKLAREDGVKILLSGQGADELFGGYAKYLENPNLMISDVANLGERNLARDDKVSMINGVEVRYPYLDLPFAVLALNTPLQHKIKDGKRKIILREIAKSLGLPEWIAEREKKAAQYGSNAQKILEKIAKSRGIRLKELASLLFSEVFRGIHNR

SEQ ID NO: 1951 - protein, 330 aa, Methanosarcina mazei Go1
MRLAVIEGDGIGREVIPAAVEVLDAFGLEFEKVPLEIGYARWERTGTAMSEEDMEIIKSCNAVLFGAVTTVPDPGYKSVLLTIRKELDLYANVRPVKPLSGVVGVSGRSDFDFIIVRENTEGLYSGIEEIGHDLSWTKRVITRKGSERISEYACELAKKRSGKLTIVHKSNVLKSDKLFLDVCRETASSYGVEYGDMLVDSMAYSLIMHPEKYDVVVTTNLFGDILSDMCAALVGSLGLVPSANIGKKYAFFEPVHGSAPDIAGKGISNPLAAILCVKMLLEWMGKPEARLIDAAIADLLQKKIITPDLGGRASTAEVGNAVAKYIMQNL

SEQ ID NO: 1952 - protein, 494 aa, Gibberella zeae PH-1
MTSSVTLQGAQGRQITVQTGLFIDNEFVPASNNATLDVENPNTATIIAQVSAAQASDVDRAVRSSQKAFATWGRSDPGTRRTLLLKLADLVEAHGPELASLEAIEGGLLYRDSLGLHVTQSVDNLRYFAGWADKLDGVSLPIPSGVAYTRREPIGVCAAIVPWNSLMILFWKLAPAIAAGNTIVIKTAELTPLWAQKAAELIKEAGFPPGVINIICGLGREAGQALAEHPVVRKIAFTGSSVTGRQIMQSAARSNLKKVSLELGGKGPSIVFADADWENALLWTTMGITASNGQICAAGSRIYVQDTIYEKFIQEFSRRSRDAVHGDPLLDETTKGAVASKAQLDKILSYVGKAKQTKARLLHGGQPLPGKGHFMANTAFVDVDQDDTIMREEIFGPFASIAPFSTEDEVIRKANDSDLGLNSAVFTNDVSRAFRISEAIETGTVTVNCWAMLNANTPFGGVKESGFGRDSGQEALDNWTVTKTVKFNILPPKL

SEQ ID NO: 1953 - protein, 204 aa, Fagus sylvatica
MASSSPSSNYIQEASGGHIIPTDQNVLQKHVAFFDRNQDGIVYPSETFKGFRAIGCGIFFSAISAIFINFGLSQKTRPGKFPSLLFPIEVKNIQKAKHGSDSGVYDTEGRFVPSKFEEIFSKHALSYPSALTSDELMKMLKENRVPKDYRGWLASWAEWKTLYILCKDKKWVTTERNKLKLLMMEAWLKEMEKERSSAKKKAVV

SEQ ID NO: 1954 - protein, 141 aa, Burkholderia cepacia R1808
MTRYDPFSIEPVSDLFHGLFRPLRGMTLADQPDLASMKIDVTENDGAYMVKAELPGVAKDDIDVQVTGNTVSINAKVERNNEQKDGERVIRRERYSGAISRSFSLAADIDDANATATYQDGVLSLTLPKKAPVGQKKLAIS

SEQ ID NO: 1955 - protein, 436 aa, Mycobacterium leprae
MSGATSGLTPEQIGAIDAAHLWHPYSTIGAATGVIPPVVAVAAHGAWLTLIRDGKPIEALDAMSSWWTAIHGHGHSVLDAALTTQLGAMNHVMFGGLTHEPAARLAQLLVDITPAGLETVFFSDSGSVSVQVAVKMALQYWRSRGQPAKRRLMTWRGGYHGDTLTPMSICDPDGGMHSLWTDILARQVFAPQVPRDYDPAYSKAFETQLAQHTPELAAVVVEPVVQGAGGMRFHDPRYLCDVRDICRRHDVLLIFDEIATGFGRTGELFAADHCGVSPDIMCVGKALTGGYLSLAATLCTTDIAHAISVGAAGALMHGPTFMANPLACAVSVASVEVLLGQDWRSRVAEISAGLTAGLEAAQGLPGVIDVRVCGAIGVIECDRSVDLAVATPAALDRRVWLRPFRNLVYAMPPYICPPAEIAQITSAMVEVAGLVG

SEQ ID NO: 1956 - protein, 233 aa, Zea mays
  misc_feature (174)..(174): Xaa can be any naturally occurring amino acid
  misc_feature (183)..(183): Xaa can be any naturally occurring amino acid
MLLPTRRLPAAPSGPAVHPYISPARPSLRFRRQHGRAATARATSATPPVFGDTLLGLYEKERLGLSRYADEESREDVFWETLDADLQYWTRSLRPVQWYPGHIAKTEKELKGQLKLMDVVIEVRDARIPLATTHPKMDSWLGNRRRIIVMNREDMVSADDRNAWATYFSSQGIXVIYSNGQLXMGTMKLGRMAKSAASTVNTRRREKGLLPRPVRAGIVGYPNVGKSSLINRL

SEQ ID NO: 1957 - protein, 320 aa, Enterococcus faecalis V583
MKRIGILTSGGDAPGMNAAIRAVVRKSIFDGIEVYGINYGFAGLVAGDIRRLDVADVGDKIQRGGTFLYSARYPEFATEEGQLKGIEQLKKFGIEGLVVIGGDGSYHGAMALTKRGFPAVGIPGTIDNDIPGTDFTIGFDTAINTVLESIDRIRDTATSHVRTFVIEVMGRNAGDIALWSGVAGGADEIIIPEHDFDMKNVAKRIQEGRDRGKKHCLIILAEGVMGGNEFADKLSEYGDFHTRVSILGHVVRGGSPSARDRVLASKFGSYAVELLKEGKGGLCIGMLDNQVVAADIIDTLENNKHKPDLSLYELNHEISF

SEQ ID NO: 1958 - protein, 158 aa, Nitrosomonas europaea ATCC 19718
MNIYDCGIKTMDGQDKLLGDYKGKVLLIVNTASKCGFTPQYQGLEDLYRRYKDRGFVVLAFPCNQFGHQEPGSESEIQQFCTTRYDVSFPVFAKIEVNGANTHPLYRYLKNEKSGVLGTKAIKWNFTKFLVDRSGHVVRRYAPADKPESLTGDIEQLL

SEQ ID NO: 1959 - protein, 277 aa, Bacillus pumilus
MNLEEQIKIAASLRQPSEGSLASQSELKPVNPPEVNKMEYDIPTSAGETKVWVFKPVNTQKQLLPVFVNLHGGGFIMGSAEMDNPWCPVIADRAQCIVVNVEYQLAPEHPFPAALHECYDVLKWLYEHPEELQIDRNALAIGGHSAGGNLATAACLLNIQRGNTLPIAYQVLDYPPLDLATDPAQKPAFEEAIPVELARLFNSFYLQGQDPHNPLVSPVFADRSSLAQMPPALVITAERDSLAQEADQYAKKLKEAGVDVTYSSLKEFLTASHTPEI

SEQ ID NO: 1960 - protein, 50 aa, Schizosaccharomyces pombe
MTQVIFAIILPPLGVFLERGCGADVIINILLCCLGYVPGIIHALYIILKY

SEQ ID NO: 1961 - protein, 236 aa, Escherichia coli O157:H7 EDL933
MGYRSFDTAAAYKNEEGVGKALKNASVNREELFITTKLWNDDHNRPREALLDSLKKLQLDYIDLYLMHWPVPAIDHYVEAWKGMIELQKEGLIKSIGVCNFQIHHLQRLIDETGVTPVINQIELHPLMQQRQLHAWNATHKIQTESWSPLAQGGKGVFDQKVIRDLADKYGKTPAQIVIRWHLDSGLVVIPKSVTPSRIAENFDVWDFRLDKDELGEIAKLDQGKRLGPDPDQFGG

SEQ ID NO: 1962 - protein, 300 aa, Brassica napus
  misc_feature (13)..(13): Xaa can be any naturally occurring amino acid
  misc_feature (56)..(56): Xaa can be any naturally occurring amino acid
MPSKSNAYFKRYXVKFGRRRDGKTAYRARIRLINQDKNKYITPKYRFVVSFTNEGXIFAQISVPLTLPGDIVKASAYAHELPQYGLTVGLTNYAAAYCTGLLLARRVLKMLEMDEEYEGNLEATGEDFSVEPTESRRPFRALLDVGLIRTTTGNRVFGALKGALDGGLDIPHSDKRFAGFNKENKQLDAEIHRNYIYGGHVSNYMKMLNEDEPEKFQTHFSQYLKKGVDAESMEELYKKVHAAIRADPNPKKTEKPAPKTHKRYNLKKLTYEERKNKLIERVKALNGAAGGDDDDEDDEE

SEQ ID NO: 1963 - protein, 296 aa, Saccharomyces cerevisiae
MITTPLVHVASVEKGRSYEDFQKVYNAIALKLREDDEYDNYIGYGPVLVRLAWHISGTWDKHDNTGGSYGGTYRFKKEFNDPSNAGLQNGFKFLEPIHKEFPWISSGDLFSLGGVTAVQEMQGPKIPWRCGRVDTPEDTTPDNGRLPDADKDAGYVRTFFQRLNMNDREVVALMGAHALGKTHLKNSGYEGPWGAANNVFTNEFYLNLLNEDWKLEKNDANNEQWDSKSGYMMLPTDYSLIQDPKYLSIVKEYANDQDKFFKDFSKAFEKLLENGITFPKDAPSPFIFKTLEEQGL

SEQ ID NO: 1964 - protein, 346 aa, Novosphingobium aromaticivorans DSM 12444
MKALRYYGARDIRHESMDDPTPQSDRDAIVKVDACSICGSDLHIYHGHGFSEDIGFCVGHEAVGEVVEVGRGVHRLKVGQKVMIPAAVGCGACRSCLAGVVNTCENNGSGCYGLSAKLQGSQAEAVRVPAADANAVAIPEGVSTEQALMMTDALATAWFGARQADIRPGSSVGIIGLGPIGLMAAESAFVMGAHVVYAIDPVPERRAIAESLGAIALHPDEASARIKEDTHGRRLDCVVEVVGSDATVDMALRLVRVRGTVSVIGVQQSRRFPFPLERAFAGGLTFRVGTCSVPEELPALFPLVASGRLRPERYISHRLPLSQGAEAYRMFEAREAGALKMVLVPD

SEQ ID NO: 1965 - protein, 485 aa, Arabidopsis thaliana
MGGCVSTPKSCVGAKLRSSKRRKSRRRRKIQRKRAAVSSRLSDGSFDNLDHHHRNFSNPSSRATGEDAWFESNVAFETDCDDDFHSVHEDALSLNGSERVSLSSTTTTSSTRDTDSNEVMSQSKSDGDLNDTNQPDLIDSSADEGLLENCRILPSNCLPCLNTTTVPSIDKRRSLSSSPPSSRKKSSLRLSYKWREGHASGALFLSKMQLKRPIAGSQVPFCPIDKKMLDCWSTIDPNSFRVRGKTYLREKKKEFAPSHAAYNPFGVDVFLSEHKIHHVAQYVKLPVTTTSTKLPSILVVNVQIPLYPTAIFQGESDGEGMNIVLYFKLSDNYSKELPLHFQESIRRLIDDEVEKVKGFPLDTTAPFRERLKILGRVANVDDLHLSGPEKKLMQAYNEKPVLSRPQHEFYLGDNYFEIDIDMHRFGYISRKGFETFIDRLKICVLDVGLTIQGNKPEELPEQILCCVRLNGIDFMNYHQLTQELL

SEQ ID NO: 1966 - protein, 175 aa, Triticum aestivum
MAPTVMAASVTSVAPFQGLKSTAGLPVSRRSSSAGLGSVSNGGRIRCMQVWPIEGIKNFETLCDLPPLSTEALLNQVEYLIRSKWVPCLEFSKVGFVFREHNSSPGYYDGRYWTMWKLPMCGCTDTTQVLKEVEEVKKEYPDAYVRVIGFDNLRQVQCVSFIAFRPPGCEESDKV

SEQ ID NO: 1967 - protein, 1224 aa, Ustilago maydis 521
MAVVDVGFSGYFWLAIKSFAARVICLLSDSGLRSAVSDRMPTKSRKSAPSKFAFFLDQQETFSLHISIFEPLGAVGVAPFQTDNRISLHRVFDRLPDTALQGGHGRATRSQRNFLSTDKSTKSFGSPIDIRFGPLRIDWAERAQDKEMSQASQYRNASSSSTSVGPATVTASASELTKASRRRNVFHAKQPQVALPVASFEKTDSFQGDVSGSKEAESRLASCTEMFQGMTIGATEVAFGIVHLFRDKQDATSNATPTRRAASTTGQTALENQIPEQDIGAVVAVLAVPAYLTASHFLSYIEPAVEAITHLRMLRDMHPNRCMVLIRFRDAKDAEDFHKMYNGQPFNAMDPQEICQVVYITSLTVSKHSSLPFSYPTLTNSDPWPLRPPANAVNQPAYELPTCPVCLERMDSSVTGLMTISCQHTFHCSCLSKWGESRCPVCRYSQTGQPSMHQRRRTPRSSMDPSTPVRQANQVGGSDADESDAESDLDEPSCCAVCETQQDLWVCLVCASVGCGRYKHGHAHRHFSETGHLYSLELETQRVWDYAGDGYVHRLIQNKADGKLVELPSASSATATPEHSSTLPASASYASAMSMSGTKHSGPPAIHSRGDNTRPPYDAQERRRQQQQQQRDQNYAIRDQDSCRSADDQLEAIGMEYSYLLTSQLESQRHFYEDKLDQFQAQLASLTGDLEMLSRKSQLIDELSARTAELERTNEQLRRDKDKSDKKADKAIELARTLERDLHSERSMNKGLMDRLEKTKESEVGLKAQVTDLQEQVSDLMFFVQARDKLDQEGSEAQGGDVEKLDSTFGNAFVISGRNARCGTGGSSTHPPITSLKLESKLIWPVLEKKTLRVMQHGGGKSTKHNPQSTKHEAIVNLCNVLYSYHLPARQTKPREYYIMSLNKTFTLNDGNKIPLIGLGTWLSKPGEVENAVEIAVKAGYRHLDLAKIYQNQDEVGAALKKVIPSVVKREELFITSKLWNTSHQPDKVEAAYNETLKELGLDYLDLYLIHWPVAFQPGSDLVPKTEDGKFTALDLETSLVDTWKALIALQKAGKVKSIGVSNFTIAHLDAIINATGVVPAVNQIEAHPLLPQDDLVAYAQQKNIHLTAYSPLGNNLTGKTKIVDYPQVSEVAKKYNADPAQVLIAWGVKRGYSVIPKSVTETRIKSNFEQLELKDDDYETVTSLYKQLGKVRFNVPFTYSPQWDINVFGEDAEKEAKNEVKTE

SEQ ID NO: 1968 - protein, 694 aa, Glycine max
  misc_feature (412)..(412): Xaa can be any naturally occurring amino acid
  misc_feature (592)..(592): Xaa can be any naturally occurring amino acid
  misc_feature (600)..(600): Xaa can be any naturally occurring amino acid
MPALACCVDAAAPPGYAFAGDISFPAPVALTGVPPATTDDSNNNRWSPSLSAALYNVDGWGGPYFAVNTAGNISVRPHGSDTLSHQEIDLLKIVKKASDPKSLGGLSLQLPLIARFPDVLKNRLESLQSAFDYAIQSGGYESHYQGVYPVKCNQDRFVVEDIVKFGSPFRFGLEAGSKPELLLAMSCLCKGNPDALLICNGFKDAEYISLALVANKLALNTVIVVEQEEEVDLIVELSKKLCIKPVIGLRAKLRTKHSGHFGGTSGEKGKFGLTTAQILRVVKNLDLAGMLDCLQLLHFHIGSQIPSTALLADGVGEAAQIYCELVRLGANMRVIDIGGGLGIDYDGSKSCDSDISVEYSLEDYAVAVVHAVQCVCDRRSVKHPVICSESGRAIVSHHSVLIFEAVGTSSTXPGGGASPALSAQYLAEELSEDYRNLSELAFRGEYETCLVYTEEMKERCVEQFKQGTVCMEQLAAVEGLCELARKAVGAGESVRRYHVNLSVFTSVPDAWGIEQVFPIIPIHRLDEKPSVRGILSDLTCDSDGKIDKFINGESSLPLHEMEGGRTYYLGMFLGGAYEEALGGVHNLFGGPXSVVRVSQXDGPHSFAVTAWPCRGHPCGDVLRVMQHQPELMFETLKHRAQEYVSHDNAAALLAAGLARTFDRMPYLLSLSSFVADDVAAAVPAAQDLGEQWSY

SEQ ID NO: 1969 - protein, 505 aa, Agrobacterium tumefaciens str. C58
MNIQVQQKAGEAPFKLKYGNYIGGKWVEPKSGRYMDNLSPVTGHKICEVPRSDASDIEFALDAAHKAREKWGKTSITERSNILLRIAQRIEDNLDLIARAETWDNGKPLRETTNADIPLTIDHFRYFAGCIRAQEGTIGEIDNDTVAYHFHEPLGVVGQIIPWNFPILMAAWKLAPALAAGNCVVLKPAEQTPASILIVMELIEDLLPPGVLNIVNGTGLEAGKPLAQSNRIAKIAFTGSTSVGKEIMRYAADNVTNISLELGGKSPNIFFADVMNEDDAFLDKALEGFAFFALNQGEVCTCPSRALVHESIYDRFMEKAIKRVQAISQDDPLNPSTMLGAQASQEQFDKIMSYLEIGKKEGAKVLTGGDRKTLTGDLKDGYYIQPTVFEGNNKMRIFQEEIFGPVVSVTTFKTVEEALEIANDTVYGLGAGVWSRDTNIAYRAGRGIEAGRVWTNCYHVYPAGAAFGGYKQSGIGRETHKMMLDHYQQTKNLLVSYSPNKVGFF

SEQ ID NO: 1970 - protein, 518 aa, Triticum aestivum
MGNRTSRHRRAAADQPATAPPPAAQPKPQPPPKPQTAPAPAPTPEAGQVAMGRVLGRPMEDVRATYTFGRELGRGQFGVTYLVTHKATGQRFACKSIATRKLVHRDDIEDVQREVQIMHHLTGHRNIVELRGAYEDRHSVNLIMELCEGGELFDRIIARGHYSERAAALLCREMVSVVHSCHSMGVFHRDLKPENFLFLNNKEDSPLKATDFGLSVFFKHGEQFKDLVGSAYYVAPEVLKRHYGAEADIWSAGIILYILLSGVPPFWADNEDGIFEAVLLGHIDFSSDPWPSISNGAKDLVKRMLRQDPKERLTAAEILNHPWIREDGEAPDKPLDITVISRMKQFRAMNKLKKVALKIVAESLSEEEIVGLREMFKSLDTDNSGTITLDELRAGLPKLGTKITESEIRQLMEAADVDGNGTIDYVEFISATMHMNRLEKEDHIFKAFEYFDKDHSGYITVDELEEALKKYDMGDEATIKDIIAEVDTDHDGKINYQEFVAMMKNNSPEIVPNRRRLF

SEQ ID NO: 1971 - protein, 433 aa, Wigglesworthia glossinidia endosymbiont of Glossina brevipalpis
MNINEVNFDRYYIWHPYSSITKPLKTYHVVSAKKCKLKLINGKKLIDGMSSWWTVIHGYNHPKINQAIINQIKKVSHVMFGGITHSPAIKLCKKIIKLTPKGLECVFLSDSGSVSIEVALKMALHYWFSKNERKKVKFLSLRGGYHGDTFGALSVCDPKNSMHNIYQGYLPNQEFTNTFDRKFNEKWESGDDLNLVKLIEKHHKKLAAVIIEPIVQGVGGMNFYHKQYLISIKKLCKFYKILLIVDEIATGFGRTGKLFACNYSKITPDILCIGKALTGGAITLAATITKRKVSETICNKKTPEFMHGPTFMANPLSCAASCANLSLIEEGKWIQQVKFIYQEMCKYLYPLIEHSYVKDVRILGAIGVVETKFFVNLENIQNWFVRHGAWIRPFRKLIYLIPPYIISSYELKFLIKLISLSLNDDKNFLYIKN

SEQ ID NO: 1972 - protein, 241 aa, Fagopyrum esculentum
  misc_feature (7)..(7): Xaa can be any naturally occurring amino acid
  misc_feature (9)..(9): Xaa can be any naturally occurring amino acid
PFFPHQXRXNLVSWGGSNGGVLYCLEITKNYFDSTLPHLVDLEIDNLLKKLNFIPSSVFTTDLPYVDFLDRVHKAELKLRSKGLWEVPHPWLNLFIPKSRIADFDRGVFKGILGNKTSGPILIYPMNNKKWDKRTSVVTPDEEVFYLVGFLRSALEGGDEAQSLEYLSDQNRQVLKFCEEAKIEAKQYLPHFTSQTEWKNHFGNKWDEFYRRKMIFDPRQILASGQRIFEPDVGPKNVASL

SEQ ID NO: 1973 - protein, 130 aa, Triticum aestivum
  misc_feature (18)..(19): Xaa can be any naturally occurring amino acid
  misc_feature (44)..(44): Xaa can be any naturally occurring amino acid
  misc_feature (53)..(53): Xaa can be any naturally occurring amino acid
  misc_feature (59)..(59): Xaa can be any naturally occurring amino acid
  misc_feature (64)..(65): Xaa can be any naturally occurring amino acid
  misc_feature (68)..(68): Xaa can be any naturally occurring amino acid
  misc_feature (72)..(72): Xaa can be any naturally occurring amino acid
  misc_feature (74)..(75): Xaa can be any naturally occurring amino acid
  misc_feature (78)..(78): Xaa can be any naturally occurring amino acid
  misc_feature (82)..(85): Xaa can be any naturally occurring amino acid
  misc_feature (91)..(92): Xaa can be any naturally occurring amino acid
  misc_feature (94)..(94): Xaa can be any naturally occurring amino acid
MGERVKGTVKWFNVTKGXXFISPDDGGEDLFVHQSSIKSDGYRXLNENDAVEXEIITGXDGRTXXNDXTAPXGXXLSXGLLXXXXGGERTXXGXYYRLLPRYAHPRTGRIVALHRQKGLSTFGPRGKFPR

SEQ ID NO: 1974 - protein, 206 aa, Pyrococcus horikoshii OT3
MRKMAHGPRYRVPFRRRREGKTNYRKRLKLLKSGKPRLVVRKSLNHHIAQIIVYDPKGDRTLVSAHTRELIRDFGWKGHCGNTPSAYLLGLLIGYKAKKAGIEEAILDIGLHPPVRGSSIFAVLKGAIDAGLNVPHSPEIFPEDYRIRGEHIAEYARMLKEQDEDRFRRQFGGYLEKGLDPEKLPEHFEEVKARIIEKFESEGARE

SEQ ID NO: 1975 - protein, 129 aa, Brassica napus
  misc_feature (53)..(53): Xaa can be any naturally occurring amino acid
  misc_feature (115)..(115): Xaa can be any naturally occurring amino acid
MESYDLHKVSIMTQCIDGVKHLCTSVLGCFDLNLFKQSGGGLGDPELLSRDTXSASEIEALYELFKKTSSAVIDDGLINKEEFQLALFKTNEKESLFADRVFDLFDTKHNGIPWXLEEFARALSVFHPN

SEQ ID NO: 1976 - protein, 513 aa, Hordeum vulgare subsp. vulgare
MDGNNRGGGHSEVLKNYNLGKTLGLGTFGDVKVAEHKLTGQRVAIKILNRRKMETMEMEEKANREIKIMRLFIDFIHPHIIRVYEVIETPKDIFVVMEYCNNGELLDYIIENGRLQEDEARRIFQQILAGVEYCHRIMVVHRDLKPENLLLDSKYNVKLADFGLSNVMRDGHFLKTSCGSLNYAAPEIISSKLYAGPEVDVWSCGVVLYALLCGSVPFDDDNIPSLFRKIKGGTYILPSYLSDSARDLIPKLLNIDPMKRITIHEIRVHPWFKNHLPCYLAVPPPYKEQQAKMIDEDILREVVNLGYDKDHVCESLWNRLQNEETVAYYLLLDNRFRSTSGYLGADHQHLMDRSFNEFTLSESASPSTRNYLPGINDSQGGGLRPYYPVQRKWAIGLQSGAHPRDIMIEVLKALKELNVCWKKNGLYNMKCRWCPGFPQVSDMLLDSNHNFVDDSTIMDNGNADGRLPAVVKFEIQLYKTKDNKYLLDIQRVTGPQLLFLEFCGAFLTNLRVL

SEQ ID NO: 1977 - protein, 333 aa, Oryza sativa
MGKPGKLALPSHESTIGKFLTQSGTFKDGDLLVNKDGLRIVSQSEEGEEPLDHNQLSLDDLDAIKVIGKGSSGIVQLVRHKWTGQFFALKVIQLNIQENIRRQIAQELKISLSTQCQYVVACCQCFYVNGVISIVLEYMDSGSLSDFLKTVLKGLMYLHHEKHIIHRDLKPSNILINHMGEVKISDFGVSAIIASSSAQRDTFTGTYNYMAPERISGQKHGYMSDIWSLGLVMLELATGEFPYPPRESFYELLEAVVDHPPPSAPSDQFSEEFCSFVSACIQKNASDRSSAQILLNHPFLSMYDDLNIDLASYFTTDGSPLATFNTSNRYDDR

SEQ ID NO: 1978 - protein, 262 aa, Neurospora crassa
MGHEDAVYLAKLAEQAERYEEMVENMKIVASEDRDLTVEERNLLSVAYKNVIGARRASWRIVTSIEQKEESKGNSTQVSLIKEYRQKIESELAKICEDILSVLDQHLIPSATTGESKVFYHKMKGDYHRYLAEFAVGDKRKDSADKSLDAYKNATDVAQTELPPTHPIRLGLALNFSVFYYEILNAPDQACHLAKQAFDDAIAELDTLSEESYKDSTLIMQLLRDNLTLWTSSEAEAPAAQGEAAPEEPKADAPAAEEPKAE

SEQ ID NO: 1979 - protein, 507 aa, Thermosynechococcus elongatus BP-1
MKLRSILRRGFRLQHPLTQILYLPTRRTLLTFAVMIGVLSATAALGQDTAASAAVPEKVQVALNTLWVILAGVLVFFMNAGFGMLETGFCRAKNAVNLLSKNLIVFALASISYWAIGFALMFGDGNGVLGSSGFFLLGADNSPATGEAYRGVYSSLSWAAVPLSAKFFFQLVFAGTAATIVSGAVAERIKFYAFFIFSLLLVGISYPITGHWIWGGGWLQQLGMWDFAGSTVVHSVGGWAALMGAALLGPRLGRFLPDGSVAAIPGHNFAIATLGCLILWLGWFGFNPGSTMAADPGAIAHIAVTTNMAAAFGGVTATVVSTLYFGKPDLSMIINGILAGLVAITASCAFVTIESAALIGAIAGTIIVFSVVTIDRLKIDDPVGAISVHLVNGVWGTLAVGLFADGPGRFYEAGAGPLKGLLWSGDFTQFGYQLVGVLAVGGFTVAFSTAVWLLLNATIGIRVSPEEEIEGLDIGEHGMEAYAGFLLREEVKGFVDLLKRMSGSGRS

SEQ ID NO: 1980 - protein, 178 aa, Zea mays
  misc_feature (38)..(38): Xaa can be any naturally occurring amino acid
  misc_feature (97)..(97): Xaa can be any naturally occurring amino acid
PSIPYDPMALRKAFDKPVVKRLMTYVPFGVLLSGGLDXSLVTAVAVRHLAGTEAARRLGTKLHSFYVGLKGSPDLKAAREVAEYLGTLHHEFHFTVXDDIDAIEDVIYHTEAYDVTTIRASTPMFLMSHKIKSLGVKMVISGEGSDELFGGYLYFHKAPNKEELHRETCRKVCVSFFH

SEQ ID NO: 1981 - protein, 397 aa, Synechocystis sp. PCC 6803
MNYMMTDNEVFKEGLAGVPAAKSRVSHVDGTDGILEYRGIRIEELAKSSSFIEVAYLLIWGKLPTQAEIEEFEYEIRTHRRIKYHIRDMMKCFPETGHPMDALQTSAAALGLFYARRALDDPKYIRAAVVRLLAKIPTMVAAFHMIREGNDPIQPNDKLDYASNFLYMLTEKEPDPFAAKVFDVCLTLHAEHTMNASTFSARVTASTLTDPYAVVASAVGTLAGPLHGGANEEVLNMLEEIGSVENVRPYVEKCLANKQRIMGFGHRVYKVKDPRAIILQDLAEQLFAKMGHDEYYEIAVELEKVVEEYVGQKGIYPNVDFYSGLVYRKLDIPADLFTPLFAIARVAGWLAHWKEQLSVNKIYRPTQIYIGDHNLSYVPMTERVVSVARNEDPNAII

SEQ ID NO: 1982 - protein, 489 aa, Mesorhizobium sp. BNC1
MALLEHPQVGPAQNHIDGIWRHGPVSERRETFDPATGKILGHYDPGTVDLMDEAIAAARRAFDETAWASAPRLRAEVLLKLAARLSADHERLATLNAYENGKSFIQAKNEVATAISEAKYYAGLARSMTGRMMEPEPGCYSLISREPMGVAGIIVPWNAPVTLLLRSLAAALAAGCTAVVKPAPQTPLINAAVIQHLVAITEIPDGVVNSINDGGPAVGERLVASSDVDVISFTGSSAVGKRIMAAAAPTLKRVSLELGGKTPSIIFDDADLDKAISELARASLVNSGQQCVAASRFLVHRNVLDDFADGMMQRLRSVPVGPGYDTDNLVGAIIDRPNRDRLLGWLDRCADDGDILLRGETLDERYPGGAFLTPSLVLVSSTEALTVQEELFGPIITLEPFADEDEALAKAHATAYGLAASVFTRELDRSLRMARRLRAGTVWLNTHGKLIAEAEMEGHRESGIGRLHGADAIGEFQQTKHIYLPFGQS

SEQ ID NO: 1983 - protein, 274 aa, Listeria monocytogenes EGD-e
MNLKDTVKLANGVEMPRLGFGVWKVQDGDEAVNSVKWAIEAGYISIDTAAAYKNEEGVGQAIKESGIKREDLFVTTKLWNAEQGYESTLAAFDESLRKLELDYVDLYLIHWPVKGKFKDTWRAFEKLYKDKRVRAIGVCNFHEHHLKELMEDAEIAPMVNQIELHPQLTQEPLRKFCAENNIVVEAWSPLGNGKLLSNPEIKAIADAHGKSVAQVILRWDLQIGVVTIPKSVHQERIIQNADIFDFELTEEEVAKISGLNKDERTGPDPDNFNF

SEQ ID NO: 1984 - protein, 338 aa, Glycine max
  misc_feature (306)..(306): Xaa can be any naturally occurring amino acid
MLFCASTKPAPGLACILSLFFLFKDLARAESYHLVALMSRALEHDYIGLAENPSMDGKNSSSLNLKETELRLGLPGCESPERKSGSALCLFGKELQNNNNNVCSLKAGAKRGFSDAIDTSSVTEGSQGASALFSPRGGNVGKPLIGLDTQTNTTIKEVGAVPQSAKPVQENNDQFAATNAHAIAPAAKAQVVGWPPIRSFRKNTMASNLTKNNDEAEGKSGFGCLYVKVSMDGAPYLRKVDLKTYNNYMELSSALEKMFSCFTIGQCNSPGLPGKDGLSESSLRDLLHGSEYVLTYEDKDGDWMLXMFTDSCRRLRIMKGSEAIGLAPRAMEKSRSQN

SEQ ID NO: 1985 - protein, 119 aa, Zea mays
  misc_feature (55)..(55): Xaa can be any naturally occurring amino acid
  misc_feature (84)..(84): Xaa can be any naturally occurring amino acid
MDKNYGELYNILGWGEEYFAVNTEGHLSVKPFGRWTEPGQEIDVHSVIVEALATXPNDSTSKSQFPMILRFPDVLRNRIETLHXAFTGAMEATGVPVREPRRGSRTRGPKNKAVRGEKG

SEQ ID NO: 1986 - protein, 123 aa, Triticum aestivum
  misc_feature (60)..(60): Xaa can be any naturally occurring amino acid
  misc_feature (72)..(72): Xaa can be any naturally occurring amino acid
  misc_feature (80)..(80): Xaa can be any naturally occurring amino acid
  misc_feature (82)..(82): Xaa can be any naturally occurring amino acid
  misc_feature (98)..(98): Xaa can be any naturally occurring amino acid
  misc_feature (101)..(101): Xaa can be any naturally occurring amino acid
  misc_feature (109)..(109): Xaa can be any naturally occurring amino acid
  misc_feature (114)..(114): Xaa can be any naturally occurring amino acid
  misc_feature (118)..(118): Xaa can be any naturally occurring amino acid
  misc_feature (121)..(122): Xaa can be any naturally occurring amino acid
MAPTVMASSATSVAPFQGLKSTAGLPVSRRSNGASLGSVSNGGRIRCMQVWPIEGIKKFXTLSYLPPLKHGXLLKQVRLXLXRSKWVPCLEFNKLGSXSRXAQRTPGVXNGRYXTMWXLPXXR

SEQ ID NO: 1987 - protein, 243 aa, Lycopersicon esculentum
KRLMTDVPFGVLLSGGLDSSLVASVTARYLAGTKAAKQWGAQLHSFCVGLEGSPDLKAAKEVADFLGTVHHEFHFTVQDGIDAIEDVIYHIETYDVTTIRASTPMFLMSRKIKSLGVKMVISGEGADEIFGGYLYFHKAPNKEEFHRETCRKIKALHQYDCLRANKATSAWGLEARVPFLDKEFINVAMSIDPEWKMIKHDQGRIEKWVLRKAFDDEEQPYLPKHILYRQKEQFSDGVGYSWI

SEQ ID NO: 1988 - protein, 136 aa, Glycine max
  misc_feature (4)..(4): Xaa can be any naturally occurring amino acid
  misc_feature (12)..(12): Xaa can be any naturally occurring amino acid
  misc_feature (18)..(19): Xaa can be any naturally occurring amino acid
  misc_feature (31)..(31): Xaa can be any naturally occurring amino acid
KRAXSDLVAKIXLSDLVXXFGMPIVEASRNXNVGLTVLKRKCREFGIPRWPHRKIKSLDSLIHDLQEEVKSQELEDREAALAVAKRQRMLESEKENIEKKPFMDIQSETKRFRQDVFKRRHRARAVGKHNSTVSST

SEQ ID NO: 1989 - protein, 348 aa, Rhodococcus erythropolis
MKAIQYTRIGAEPELTEIPKPEPGPGEVLLEVTAAGVCHSDDFIMSLPEEQYTYGLPLTLGHEGAGKVAAVGEGVEGLDIGTNVVVYGPWGCGNCWHCSQGLENYCSRAQELGINPPGLGAPGALAEFMIVDSPRHLVPIGDLDPVKTVPLTDAGLTPYHAIKRSLPKLRGGSYAVVIGTGGLGHVAIQLLRHLSAATVIALDVSADKLELATKVGAHEVVLSDKDAAENVRKITGSQGAALVLDFVGYQPTIDTAMAVAGVGSDVTIVGIGDGQAHAKVGFFQSPYEASVTVPYWGARNELIELIDLAHAGIFDIAVETFSLDNGAEAYRRLAAGTLSGRAVVVPGL

SEQ ID NO: 1990 - protein, 105 aa, Pisum sativum
MVVVSAPMAEAAISCGAVTAAVAPCFAYLKGAPSPSLQCCGGVRRLNGIPDRKGVCNCLKGAAGSVPGLKPGNVAALPANVVLDFLSRLAPLPTVMPSVFKKKCG

SEQ ID NO: 1991 - protein, 300 aa, Zea mays
PISDYPGGGRNEGKGSPATTNTMPPHRAGGAAGGGDTSAFFAATLVLWAVSVGFEIGVRGRRELAPVAAGFAFFQAANAAVRGSVSRDPRFVNTAVSLLHSSLTSVSVIFVLVNQWRNKGLENMFEHEELFGGSWIGAYSALCFSCGYFAYDQLDMLRYRLYNGWIPGILMHHLILLICFTLALYRNVTINYLILSLVCELHSIFLHVRKVRRMVGFRDFDRTMVKLEWLLNWTTFVTARVICHILITYKLVADAHKFGKGIELPLALLGMAGMNLLNIFLGLDLLKAFTRERNQQSHQD

SEQ ID NO: 1992 - protein, 495 aa, Aspergillus nidulans FGSC A4
MLGTAVPSEPVYQSSSRQPAQSSSNLETGSSISTSSNTTPTFPAPPSASAAGSSRFSTQDVPAYIRASSHPSSRSSESSTVTPGPTPIPTSAQMNPPSVVPSGQGGQTGTAPPGFGGRHTASHSSPASPQLRPTLRSLRSLGGSEASSPSRIKIRDLSHIQSFASEEFLAPPQRTRASGHWAQERQFEISSMPVTDIIEMVAGLLTKITTTNDSHHEQVHRQIPSVDGSSNLSQQAHSVLAFHGKNVPSISILSYLTRIHKYCPTTYEVFLSLLVYFDRMTEMVNKGQLDRLRGRYNRTDALQSDVAFRPRSSESSITQRSHTSPMVTPPPSAGITAQDSASTSPVSPAMNPLQGEDYLSHFFVVDSFNIHRLVIAGVTCASKFFSDVFYTNSRYAKVGGLPLAELNHLELQFLLLNDFRLSIPVEELEAYGTMLVEFYAREIVAQQQQQQQQQQQQQQHSQSQAGPMARESESDAMYMRRQPAHPEVRQTSTPP

SEQ ID NO: 1993 - protein, 607 aa, Triticum aestivum
  misc_feature (156)..(156): Xaa can be any naturally occurring amino acid
  misc_feature (388)..(388): Xaa can be any naturally occurring amino acid
MDTHIGSVDGPSPAAVNGAVGCPASAPGCPIMSSHPVVSPGEASLGRHLARRLVQVGVSDVFAVPGDFNLTLLDHLVDEPGLRLIGCCNELNAGYAADGYARARGVGACAVTFTVGGLSVLNAIAGAYSENLPVICIDGGPNSNDYRTNRILHHTXGIPDFSQELRCFQTVTCHQAVVTNLDDAHEQIDTAIATALRESKTVDLSISCNLPGLPHPTFTRDPVPFFLAPRMSNKMGLEAAVEATVEFLNKAVKPVLVAGPKLRVAKAGKAFVDLVEAASGYAYAIIAIGRFVPETHPHFLGTHLLGRRQPFCARRDWRVGRRLFAGPTFNDCRSLGWSFLPKKDKDIIVRPERVIAGNGTACGCAMIREYRTGLARRIRKKNTANENXKNIFVFVGHPLQGEANATEPLRVHVLFKHIQDMLTGDSAVLAETGDSWFNCQKLKLPEGCGYEFQMQYGSIGWSVGALLGYAQGASDKRVIACIGDGSFQVTAQDVSTMLRCEQNSIIFLINNGGYTIEVEIHDGPYNVIKNWNYTALVEAIHNGEGKCWTAKVKCEEELTAAIETALGEKKDSLCFIEVIAHKDDTSKELLEWGSRVSAANSRPPNPQ

SEQ ID NO: 1994 - protein, 288 aa, Thermococcus kodakaraensis
MGYNEQERAFIEWYPRGYGVGFKVKRRLFETQTEYQRLEIYETEGFGKLLVLDGTVQLVEVGEESYHEVLVHPVMLAHPNPRKVLVIGGGDGGTLREVLRHDTVEKAIMVEIDEGVVEASYLYLDVAKDLLDRLIKKEEPRAELIIGDGVKYLRETDERFDVIIVDSTDPVGPAKLLFSEEFYRDAYEKLNEKGLYVTQAGSVYLFTNELLDAYKAMKKVFDRVYYFSFPVIGYASPWSFLVGVKGDVDFTRIDLERAKKLDLYYYDPERHETLFQMPRYVRKLLEGQ

SEQ ID NO: 1995 - protein, 475 aa, Aspergillus niger
MASTLRLGTSALRSSSIAAKPVVQSAAFNGLRCYSTGKAKSLKETFAEKLPAELEKVKKLRKEHGSKVIGEVTLDQAYGGARGVKCLVWEGSVLDSEEGIRFRGRTIPECQELLPKAPGGQEPLPEGLFWLLLTGEIPTEQQVRDLSAEWAARSDLPKFIEELIDRCPSTLHPMSQFSLAVTALEHESAFAKAYAKGINKKDYWNYTFEDSMDLIAKLPTIAAKIYRNVFKDGKVAPIQKDKDYSYNLANQLGYGDNNDFVELMRLYLTIHSDHEGGNVSAHTTHLVGSALSSPMLSLAAGLNGLAGPLHGLANQEVLNWLTKMKAAIGNDLSDEAIKNYLWSTLNAGQVVPGYGHAVLRKTDPRYVSQREFALRKLPDDPMFKLVSQVYKIAPGVLTEHGKTKNPYPNVDAHSGVLLQYYGLTEANYYTVLFGVSRALGVLPQLIIDRALGAPIERPKSYSTELSPSLLVLSCK

SEQ ID NO: 1996 - protein, 485 aa, Xylella fastidiosa Dixon
MHHNVHQSEILADPCDLQRAERWRQRDLRVLWHPCTQMREHPDTLPLVPIVRGEGAWLVGHDGRRYLDAVSSWWTNLFGHADPRISAAIAAQARTLEHVMLAGFSHEPAVRLAEALLRLAPRQDGREPLSKVFYADNGSAGVEVALKMAFHYFRNRGEEQRTRFIALHNGYHGETIGALAVGDIPLYRRVYAPLLTEVLFAPSPDAYLAEPGQSAAEYALQAAEALEALFKRYSGQICALILEPLLQCAGGMRMHHPVYLHRVRELCDAHGALLICDEIATGFGRTGTLFACEQACPAISTDTDDKELGIMPDLLCLSKGLTGGFLPLAAVLTTQQLYEEFLDDSRERAFLHSHSYTGNPLACIAALTTLDIFENDCIIERNQVTAARMTQLAASLSGHPHVADVRQTGMVVAFELTRDGNKRTPFPPQARLGLHVYRAALARGVILRPLGDVVYWMPPYCVDEEQLHLLAETTRVAIDEAIACV

SEQ ID NO: 1997 - protein, 505 aa, Hordeum vulgare
MAAPPAIPRRGLFIGGGWREPTLGRHIPVINPATEDTIGDIPAATAEDVELAVAAGGPVLARRREPWARASGATRAKYLNAIAAKITGKIAYLALLETVDSGKPKDEAVADMDDVAACFEYYAALAEALDGKQHAPISLPMEEFKTYVLKEPIGVVGLITPWNYPLLMATWKVAPALAAGCTAVLKPSELASLTCLELGAICEEIGLPSGVLNIITGLGPDAGAPIASHPHVDKIAFTGSTATGKTIMTAAAQMVKPVSLELGGKSPLVTFDDVADIDKAVEWPMLGCFFNGGQVCSATSRLLLHEKIAEPFLDRLVEWAKNIKISDPLEEGCRLGSVISKGQYEQIKKFISTARSEGATILHGGDRPKHLGKGFFIEPTINTGVSTSMQIWREEVFGPVICVKVFKTESEAVELANDTHYGLAGGVISDDLERCERIAKVIHSGIVWKNCSQPTLVQAPWGGNKRSGFGRELGEWGLENYLSVKQVTRYCKDELYGWYQRPSKL

SEQ ID NO: 1998 - protein, 121 aa, Helicosporidium sp. ex Simulium jonesii
FTPQYAELEQLQQEFGAQGFDVLGFPCNQFMNQEPGDSCSIRDAARAKHGATFPMFAKIKVNGSEADPLYKWLKEQKGGILTSAIKWNFAKFLVDRQGKVVGRYAPTTSPKDIANDIKKFL

SEQ ID NO: 1999 - protein, 359 aa, Bradyrhizobium japonicum USDA 110
MKDTYTIAVVHGDGIGPEVARAAVAVLQAGVQAGTLRFVDYPAGADHFLKTGDSFPAASFEGCRTADAILHGAAGIPGVVHPDGTEAGLDFTLTLRFKLDLFANVRPIKLYKGVPSPLGRPGPIDYVIVRENSEGLYAARGAGALLREEVAVDTLVQTRKGVERIVRFAFELARTRNGSPKDGRRRVTCCDKANVLRTYAFFRAVFDEVAKEYPDIEAEHVLVDAMTVHLVNKPTHFDVIVTENMFGDIISDLGAATVGGMGMAPSEEVGDGIGFFQASHGSAPDIAGKGLANPYGTILASILMLRRLDQRHRDSRLKLGADRIEAAVCAGLEDPALRTRDIGGVAPTNQVVDALLKRL

SEQ ID NO: 2000 - protein, 493 aa, Bradyrhizobium japonicum USDA 110
MTKAEIRFPLDGRARKMFVDGAWVEARSGKVFETRNPATGEVIGRVPRGEAADISVAVAAARRAFVGPWSRFKPFERQALLLRIADLFEKHWEEISQSDTADMGMPIARTRANKLRVIGMLRYYAGMATALHGQTVDNSLPGDIVSFTRKEPIGVVGAIIPWNAPTAASVWKIGPALATGCTIVLKPSEEAPLTPLLIADLMNEAGVPPGVVNVVTGTGVEAGAPLAEHPDVDKIVFTGSTATGQAIIRASAGNLKRVSLELGGKSPVIVCADADLDKAVPIAAMAAFANSGQICIAGSRLFVERKIHDELVERLGKFASALKIGDGADPTTEIGPLVSQRQLDKVEGFLQSGREEGAKVVAGGRRVREGNLAKGNFVEPTVFAGVSDDMQIARDEIFGPVISALPFDTLDEAVERANATPYGLAAGVFTRDVSKAHVISRSLRAGSVWVNTYHALDPAMPFGGYKMSGYGREGGTEHLDEYLHTKGVWIKLD

SEQ ID NO: 2001 - protein, 445 aa, Streptomyces coelicolor A3(2)
MSEAELVLRSTRVITPEGTRAASVAVTGEKITAVLPYDAPVPAGARLEDVGDHVVLPGLVDTHVHVNDPGRTEWEGFWTATRAAAAGGITTLVDMPLNSIPPTTTVDNLRTKREVAADKAHIDVGFWGGALPDNVKDLRPLHEAGVFGFKAFLSPSGVDEFPHLDQEQLARSLAEIAAFDGLLIVHAEDPHHLAAAPQQGGPKYTHFLASRPRDAEDTAIATLLAQAKRFNARVHVLHLSSSDALPLIAEARADGVRVTVETCPHYLTLTAEEVPDGASEFKCCPPIREAANQDLLWQALADGTIDCVVTDHSPSTADLKTDDFATAWGGIAGLQLSLPAMWTAARGRGLGLEDVVRWMSERTAALVGLDARKGAIAPGHDADFAVLAPDETFTVDPAALQHRNRVTAYAGKTLYGVVKSTWLRGERIVADGAFTDPKGQLLDRA

SEQ ID NO: 2002 - protein, 140 aa, Zea mays
STYKGKVLLIVYVASQCGLTDSNYTELSHLYEKHKGQGFEILAFPCNQFGAQEPGTNDEIVEFACTRFKAEYPIFDKVDVNGDTAAPIYKFLKSSKGSLFGDGIKWNFAKFLVDKEGHVVHRYAPTTSPLSIEKDIKKLL

SEQ ID NO: 2003 - protein, 139 aa, Parietaria judaica
QETCGTMVRALMPCLPFVQGKEKEPSKGCCSGAKRLDGETKTGPQRVHACECIQTAMKTYSDIDGKLVSEVPKHCGIVDSKLPPIDVNMDCKTVGVVPRQPQLPVSLRHGPVTGPSDPAHKARLERPQIRVPPPAPEKA

SEQ ID NO: 2004 - protein, 110 aa, Chromobacterium violaceum ATCC 12472
MPPAGCSSCVMCSCRSGNSRTSVAISLDLRAFYSTARFEEFNKMATGTVKWFNDSKGFGFITPDEGGDDVFAHFSQINAKGFRSLAENQRVSFDIVEGPKGKQASNIQPI

SEQ ID NO: 2005 - protein, 181 aa, Triticum aestivum
  misc_feature (14)..(14): Xaa can be any naturally occurring amino acid
  misc_feature (29)..(29): Xaa can be any naturally occurring amino acid
  misc_feature (94)..(94): Xaa can be any naturally occurring amino acid
YSPWPPTVMASSAXTSVAPFQGLKSTAGXLPSAAAPTAASLGSVSNGGRIRCMQVWPIEGIKKFETLSYLPPLSTEALLKQVDYLIRSKWVPCXLEFSKVGFIFREHNASPGYYDGRYWTMWKLPMFGCTDATQVINEVEEVKKEYPDAYVRIIGFDNMRQVQCVSFIAFKPPGCEESGKA

SEQ ID NO: 2006 - protein, 142 aa, Brassica napus
  misc_feature (137)..(137): Xaa can be any naturally occurring amino acid
MAMAFKMATTGMRVTEECTSSFLEMKWKKVHRYIVFKIDENSRKVTVDKVGGAGENYQDLTASLPVDDCRYAVFDFDFVTVDNCRKSKIFFIYWSPEASRIRAKILYATSKAGLRRVLEGIHYELQATDPTEMGFDXIQDRA

SEQ ID NO: 2007 - protein, 354 aa, Nicotiana tabacum
  misc_feature (211)..(211): Xaa can be any naturally occurring amino acid
MKTTKPLKELKLSVPAQDTPISSFLTASGTFHDGDLLLNQKGLRLISEENESPASETKEIDLQFSLEDLETIKVIGKGSGGVVQLVRHKWVGTLFALKVIQMTIQEDIRKQIVQELKINQASQCSHVVVCYHSFYHNGAISLVLEYMDRGSLADVIRQLKTILEPYLAVVCKQVLQGLVYLHNERHVIHRDIKPSNLLVNHKGEVKITDFXVSAMLASSMGQRDTFVGTYNYMAPERISGSTYDYKSDIWSLGMVILECAIGRFPYIQSEDQQAWPSFYELLEAIVSSPPPSAPAVQFSPEFCSFVSACIQKDPRDRSSALDLLSHPFIKKFEDKDIDFGILVSSLEPPVNFPR

SEQ ID NO: 2008 - protein, 182 aa, Bdellovibrio bacteriovorus HD100
MSTLNHIEFNTADGKKATLADYSGKVLLVVNVASECGLTPQYEGLEKIHQKYESQGLRVLAFPANEFGAQEPGSNEQIQEFCRTQFGVKFPVFAKMVVKGEGQHPLYQQLTTLQPAAQQVPGGKLKSVLEEHGLLSGGPSDIMWNFEKFLIGKSGNVVARFAPDMTPEDPTIVKAIEAELAR

SEQ ID NO: 2009 - protein, 386 aa, Aspergillus flavus
MTGLDMETIFAKIKDEYARTDDVGKRQIQGHIRELQVGFYSDWDVVMRLSSGPLQVALAKVAIDLGIFRSLKESDTPITLAEFVKKTGASPRLLGRILRTQAAFGLIKETGPQEYTSSAFTDVFANSDAAGAVVQLFDISGPCTQILPDFLAERNYQDITSNKDCVFQKAFGSDLTMFEWMPQHPKHMESLGHLMALERPVSWVDHFPILEELGKFPAPDKVLMVDIGGGFGQQSKALRAKFPNLPGRLIVQDIPQTLANAQPAAGIEFMEHNFFEPQPIQNAKFYYLRHVFHDWPDEQCVLILKQIIPAMGPESQILIDEMVIPSTGVPWQAAFTDLLMMNSLGGVERTRAEWDDLMEQAGLEIIQSKVYDSKEQAILVAVAKRT

SEQ ID NO: 2010 - protein, 250 aa, Glycine max
MGKSYPTVSADYQKAVEKAKKKLRGFIAEKRCAPLMLRLAWHSAGTYDVSSKTGGPFGTIKHPSELAHGANNILDIAVRLLEPLKAEFPILSYADFYQLAGVVAVEVTGGPEVPFHPGREDKPEPPPEGRLPDATKGSDHLRDVFGKAMGLSDRDIVALSGGHTIGAAHKERSGFEGPWTSNPLIFDNSYFKELLSGEKEGLLQLPSDKALLSDPVFRPLVEKYASDEDAFFADYAEAHQKLSELGFAEA

SEQ ID NO: 2011 - protein, 246 aa, Triticum aestivum
MKGGDIEAGTSGGTAAAPAGALYPGMAESPELRWALIRKIYVIVSLQLLLTAVVAAVVVKVPAIPHFFASSYAGLGLYIFLLILPFIVLCPLYIYRQKHPVNLLLLGVFTVAISFAVGMTCAFTSGKVILEAAILTTVVVFSLTAYTFWAVKRGKDFSFLGPFLFASLIMLLVFGFIQILFPLGKLSHMIYGALAALIFSGYIVYDTDNIIKRYTYDEYVWAAVSLYLDIINLFMALLTLFSAGDS

SEQ ID NO: 2012 - protein, 240 aa, Glycine max
MATCGLSTVIFSFVVLMLLSASSHTMVAGARNLLESTLPKPEVPQLPKPELPPLPKVPELPKAELPKIPTFPKPELPKVPELPKLEKPKVPELPKVSEIPKVPKLPKAPEMFKVSELPKLELPKVAEISKILELSKPELPKIPKLPKIHELSKVPELSNPELSKVSELPKVPELPKVPELSKPELPKVPELPKVRELPKPEFSKVPELPKVHELPKPEIPKILEFPKVPQFPKAFSTSNP

SEQ ID NO: 2013 - protein, 235 aa, Brassica napus
MGGFVKTHKTNAYFKRFQVKFKRRRAGKTDYRARIRLINQDKNKYNTPKYRFVVRFTNKDITAQIISASIAGDMVLASAYSHELPRYGLEVGLTNYAAAYCTGLLLARRVLKIRGLDKEYEGNVEATGEDFSVEPADERRPFRALLDVGLIRTTTGNRVFGALKGALDGGLDIPHSEKRFAGFKKDDKQLDADIHRKYIYGGHVADYMRNLAEEEPEKYQSHFSEYIKKGIEADD

SEQ ID NO: 2014 - protein, 249 aa, Triticum aestivum
MLSARTAAAASPAASLWKRGGGAGARGDGCTSCLEVRRRAAAVTVRAAQPKRVEAVAMESAAETAEAEKEVAAEKEVAAAGGGVEDKYGEDRATEELPVTPWAFSVASGYTLLRDPHHNKGLAFTERERDAHYLRGLLPPGVVSQDLQVKKIMHNLRQYKVPLQRYVAMMDLQERNERLFYKLLIDNVEELLPVVYTPTVGEACQKYGSIFRRPQGLYVSLRDRGKVIDVLKNWPERNIQVIVVTDGER

SEQ ID NO: 2015 - protein, 89 aa, Brassica napus
MDIISGLPDELLVKILLLVPTKVAVSTSILSKRWKYLWMWLPKLDYGPRDCSESECEKLRCFLDRTLPLHRAPVIESFSLDLCCSRFKP

SEQ ID NO: 2016 - protein, 131 aa, Brassica napus
LGKREPLPEDMADTNGSAESDSYRFRRFMIYVHAKGMIVDDEYVLIGSANINQRSMAGTKDTEIAMGAYQPHHTWTNKGKHPRGQVYGYRMSLWAEHLGKTGDEFVEPGDLECVRNVNEIAEGNWKTFIDS

SEQ ID NO: 2017 - protein, 399 aa, Ralstonia metallidurans CH34
MTARKHTKLNQETQMSEAQPLATPKPKKSVALSGIAAGNTALCTVGRSGNDLHYRGYDILDIADTCEFEEIAHLLVHGKLPTKSELAAYKVKLKALRGLPANVKAALEWVPASAHPMDVMRTGVSVLGTVLPEKDDHNTPGARDIADRLMASLGSMLLYWYHYSHNGRRIEVETDDDSIAAHFLHLLHGEAPSKLWERAMQTSLILYAEHEFNASTFACRVVAGTGSDMYSAICGGIGALRGPKHGGANEVAFEIQKRYDTPDEAEADIRRRVENKEVVIGFGHPVYTISDPRNVVIKEVARKLSKDAGSMKMFNIAERLETVMADAKKMFPNLDWFSAVSYHMMGVPTAMFTPLFVIARTSGWAAHVIEQRVDNKIIRPTANYTGPENLKFVPIEKRA

SEQ ID NO: 2018 - protein, 93 aa, Glycine max
RTSSQVVTTVNRAGAGLVVQLTGLKSMVGFPTRKTNIAFTSIVGTGGGVHCLQGWPPIGKKKLGTFSYLPDLDDAQLAKEVDSLLRKGWIPCL

SEQ ID NO: 2019 - protein, 231 aa, Agrobacterium tumefaciens str. C58
MDARQMKIKAAEAALSHVQDGMRLGIGTGSTAEEFVRLLAEKVAAGLKVEGVPTSERTARLCVELGVPLKSLDELPELDLTIDGADEVDHVLRLVKGGGGALLREKIVAAASGRMIVIADQSKVVETLGAFPLPIEINPFGQVATRIAIEKLAARSGLSGELTMRSSGDGAFMTDGGHLILDASFGRIPDAEALARELNTIPGVVEHGLFINLASLAIIAGPEGARMMQAV

SEQ ID NO: 2020 - protein, 421 aa, Glycine max
MDDAMGPDLISDLPQSIIESILVQLPIRDAVRTSILSSKWRYKWASITRLVFDDKCVPFSNDREVVEKSVVKFITRVLFLRQGPIHKFQITNSKLQSCPEIDQWILFLSRNDIKELVMELGEGEFFRIPSSLFNCGKLTRLDLSRCEFDPPHSFKGFVCLRSLNLHQVLISPDAIESLISRCPLLESLSLSYFDNLALTICAPNLKYLYLEGEFKDICLEDTPLLVEITIAMYMTDDIAEHFEQISNCNFVKFLGGVPNLEKLVGLIYFTKYLSIGIDFVHPPMMYNNLESIELYQVNFEDMVEILVILRLITSSPNLKELQISGSSNIPVAVDTPDLDFWEKECLSDSTLNKLKTVKLSEMGGWPHEIEFIKYLLGRSPVLETLSIIPCVFDMENNLKMLIELVKCRRASTRAEVIFTRE

SEQ ID NO: 2021 - protein, 90 aa, Glycine max
  misc_feature (5)..(5): Xaa can be any naturally occurring amino acid
  misc_feature (35)..(35): Xaa can be any naturally occurring amino acid
  misc_feature (61)..(61): Xaa can be any naturally occurring amino acid
  misc_feature (83)..(83): Xaa can be any naturally occurring amino acid
RRFFXLIKMYFPMGYDIKHLMKFCSSLHGGGNKLXELLEVERGGVCHQAGSDRGGASCTFXKWRDTFFRGSTEKYAGVLYGLXGESGQTN

SEQ ID NO: 2022 - protein, 294 aa, Saccharomyces cerevisiae
TTPLVHVASVEKGRSYEDFQKVYNAIALKLREDDEYDNYIGYGPVLVRLAWHTSGTWDKHDNTGGSYGGTYRFKKEFNDPSNAGLQNGFKFLEPIHKEFPWISSGDLFSLGGVTAVQEMQGPKIPWRCGRVDTPEDTTPDNGRLPDADKDADYVRTFFQRLNMNDREVVALMGAHTLGKTHLKNSGYEGPWTANNNVFDNSFYLNLLNEDWKLEKNDANNEQWDSKSGYLQLPTDYSLIQDPKYLSIVKEYANDQDKFFKDFSKAFEKLLENGITFPKDAPSPFIFKTLEEQGL

SEQ ID NO: 2023 - protein, 107 aa, Brassica napus
  misc_feature (99)..(99): Xaa can be any naturally occurring amino acid
MDNTNRRRRSKQHKVTLEDSEEVSSIEWKFINMTEQEEDIILRMYRLVGDRWDLIAGRVPGRQPEEIERFWIMRNSDSFAEKRLQLHHSSSHKNNKLHXRPRPSIYP

SEQ ID NO: 2024 - protein, 472 aa, Escherichia coli O157:H7 EDL933
  misc_feature (309)..(309): Xaa can be any naturally occurring amino acid
MTTHLVWFRQDLRLHDNLALAAACRNSSARLLALYIATPRQWAAHNMSPRQAELINAQLNGLQIALAEKGIPLLFREVDDFAASVEIVKQVCAENSVTHLFYNYQYEVNERARDVQVERTLRNVVCEGFDDSVILPPGAVMTGNHEMYKVFTPFKNAWLKRLREGMPECVAAPKVRSSGSIKPAPSITLNYPRQSFDTAHFPVEEKAAIAQLRQFCQNGAGEYEQQRDFPAVEGTSRLSASLATGGLSPRQCLHRLLAEQPQALDGGAGSVWLNELIWREFYRHLMTYYPSLCKHCPFIAWTDRVQWQXNPAHLQAWQEGKTGYPIVDAAMRQLNSTGWMHNRLRMITASFLVKDLLIDWREGERYFMSQLIDGDLAANNGGWQWAASTGTDAAPYFRIFNPTTQGEKFDREGEFIRQWLPELRNVPGKSVHEPWKWAEKAGVKLDYPQPIVEHKEARVQTLAAYEAARKGK

SEQ ID NO: 2025 - protein, 461 aa, Burkholderia cepacia R18194
MSEFEQVVRGRLVDAREVVDDGWLAIRNGRIAARGTGAPPAARDTIDARGQWVLPGVVDGQVHAASQANQEGLGHASRAAAAGGVTVMVDMPYDDPEPVASRAQLDRKIAEAERDCHVDVALYGTLNAKHGLEAAAGLIDGGVCAFKFSTFEATPGRFPRVEEDVLYDAFRLIAPSGLACGVHNQMQDMTRKNIARMIEAGDTGWDAFLRAHPPLIENLATALIYEIGAETGARAHAVHVSTSRGFELCNLFRQAGHRASIETCVQYLMLDHETHTKRFGSKTKHYPPIRPRAEQDLLWTHIARGECTFVSSDHVSWGLERKGDPNVFRNASGGPGLETLLPAFWTGCEQHGVAPTRVAELLATNPARHFLLDDRKGSLDVGADADFVILTPERYAFDPSRSLSAVQWSAFEGMEFTVRIAATYCRGALVYDGERIVNPAGSGRFLKPHGSRSIATHREHA

SEQ ID NO: 2026 - protein, 124 aa, Brassica napus
  misc_feature (113)..(113): Xaa can be any naturally occurring amino acid
  misc_feature (121)..(121): Xaa can be any naturally occurring amino acid
  misc_feature (123)..(123): Xaa can be any naturally occurring amino acid
MLVAAASTLFSLSSAVFTRRRSFRVSATLSREPSPLLRAAHHTVDSYVKSGMVVGLGSGEASDLAIRYLGHQLRSGSVQDVVGVPMSARSASEAAKYGVPLKHFRDDFQIDFXFHDADAVXKXT

SEQ ID NO: 2027 - protein, 329 aa, Triticum aestivum
  misc_feature (245)..(245): Xaa can be any naturally occurring amino acid
  misc_feature (279)..(279): Xaa can be any naturally occurring amino acid
  misc_feature (287)..(287): Xaa can be any naturally occurring amino acid
  misc_feature (301)..(301): Xaa can be any naturally occurring amino acid
MKTLLILTILAMATTIATANMQVDPSSRVQWPQERPFPQSQQPFSQQPQQIFPQPQQTFPHQPQQAFPQPQQTFPHRPQQQFPQPQQPQQPFPQPQQPQLPFPRQPQQPFPQTQQPQQPFPQQPQQPFPQTQQPQQPFPQLQQPQQPFPQPQQQLPQPQQPQQSFPQQQRSFIQPSLQQQLNPCKNILLQQCKPASLVSSLWSIIWPQSDCQVMRQQCCQQLAQIPQQLQCAAIHSVVHSIIMQXKQQQQQQQQGMHIFLPLSQQQQVGQGSLVQGQGXIIQPQQPXAQLEAIRSLVLQTXLPSMCNVYVPPECSIMRATMPATIPATK

SEQ ID NO: 2028 - protein, 343 aa, Haloarcula marismortui ATCC 43049
MRTAVLVEPTEFELEDRPRPSPGPDEVLVAVRDVGICGSDVHYYEHGRIGDYVVEDPLVLGHESAGKVVEVGENVTDHEPGDRVALEPGVPCRRCAHCKRGDYHLCESVRFMATPPHDGAFTEYVSWPADFAYTLPESVSTAEGALCEPLSVGIHACRRGSVGTGDTVLITGAGPIGLMVLEAARAAGATDIILTDVVKEKLEFAEKRGADLTVDVTETDLDTAVAEYTDGVGADVVVEASGAEPSIKSTIDVVRRGGTVVLVGLASEAEVPFDVLELIDNEVDVHGSFRYKNTYDAAVDLLADGEVDVEGIIDFESELEDIDDAFRRSMEPTVVKGMISLDS

SEQ ID NO: 2029 - protein, 301 aa, Gibberella zeae PH-1
MPFKLVKNSAYYSRYQTKYKRRQQGKTDYYARKRLITQAKNKYNAPKYRLVVRFTNKDIICQIVTSEISGDKVFISAYAHELKAYGIEHGLTNWAAAYATGLLVARRALKKLGLDEDFAGVEEADGEYKLTEAAETDDGERRPFKVFLDVGLKRTSTGARVFGAMKGASDGGILVPHSEKRFPGYDMETKELDADTLRNYIFGGHVAEYMETLADDDEERFRSQFQKYVDDDVEAEGLEDLYTEAHAAIREDPFKKVESDAPKKTKEEWKEISQKYKSKKLTKEEKEKRVQERIQEIMQRD

SEQ ID NO: 2030 - protein, 270 aa, Exiguobacterium sp. 255-15
MQYAKLSNGVTIPQIGFGVWQVDEETEAPAAVAEALRVGYRHIDTAAVYKNERGVAKGIKESGVNREDLFLTSKVWNDDIRAGRTKEAFAESLERLETDYLDLYLIHWPVEGYIEAWKAMVELYEAGKIKAIGVSNFKEHHLDTLAEEGLMTPMINQVELHPQLPQHELHEYLQDHSIQVEAWSPLMQGKFLEINDFKEIAEKHGKSPSQVVLRWHLDNGIVALPKSVTPERIAENFDVFDFQLDADDLEKIDRLATDVRLGPDPDEIDF

SEQ ID NO: 2031 - protein, 438 aa, Glycine max
MGEKSNVGGDAINTTLLHGKYELGRLLGHGTFAKVYHARHLKTGKSVAMKVVGKEKVVKVGMMEQIKREISAMNMVKHPNIVQLHEVMASKSKIYIAMELVRGGELFNKIARGRLREEMARLYFQQLISAVDFCHSRGVYHRDLKPENLLLDDDGNLKVTDFGLSTFSEHLRHDGLLHTTCGTPAYVAPEVIGKRGYDGAKADIWSCGVILYVLLAGFLPFQDDNLVALYKKIYRGDFKCPPWFSSEARRLITKLLDPNPNTRITISKIMDSSWFKKPVPKNLMGKKREELDLEEKIKQHEQEVSTTMNAFHIISLSEGFDLSPLFEEKKREEKELRFATTRPASSVISRLEDLAKAVKFDVKKSETKVRLQGQEKGRKGKLAIAADLYAVTPSFLVVEVKKDNGDTLEYNQFCSKELRPALKDIVWRTSPAENPTLA

SEQ ID NO: 2032 - protein, 444 aa, Ralstonia metallidurans CH34
MGKIPEGDARDAENAIAAARAAFEAWSATPPSVRADYIRKIAEGLKARCEELAQMIAGEVGMPIKLARAIQVGGPVYNWGQAAALLDQFAFEEQVGNSLVVREPVGVVAAITPWNYPLNQITLKVAPALAAGCTVVLKPSEVAPLNAFVLAEVIEAAGLPPGVFNLVTGYGPVVGEVLASHPEVDMVSFTGSTRAGKRVSELAAQSVKRVALELGGKSASVILDDADLPTAVKGTIGACYLNSGQTCSAHTRMLVPRSRYEEVKAIAAKVVEGFTVGDPLADTTKLGPLISAVQKERVTGYIRRGLDEGAELVAGGPDTPAGLDRGFFVKPTVLGNVDPKATVAQEEIFGPVLSVICYDTEDEAIRIANDSIYGLGGGVWSGDESRAIRVARRIRTGQVDINGGPFNMNAPFGGFKQSGNGREGGKFGLEEFLEYKSLQLKKPA

SEQ ID NO: 2033 - protein, 462 aa, Thermosynechococcus elongatus BP-1
MVIASVNPTTAEVLKTFSPLGAEEVDRAIAQAATTFETYRLTSFEQRAQWLENTANLLQQQRETLARLMTLEMGKPIAEARAEIDKCAWVCRYYAEQGAAFLEPEFIPTEASYSAIHYQPLGIILAVMPWNFPFWQVFRFAAPALMAGNVALLKHASNVPQCALAIAQIFRQAGFPEGVFQTLLIPGSAVADLVADPRIKAATLTGSEAAGTSLAQAAGQHLKKTVLELGGSDPFIVMPSANISQAIATAVQARMINNGQSCIAAKRFIVHEAVYDTFAEGIKAAFESWVIGDPLEPTTQLGPLATAAIRDELHAQVELALGHGAKAFYRRSLDLPTQCRQGYFFGPTILTEVTPNNPVFTQELFGPVAMLFRVSSLTAAIELANATPFGLGASAWTQDSDEAEILVRDLEAGAVFINAMVKSDPRLPFGGIKTSGYGRELGRAGLLEFVNIKTVCRANTHS

SEQ ID NO: 2034 - protein, 417 aa, Streptomyces hygroscopicus
MTPQQRSAVLSRAAALLESRAEEFSALITSESGVCRKETLREVSRAAGNLKVAAAEAERIRGESIPLPDGTRLAVTLPEPVGVVLGITPFNRPLNQVVVKAAPALAAGCPLLLKPSEKTPLTALAFAELLIEAGCAKDMLGVVTGEPGELGPLLASHPDVAMVTFTGSVATGHSVAALAAGKRQLLELGGNDPLFVLPDADLPHAARLAAGGACATAGQSCRGIKRIFVWEEVADEFTDLLSTEVAGKQAGDPRRSDTDLGPLISEEAALVVERRIADAVRDGARLVTGGERDGALVHPAVLDRVPADTELVREETFGPVAPVIRVRGADEAVRLSNSTAYGLQAGVLTRDSARFWDLAARLRVGAVNLGEGPHFDSPHIPFGGVKACGIGREGIRYAIAEMTVTKTVTLPGPYGTG

SEQ ID NO: 2035 - protein, 227 aa, Clostridium acetobutylicum ATCC 824
MAKDNLKKISAKKALEYIKDNTVIGLGGGETIGYLCDYLKEKIKSGFNIKVVTPSIKTRNTCIENGIEVLYTSSVEHLDVAFDGCDQLDEKLNALKSCGGIHSKEKIIASMADKYILLTNESKFVKKLDSTYPIVLEILEESAGYVKRRISEIGGKATFRSSAAKDGFTITDSGNLLLDVFFDELGDAKELQKGLKGITGVVETSLFVDLVSQAIIAYEDDIKIISK

SEQ ID NO: 2036 - protein, 237 aa, Zea mays
ELLPVVYTPTVGEACHKYGSIYRRPQGLYISLKDKGKILEVLKNWPERSIQVIVVTDGERILGLGDLGCQGMGIPVGKLSLYTALGGVRPSACLPITIDVGTNNEALLNDDFYIGLRQRRATGEVTHSHPFHLIVVEYHELVEEFMAAVKQNYGEKVLTQFEDFANHNAFDLLEKYRESHLVFNDDIQGTASVVLAGLLAALKVVGGTLADHTYLFLGAGEASRFAYTRSELWTAFR

SEQ ID NO: 2037 - protein, 486 aa, Rubrobacter xylanophilus DSM 9941
MQSRVIESQIESRNYIGGEWVPADSGEVEEVRNPARPSEVLGTAPRSDRGEMERAVAAAQEALPGWRSALPAARGQILLRAADIIDSRSEELARLMALEAGKPLGESRAEVSRAAAIFRYYGSEGWRLYGVEAPSTRPGVRITSTREPLGVVGLITPWNFPLAIPSWKMAPALICGNTVVIKPAANAVLNAAELVRILEEAGLPGGVVNLVMGPGGSSGDALVRDERVRAISFTGSTAVGLSIQERAAGKKVQLEMGGKNPYVVMEDADLEDAAAKVAYGAFGYAGQKCTASSRAVVVEEVYEAFLEQVVEATRALKLGEPLDEEAVIGPVINESQYESILGAIEQAREDGRVVLDGGATGPREEGYYISPVIVADVDNGSKTAREEIFGPVLAVIKARDFDHAVEIANDTRYGLTAGIATRSLRYAEEFIERSQTGLVNVNLPTAGVEFQVPFGGSKQSGVGGREQGMAAIEFYTGWKTASVLAL

SEQ ID NO: 2038 - protein, 449 aa, Xylella fastidiosa Temecula1
MNPTLIVNARLVNEGREFDSDLRIENGRIARIDTGLSAQSKDIVIDAAGRRLLPGMIDDQVHFREPGLTHKGDIASESAAAVAGGLTSFMDMPNTNPPTLGAAALQAKYDAARGRAWGNYGFYLGASNDNLAAIQALDPKTSPGIKVFMGASTGNMLVDNETTLEGIFRYAPTPIITHCEDTPTINATLAKYHSRYGNTLSAEQHPDIRSRQACLKSSQLAVSLAKKNGTRLHVLHISTADELRLFEAGPLVDAAGKRCKQITAETCIHFLHFDRMDYARLGNLIKCNPAIKEASDREALIAALAKDVIDVLATDHAPHTWEEKQQPYAQAPSGLPLVQYALVAALELVHAGRLSVTEIVRKFAHAPAQLFDVIERGFLREGYWADLVLVEDTPFTVKRQEILSKCGWSPFEGTTFRSRIASTWVNGNHVWDGNRLVGVPNGQRLEFDR

SEQ ID NO: 2039 - protein, 230 aa, Lycopersicon esculentum var. cerasiforme
ENVYMAKLADRAESDEEMVEFMEKVSNSLGSEELTVEERNLLSVAYKNVIGARRASWRIISSIEQKEESRGNEEHVNSIREYRSKIENELSKICDGILKLLDSKLIPSATSGDSKVFYLKMKGDYHRYLAEFKTGAERKEAAESTLTAYKAAQDIASAELAPTHPIRLGLALNFSVFYYEILNSPDRACNLAKQAFDEAIAELDTLGEESYKDSTLIMQLLRDNLTLWTS

SEQ ID NO: 2040 - protein, 418 aa, Schizosaccharomyces pombe
MLKLAESGAILQDYLDDYFYTSWYTGNRNLIQLDHYGFPTASNFELNPKSTDNCGTVDFQGIPWGNKAIGKRKNFRLYRLHTYSLSCNHSDWSPEELSLDTVQVAAEDSFYEFQRFLKNPNCLRNHHHLCKSVKVVGEHSVIYVSNNSIRMENTLHDNSVQIIDLKNNILQKKAISCLDTTNAVGCLGTLYGQYCIFNFKNGSFSTRKLSDDSINHIQLFSEKKFILGCNDGAVYVEDVQRTSPILVYRCSNAVNCVQLFDETPLALVCTDSKDAMLIDIRSNSVSAKLPHSDSVLTGSWHPNGNILATGGQDTTAKVWDIRALGKSFRNLGSQMSAVTNLCFSPLGESLAVTEQADFVQLFDTKLFNTSQVIDFFGEIAGTAYSSSGDSLFIGVDDPMLGGILEFRRPLQHPLSFIF

SEQ ID NO: 2041 - protein, 263 aa, Oryza sativa (japonica cultivar-group)
MEGRVLRRSVTLADQLAAVGPAGTAAATAAAGSCNLRDLLKLRDEDDLAAGRRAAVTLASAMAAERLTVAPASSAAAAAAAARTLLDIIRDDQLPSSSGGGGEGGDPLVRRAVSLPAPVTATPPPPPPPPETPPRQLPSVSPPTVGEEEEEEQGERVSLMALLEQTERQWSAGSGATVQQHLASPSAAASASVSAAAEDEAEAEAGKGAAGGGCCCVCMARAKGAAFIPCGHTFCRTCARELLAGRGRCPLCNAAILDVLDIF

SEQ ID NO: 2042 - protein, 508 aa, Malus x domestica
MGFAKKEHEFLSAIGLAPENPGGFINGKWKASGPVISTVSPSNNQEIAKVTEVSMEEYEEGLRSCNDAAKTWKSLPAPKRGEIVRQIGDALREKLQHLGKLVSLEMGKILAEGIGEVQEVIYMCDFAVGLSRQLNGSIIPSERPDHMMFEVWNPLGIVGVITAFNFPCAVLGWNACIALVCGNCVVWKGAPTTPLVTIAVTKLIAEVLEKNNLPAAIFTAFCGGAEIGEAIAKDTRIPLVSFTGSSKVGAKVQQIVTERFGKCLLELSGNNALIVMDDADVGLAVRSIFFAAVGTAGQRCTTCRRLYLHESIYQNVLDKLVGLYNQVKIGDPLEEGTLVGPVHTKASRENFEKGISTIKSQGGKILTGGSVIESDGNFVQPTIVEIASNASVVKEELFGPVLYVMKFKTLEEAIALNNSVPQGLSSSIFTSKPNTIFKWIGPHGSDCGIVNVNIPTNGAEIGGAFGGEKATGGGREAGSDSWKQYMRRSTCTINYGTELPLAQGINFG

SEQ ID NO: 2043 - protein, 449 aa, Arabidopsis thaliana
MSGSRRKATPASRTRVGNYEMGRTLGEGSFAKVKYAKNTVTGDQAAIKILDREKVFRHKMVEQLKREISTMKLIKHPNVVEIIEVMASKTKIYIVLELVNGGELFDKIAQQGRLKEDEARRYFQQLINAVDYCHSRGVYHRDLKPENLILDANGVLKVSDFGLSAFSRQVREDGLLHTACGTPNYVAPEVLSDKGYDGAAADVWSCGVILFVLMAGYLPFDEPNLMTLYKRVRICKAEFSCPPWFSQGAKRVIKRILEPNPITRISIAELLEDEWFKKGYKPPSFDQDDEDITIDDVDAAFSNSKECLVTEKKEKPVSMNAFELISSSSEFSLENLFEKQAQLVKKETRFTSQRSASEIMSKMEETAKPLGFNVRKDNYKIKMKGDKSGRKGQLSVATEVFEVAPSLHVVELRKTGGDTLEFHKFYKNFSSGLKDVVWNTDAAAEEQKQ

SEQ ID NO: 2044 - protein, 579 aa, Glycine max
MCGILAVLGCSDSSQAKRVRVLELSRRLKHRGPDWSGLHQYGDNYLAHQRLAIVDPASGDQPLFNEDKTVVVTVNGEIYNHEELRKQLPNHTFRTGSDCDVIAHLYEEHGENFMDMLDGISSFVLLDTRDNSFIVARDAIGVTSLYIGWGLDGSVWISSELKGLNDDCEHFESFPPGHLYSSKERAFRRWYNPPWLSLAIPSAPYDPLALRHAFEKLWIKRLMTDVPFGVLLSGGLDSSLVAAVTARYLAGTKAAKQWGTKLHSFCVGLEGAPDLKATKEVAEYIGTVHHEFHYTVQDGIDAIEDVIYHIETYDVTTIRASIPMFLMSRKIKSLGVKWVISGEGSDVFFGGYLYFHKAPNKEEFHQETCRTIIVLHRYDCSRANKSTFVWGLEARVPFLDKEFIRVAMNIDPECKMIKKEEGRIEKWALRRAFDDEEHPYLPKHILYRQKEQFSDGVGYGWIDGLKAHAEKHVTDRMMLNAANIFPFNTPTTKEAYHYRMIFERFFPQNSCRLTVPGGTSVACSTAKAVEWDAAWSNNLDPSGRAALGVHASAYGNQVKAVEPEKIIPKMEVSPLGVAI

SEQ ID NO: 2045 - protein, 160 aa, Triticum aestivum
  misc_feature (19)..(19): Xaa can be any naturally occurring amino acid
  misc_feature (43)..(44): Xaa can be any naturally occurring amino acid
LWGSRHDGTLESSRSGASXTYRSSPRHPQGGHIVIKARPCKVXXVSTPKTGKHGHAKCHFVAIDILMGKKLEDIVPSSHNCDVPHVDRQDYQLIDITDDGYVSLLTESGNTKDDLKLPTDDVLLGQIKTGFADGKDLILSVMSAMGEEQICAVKEIGGGK

SEQ ID NO: 2046 - protein, 190 aa, Xylella fastidiosa 9a5c
MHTHVSHAFASKLSLLSLDRFPMSSIYTFTFTRLDGRPQALADWRGQVLLLVNVASRCGFTPQYAGLEMLWQRYRDAGLIVIGFPCDQFAGQEPGDEAKIAEFCTLNYGVDFPMAAKIKVNGADAHPLWQWLKHRRRGLFGMAAIKWNFTKFLIGRNGQPIARYSPIKSPEQLEVHIVRALGEEGGGNTH

SEQ ID NO: 2047 - protein, 318 aa, Zea mays
MEAEAAAKRTRDSGEDAAAAGISAVIPGWFSEISPMWPGEAHSLKVDKVLFQGKSDYQNVMVFQSSTYGKVLVLDGVIQVTERDECAYQEMITHLPLCSIKDPKKVLVIGGGDGGVLREVSRHSSVEQIDICEIDKMVVDVSKQFFPHLAVGFEDPRVSLHIGDGVAFLKNAPEGTYDAVIVDSSDPIGPAQELFEKPFFQLVARALRPGGVVCTQAESIWLHMHIIEDIVVNCRQVFKGSVNYAWTTVPTYPSGVIGFMLCSTEGPAVDFQHPVFNIEEDEHPMKSKGPLKFYNSEIHTASFCLPSFAKRVIESKAN

SEQ ID NO: 2048 - protein, 461 aa, Zea mays
  misc_feature (172)..(172): Xaa can be any naturally occurring amino acid
  misc_feature (236)..(236): Xaa can be any naturally occurring amino acid
MAEPAAAGRKTRVGPYEVGKTIGEGSFAKVKHAHDSRTGAVRAIKVLDRNHVLRHKMVEQIKREISTLKLIKHPNVVQLHEVMASRTKIYMVLEFVDGGELFDKIVNSGRLGEDEARIYFHQLINAVDYCHSRGVYHRDLKPENLLLDSHGTLKVSDFGLSAFAPQTKEDGXLHTACGTPNYVAPEVLADKGYDGMAADVWSCGIILFVLMAGYLPFDDANLMILWLDTYPLMMPXLMRLYKLICHATFSCPPWFSSGARKFIKRILDPNPDTRITIAEILEDEWFKKGYKPPRFEQGEDVSLDDIDAAFNDSEDRLVAEKREKPESMNAFALISRSQGFNLGNLFEKEMMGMVKRETSFTSQCTAQEIMTKIEDACGPLGFNVRKQNYKMKLKGDKSGRKGHLSVATEVFEVAPSLHMVELRKTGGDTLEFHSFYKNFSSELKDIVWKAESDANNKQTNK

SEQ ID NO: 2049 - protein, 491 aa, Pseudomonas mendocina
MDTTRPAYQNLELQPLAGQWRAGSSGRPLEVFDPYNDELLLRIALASREDLDAAYRKARDSQREWATTAPAERARVLLEAVKIFDERREEIIDWIIRESGSTRIKAQIEWGAARAITLESASLPNRVHGRIIASNISGKESRVYRAPLGVIGVISPWNFPLHLTARSLAPALALGNAVVVKPASDTPITGGLLLARIFEEAGLPAGVLSVVVGSGAEIGDAFVEHPVPALISFTGSTQVGRNIGRIASGGEHLKHVALELGGNSPFVVLADADVEQAVNAAVVGKFLHQGQICMAINRIIVEQPLLEDFTRRFVERVKALPYGDPSKPGTVVGPVINARQLAGLKEKIATAKAEGATLLLGGEPQGNVMPPHVFGNVTADMEIAREEIFGPLVGIQSARDAEHALELANSSEYGLSSAVFTASLERGVQFARRIHAGMTHVNDIPVNDEPNAPFGGEKNSGLGRFNGDWAIEEFTTDHWITLQHSPRPYPF

SEQ ID NO: 2050 - protein, 597 aa, Zea mays
LPPQPPPSSPPPSVLIVGAGLAGLAAARHLIALGFKVAVIEGRLRPGGRVFTKTMRSSAVEYPDTVAAADLGGSVLTGINGNPLGVIARQLGFPLHKVRDKCPLYLPDGRPVDPDMDARVEAAFNQLLDKVCQLRQVIADGVPHGVDLSLGMALEAFRAAHGVAAEHEERMLLDWHLANLEYANAAPLADLSMAFWDQDDPYEMGGDHCFIPGGNSQFVRAFSDGIPVFYGQNVKRIRYGRDGVMVHTDKQAFCGDMVLCTVPLGVLKKGDIKFVPELPAQKKEAIQRLGFGLLNKVVMLFPYDFWDGRIDTFGHLTEDSRQRGEFFLFYSYSSVSGGPLLIALVAGESAVKFEQASPMENVEKVLETLRKIFSPKGIEVPNPLQAICTRWGTDRFTYGSYSYVAIGASGDDYDILAESVHDRVFFAGEATNRRYPATMHGALLSGYREAANILRAARRRAKNVYSPEKMDINVDVKVGVNGELKDTVRDSCIDLDDLFRSPDAAFGGFSALHDPSTSEPDSVSLLRVGIGARKLGAGSLFLYGLIMRKHVAVLAAIEGDEQRLSIMYRDFGTKLVGLDSLGDAGESLISRIKAARK

SEQ ID NO: 2051 - protein, 117 aa, Hordeum vulgare subsp. vulgare
KHMIEDDCADNGIPLPNVNSKILSKVIEYCNKHVQAKPADAAGPGASDALPPADDLKNWDAEFVKVDQATLFDLILAANFLNIKGLLDLTCQTVADMIKGKTPEEIRKTFNIKNDFS

SEQ ID NO: 2052 - protein, 124 aa, Vicia faba
  misc_feature (65)..(65): Xaa can be any naturally occurring amino acid
MASTKKITLKSSDGEAFEVDEAVALESQAIKHMIEDDCADSGIPLPNVTSKILAKVIEFCKKHVXAAASDDKPTEDELKAWDADFVKVDQVTLFDLILAANYLNIKNLLDLTCQTVADMIKGKT

SEQ ID NO: 2053 - protein, 141 aa, Zea mays
MLMLPYTQKNALVLGVSIAMYCPAYTFLFQVIPGNETRVMKMMNRLTDLGPKIIMGKDSGLHTSGHAYREELEEVLRIVKPQHFLPVHGELLFLKEHESLGRSTGIRHTTVIKNGEMLGVSHLRNRRVLSNGFVSLGKEDL

SEQ ID NO: 2054 - protein, 335 aa, Glycine max
MADESVVESPVKRQRDDDEENAVSVSMVVEGGKVPLSNGLCSVIPGWFSEISSMWPGEAHSLKVEKILFQGKSEYQNVMVFQSSTYGKVLVLDGVIQLTERDECAYQEMITHLPLCSIPNPKKVLVIGGGDGGVIREVAHHSSVEKIDICEIDKMVVDVSKQYFPDVAVGYDDPRVTLHIGDGVAFLKEVPEGTYDAVIVDSSDPIGPAQELFEKPFFSSVAKALRPGGVVCTQAESIWLHMDIIEDIVANCRQIFKGSVNYAWTTVPTYPSGMIGFMLCSTEGPPVDFKHPVNPIDENESQKSVRPLKFYNSEIHTAAFCLPSFAKRKIGSKAN

SEQ ID NO: 2055 - protein, 76 aa, Triticum aestivum
MGLCSCCCRCLEILCAILLPPLGVCLRHGCCSMEFWISVLLTILGYLPGVLYAAYVICSVDPDRVRRRDDDYIYVA

SEQ ID NO: 2056 - protein, 214 aa, Triticum aestivum
  misc_feature (58)..(58): Xaa can be any naturally occurring amino acid
MAAVEVCVKAAAGKPDTLGDCPVSQRVLLTLEEKKVPYEVKLVDLGNKPEWFLEINPXGKVPVLKGDDGKCIADSDVITQVIEEKFPTPSLVTPPEYASVGSKIFPAFVKFLKSKDASDGSEKALLDELQALDEHLKAHGPYINGARAAAADLSLAPKLFHLQVALEHFKGWKIPENLTNVHAYAKALFSRESFVKTKPSEEHVIAGWAPKVNA

SEQ ID NO: 2057 - protein, 113 aa, Vicia faba
KHMIEDDCADETGIPLPNVTSRILAKVIEYCKKHVEAPKIDEYGMPVDGKDMKKWDAEFVKVDQDTLFDLILAANYLDIKSLLDLTCKTVANMMDGRTPDEIRRTFNIKNDFT

SEQ ID NO: 2058 - protein, 153 aa, Glycine max
  misc_feature (72)..(72): Xaa can be any naturally occurring amino acid
MADSDNDSGGAHNGGKGSEMSPREQDRFLPIANVSRIMKKALPANAKISKDAKETVQEVRVKVSSAFITGEXASDKCQREKRKTINGDDLLWAMTTLGFEDYVEPLKGYLQRFREMEGEKTVAARDKDAPPLTNATNSAYESANYAAAALVES

SEQ ID NO: 2059 - protein, 354 aa, Neisseria meningitidis Z2491
MKAARFYDKGDIRIEDIPEPTVAPGTVGINVAWCGICGTDLHEFMEGPIFIPPCGHPHPISGESAPVTMGHEFSGVVYAVGEGVDDIKVGQHVVVEPYIIHDDVPTGEGSNYHLSKDMNFIGLGGCGGGLSEKIAVKRRWVHPISDKIPLDQAALIEPLSVGHHAYVRSGAKAGDVALVGGAGPIGLLLAAVLKAKGIKVIITELSKARKDKARESGVADYILDPSEVDVVEEVKKLTNGEGVDVAFECTSVNKVLDTLVEACKPAANLVIVSIWSHPATVNVHSVVMKELDVRGTIAYCNDHAETIKLVEEGKINLEPFITQRIKLDELVSEGFERLIHNNESAVKIIVSPNL

SEQ ID NO: 2060 - protein, 610 aa, Zea mays
  misc_feature (104)..(104): Xaa can be any naturally occurring amino acid
  misc_feature (245)..(245): Xaa can be any naturally occurring amino acid
  misc_feature (387)..(387): Xaa can be any naturally occurring amino acid
  misc_feature (540)..(540): Xaa can be any naturally occurring amino acid
MCGILAVLGCADEAKQGSSKRSRVLELSRRLKHRGPDWSGLRQVGDCYLSHQRLAIIDPASGDQPLYNEDQSVVVAVNGEIYNHLDLRSRLAGAGHSFRTGSDXEVIAHLYEEHGEEFVDMLDGVFSFVLLDTRHGDRAGSSFFMAARDAIGVTPLYIGWGVDGSVWISSEMKALHDECEHFEIFPPGHLYSSNTGGFSRWYNPPWYDDDDDEEAVVTPSVPYDPLALRKAFEKAVVKRLMTDVXPFGVLLSGGLDSSLVATVAVRHLARTEAARRWGTKLHSFCVGLEGSPDLKAAREVAEYLGTLHHEFHFTVQDGIDAIEDVIYHTETYDVTTIRASTPMFLMSRKIKSLGVKMVISGEGSDELFGGYLYFHKAPNKEELHREXTCRKVKALHQYDCLRANKATSAWGLEARVPFLDKEFINAAMSIDPEWKMVQPDLGRIEKWVLRKAFDDEEQPFLPKHILYRQKEQFSDGVGYSWIDGLKAHATSNVTDKMLSNAKFIFPHNTPTTKEAYYYRMVFERFFPQKSAILTVPGGAXSVACSTAKAIEWDAQWSGNLDPSGRAALGVHLAAYEHQHDPEHVPAAIAAGSGKKPRTIRVAPPGVAIEG

SEQ ID NO: 2061 - protein, 426 aa, Thermus thermophilus HB27
MILIRNVRLVDARGERGPADVLIGEGRILSLEGGEAKQVVDGTGCFLAPGFLDLHAHLREPGEEVKEDLFSGLLAAVRGGYTDLVSMPNTKPPVDTPEAVRALKEKAKALGLARLHPAAALTEKQEGKTLTPAGLLQEAGAVLLTDDGRTNEDAGVLAAGLLMAAPLGLPVAVHAEDAGLRRNGVMNDGPLADLLGLPGNPPEAEAARIARDLEVLRYASRRSPATPRLHVQHLSTKRGLELIREAKRAGLPVTAEATPHHLTLTEEALRAFNPLFKVAPPLRGEEDREALLEGLLDGTLDAIATDHAPHTLAEKEKDLLRAPFGIPSLEVAFPLLYTELHLKRGFPLPRLVELFTDGPRRVLGLPPLHLEEGAEASLVLLSPKERPVDPSAFASKARYSPWAGWVLGGWPVLTLVAGRIVHEALK

SEQ ID NO: 2062 - protein, 109 aa, Glycine max
  misc_feature (21)..(21): Xaa can be any naturally occurring amino acid
  misc_feature (66)..(66): Xaa can be any naturally occurring amino acid
VTVLIKPHFGYLLKRATCRSXPYMQPGFFDLIRMKLPTVYDIKHLIVLYNSPHGGLNKLAKSLQLXQIGACHQAGSNSSLTPGTFRQLTERFIRGSAKKDNCVTDHISH

SEQ ID NO: 2063 - protein, 320 aa, Escherichia coli
MIKKIGVLTSGGDAPGMNAAIRGVVRSALTEGLEVMGIYDGYLGLYEDRMVQLDRYSVSDMINRGGTFLGSARCPEFRDENIRAVAIENLKKRGIDALVVIGDGGSYMGAMRLTEMGFPCIGLPGTIDNDIKGTDYTIGFFTALSTVVEAIDRLRDTSSSHQPISVVEVMGRYCGDLTLAAAIAGGCEFVVVPEVEFSREDLVNEIKAGIAKGKKHAIVAITEHMCDVDELAHFIEKETGRETRATVLGHIQRGGSPVPYDRILASRMGAYAIDLLLAGYGGRCVGIQNEQLVHHDIIDAIENMKRPFKGDWLDCAEKMY

SEQ ID NO: 2064 - protein, 438 aa, Oryza sativa (japonica cultivar-group)
MTAESARDPRGPYMSGCHVGRPASPSTGAVDEPCRCGNAHRLRPRLQKPHQKPSPRSRSPLDPAPRRWRRLRRWELVVGLRELYGVRDVFGVAAGYRGFYGPDADHARLDLAAVDDWHKKGGTVLKTTRGGFDLNKIVDGIVARGYTQCLTSNTFYHDYILLKVYAIGGDGTMRGAVAIFNEFKRRGLNISITGIPKTVDNDIGIIDRSFGFQTAVEIAQQAIDAAHVEAVSAVNGIGLVKLMGRSTGHIALHATLSSRDVDCCLIPEVDFYLEGKGGLFEFLYERIKQKGHAVVVVAEGAGQELIPRTDDQKREQDESGNIVFLDVGPWLKSELGKWWKREHPSELFTVKYIDPTYMIRAVPANATDNLYCTLLAHSAIHGIMAGYTGFVPGPINGNYSYIPLEDVAVAKNPVDVNDHKWAWVRSVTNQPDFMKPKY

SEQ ID NO: 2065 - protein, 337 aa, Brassica napus
  misc_feature (188)..(189): Xaa can be any naturally occurring amino acid
  misc_feature (193)..(193): Xaa can be any naturally occurring amino acid
  misc_feature (196)..(198): Xaa can be any naturally occurring amino acid
  misc_feature (207)..(207): Xaa can be any naturally occurring amino acid
  misc_feature (212)..(212): Xaa can be any naturally occurring amino acid
  misc_feature (220)..(220): Xaa can be any naturally occurring amino acid
  misc_feature (222)..(222): Xaa can be any naturally occurring amino acid
  misc_feature (253)..(253): Xaa can be any naturally occurring amino acid
  misc_feature (255)..(255): Xaa can be any naturally occurring amino acid
  misc_feature (268)..(268): Xaa can be any naturally occurring amino acid
  misc_feature (273)..(273): Xaa can be any naturally occurring amino acid
  misc_feature (281)..(281): Xaa can be any naturally occurring amino acid
  misc_feature (296)..(296): Xaa can be any naturally occurring amino acid
MGATTVTHVTTINPTNTNIHGPAIDEVDGLIRVYKDGHVERFQLVPCVGPSLPLDLAVACSDVHIDELTNVWARLYVPTVTKSLSVSSSKLPLLVYFHGGGFCVGSVSWSCYHEFLARLSASSRCIIMSVNYRLAPENPLPAAYEDGVNAILWLKKTRDDNLWSKLCDFGKIFLAGDSAGGNIANHVXXRLQXVDXXXQPLKIEGTXLIQPXFGGEARTXSXRRVENNMKSSVLTLAASDAWWRLALPRGANXEXPYCKPAKSKTRTXVCVAXMDVLMDRXMEMCYEIDNEEMIKXVVYKGVGHAFQILGKSQLAHTMTLEMLCHIDDFIHQCDPSI

SEQ ID NO: 2066 - protein, 161 aa, Triticum aestivum
  misc_feature (91)..(91): Xaa can be any naturally occurring amino acid
  misc_feature (106)..(106): Xaa can be any naturally occurring amino acid
MAPTVMASSATSVAPFQGLKSTAGLPVSRRSSSAGLSSVSNGGRIRCMQVWPIEGIKKFETLSYLPPLSTEALLKQVDYLIRSKWVPCLEXFSKVGFVFREHNSSXPGYYDGRYWDNVGKLAMFRGGTTLQKVLKRRWGGVKERSNLNAYVPRHRVSNLQG

SEQ ID NO: 2067 - protein, 143 aa, Glycine max
MGERVKGTVKWFNVTKGFGFISPDDGGEDLFVHQSSIKSDGYRSLNENDAVEFEIITGDDGRTKANDVTAPGGGALSGGSRPVEGGGDRGGRGGGGEGYEGGEEGHISRDCPQGGGGGGGYGGGGGRGGGGGGGGCFSCGESE

SEQ ID NO: 2068 - protein, 294 aa, Saccharomyces cerevisiae
TTPLVHVASVEKGRSYEDFQKVYNAIALKLREDDEYDNYIGYGPVLVRLAWHTSGTWDKHDNTGGSYGGTYRFKKEFNDPSNAGLQNGFKFLEPIHKEFPWISSGDLFSLGGVTAVQEMQGPKIPWRCGRVDTPEDTTPDNGRLPDADKDADYVRTFFQRLNMNDREVVALSGAHTLGKTHLKNSGYEGPWTANNNVFDNSFYLNLLNEDWKLEKNDANNEQWDSKSGYLQLPTDYSLIQDPKYLSIVKEYANDQDKFFKDFSKAFEKLLENGITFPKDAPSPFIFKTLEEQGL

SEQ ID NO: 2069 - protein, 427 aa, Escherichia coli O157:H7 EDL933
  misc_feature (27)..(27): Xaa can be any naturally occurring amino acid
MADTKAKLTLNGDTAVELDVLKGTLGXDVIDIRTLGSKGVFTFDPGFTSTASCESKITFIDGDEGILLHRGFPIDQLATDSNYLEVCYILLNGEKPTQEQYDEFKTTVTRHTMIHEQITRLFHAFRRDSHPMAVMCGITGALAAFYHDSLDVNNPRHREIAAFRLLSKMPTMAAMCYKYSIGQPFVYPRNDLSYAGNFLNMMFSTPCEPYEVNPILERAMDRILILHADHEQNASTSTVRTAGSSGANPFACIAAGIASLWGPAHGGANEAALKMLEEISSVKHIPEFVRRAKDKNDSFRLMGFGHRVYKNYDPRATVMRETCHEVLKELGTKDDLLEVAMELENIALNDPYFIEKKLYPNVDFYSGIILKAMGIPSSMFTVIFAMARTVGWIAHWSEMHSDGMKIARPRQLYTGYEKRDFKSDVKH

SEQ ID NO: 2070 - protein, 395 aa, Erwinia chrysanthemi
MLDQQTIATIKSTIPLLAETGPALTAHFYQRMFHHNPELKDIFNMSNQRNGDQREALFNAICAYATHIENLPALLPAVERIAQKHASFNIQPEQYQIVGTHLLATLEEMFQPGQAVLDAWGKRYGVLANVFIQRESDIYQQSAGQNGGWHGIRPFRIVAKQPQSSLITSFTLEPVDGGPIAAFRPGQYLAVYIRDKRFEYQEIRQYSLTNEPNGRYYRIAVKRETMGSVSGYLHDVAREGDVIELAAPHGDFYLEVTPETPVALISAGVGQTPMLSMLHSLKNQQHQADIFWLHAAENTEVHAFADEIADVAATLPQLQSYVWYREASSEAARSAHAFHGLMALKDLPTPLPMTNLHCYLCGPVAFMQFAARQLLELGITESQIHYECFGPHKVI

SEQ ID NO: 2071 - protein, 166 aa, Pseudomonas aeruginosa UCBPP-PA14
MRKEYVMSAFHDLTLLGLDGQDLPLSPFKGKVLLVVNVASKCGLTPQYAGLENLYQTYRERGFAVLGVPCNQFAGQEPGSEADIQSFCSLNYGVSFPMSAKVEVNGSARHPLYRLLAGEGAEFPGDITWNFEKFLLGPDGRVLARFSPRTAPDDPALVQAIEKALG

SEQ ID NO: 2072 - protein, 327 aa, Triticum aestivum
LGCREGEEMGSTADEEACMFALQLGSSSILPMTLKNAIELGLLDTLVAADGKLLSPAELAAKLPSTANPAAPDMVDRMLRLLASYKVVSCTLEEDKDGRLSRRYGAEPVCKFLTPNEEGVSMAPLALMNQDKVLMESWYYLKDAVLDGGIPFNKAYGMSAFEYHGTDPRFNRVFNEGMKNHSIIITKKLLELYKGFNGVGTLVDVGGGIGATVGAITAHYPTIKGINFDLSHVISEAPPFPGVTHVGGDMFQKIPSGDTILMKWILHDWSDEHCATLLKNCYDALPTHGKVMLVECILPVNPEATPKAQGGFHLDMIMLAHNPGGKE

SEQ ID NO: 2073 - protein, 249 aa, Glycine max
  misc_feature (87)..(87): Xaa can be any naturally occurring amino acid
MAEERFTGVVQWFNNGKGFGFIKPDDGGEDLFVHQSSIRSDGYRTLLEGDRVEFAIATGDNDKTKAVDVTGVDGAPLQPRASAGNNXAGGSGFGARRNGGSGAACYQCGDFGHLARDCNRSSNSGGGGGGSGGGCFNCGGFGHLARDCVRGGGGSVGIGGGGGGGSCFRCGGFGHMARDCATGKGNIGGGGSGGGCFRCGEVGHLARDCGMEGGRFGGGGGSGGGGGKSTCFNCGKPGHFARECVEASG

SEQ ID NO: 2074 - protein, 159 aa, Shewanella oneidensis MR-1
MTLSSKDIGEGQLLSNQFVFNGFGCTGENISPQLAWRDAPEGTKAYAVTAYDPDAPTGSGWWHWAVYNIGGDQQQLAQGAGSKHNGLPKGAIALKNDFGTTDFGGACPPQGHGMHRYEFTVWALPNPLELPKDASPALLGFMLRAQALGSAKLTAVYHR

SEQ ID NO: 2075 - protein, 266 aa, Zea mays
  misc_feature (39)..(39): Xaa can be any naturally occurring amino acid
  misc_feature (108)..(108): Xaa can be any naturally occurring amino acid
  misc_feature (160)..(160): Xaa can be any naturally occurring amino acid
  misc_feature (194)..(194): Xaa can be any naturally occurring amino acid
  misc_feature (199)..(199): Xaa can be any naturally occurring amino acid
  misc_feature (218)..(218): Xaa can be any naturally occurring amino acid
MVLEATMICIDNSEWMRNGDYAPSRFQAQADAVNLICGXKTQSNPENTVGVMTMAGKGVRVLVTPTSDLGKILACMHGLEVGAEANLAAAIQVAQLALKHRQNKRQQXQRIIAFIGSPVKYDKKVLETIGKKLKKNNVALDIVDFGESDDEKPEKLEALXAAVNSSDSSHIVHIPPGENALSDVLLSTPIFTGXKKGGXSGFAASAAAAAATGASGFXNLGVDPNVDPELALCPCGCLWKEERARQEAIAKKAAEDTSNTEHNNVP

SEQ ID NO: 2076 - protein, 475 aa, Vibrio vulnificus YJ016
MNSLFRQQCYLLGEWRSAPQTMTITNPFNDEVIGTVPNMGEKETQEVIAGADKAFQQFKALTAQERANLLHRWHQLILEHSDELAHIMTLEQGKPLAEAKGEVLYAASFIEWFAEEARRAYGTLVPSHKANAKILVTKEPIGVVAAITPWNFPAAMITRKCGPAFAAGCPVILKPAPDTPFTALALAVLAEKAGFPAGVFNVITGDAVAIGGELTSNKRVRKLSFTGSTPVGKLLMRQSADNIKKLSLELGGNAPFIVFEDADLDAAVEGAMIAKFRNAGQTCVCANRLYVQRSVYTEFCEKLVEKVSALNVGNGFDQGVHLGPLINDAAVAKVVQHVEDAQSKGAHIECGQLPTAGSRLVQPLVLSGVTDEMLVAQEETFGPMAPLFVFDSEEEVLARANNTDFGLAAYFYTQSLSRAWRVSEALEAGIVGVNEGLISTTVAPFGGVKESGLGREGSFLGMDDYMESKYILMGL

SEQ ID NO: 2077 - protein, 201 aa, Bacteroides thetaiotaomicron VPI-5482
MEEKNHIYPIFDRMMTREDKEELLGQHSVMIWFTGLSGSGKSTIAIALERELHKRGLLCRILDGDNIRSGINNNLGFSETDRVENIRRIAEVSKLFLDSGIITIAAFISPNNDIREMAANIIGKDDFLEVFVSTPLEECEKRDVKGLYAKARKGEIQNFTGISAPFEVPEHPALALDTSKLSLEESVNRLLEMVLPKIEKK

SEQ ID NO: 2078 - protein, 112 aa, uncultured Bartonella sp.
KMLQEIGTVQKIPEFIARAKDKNDRFRLMGFGHRVYKNYDPRAKIMQQTCHEVLKELNIQDDPLLDIAMELEKIALNDEYFIEKKLYPNVDFYSGITLKALGFPTEMFTVLF

SEQ ID NO: 2079 - protein, 455 aa, Bacillus megaterium
TIKEMPQPKTFGELKNLPLLNTDKPVQALMKIADELGEIFKFEAPGRVTRYLSSQRLIKEACDESRFDKNLSQALKFVRDFAGDGLFTSWTHEKNWKKAHNILLPSFSQQAMKGYHAMMVDIAVQLVQKWERLNADEHIEVPEDMTRLTLDTIGLCGFNYRFNSFYRDQPHPFITSMVRALDEAMNKLQRANPDDPAYDENKRQFQEDIKVMNDLVDKIIADRKASGEQSDDLLTHMLNGKDPETGEPLDDENIRYQIITFLIAGHETTSGLLSFALYFLVKNPHVLQKAAEEAARVLVDPVPSYKQVKQLKYVGMVLNEALRLWPTAPAFSLYAKEDTVLGGEYPLEKGDELMVLIPQLHRDKTIWGDDVEEFRPERFENPSAIPQHAFKPHGNGQRACIGQQFALHEATLVLGMMLKHFDFEDHTNYELDIKETLTLKPEGFVVKAKSKKIPL

SEQ ID NO: 2080 - protein, 277 aa, Glycine max
  misc_feature (57)..(57): Xaa can be any naturally occurring amino acid
  misc_feature (69)..(69): Xaa can be any naturally occurring amino acid
  misc_feature (132)..(133): Xaa can be any naturally occurring amino acid
IVQTSRHGKVAIPDGYIQLTENDEFAYQEMLIHLALCSIPNPKKGFCSFFLFLACTXLSYLMKKETFVXTLQVLLVGGGDGGILREISRHSSGEHIDICEIDKMVIHVYKKFFPDIAVGYEDPRMHVHIRDXXAFINSVPEGTYDVVILDAFPAMGHSADVLADKCFLESIAKALRPRGVLLWHTNSEVADTIANCKIFKGSVNYAWATVPAYVSGAIGFMLCSTEGPPVNFKHPINKLNPEKNGVAKGPPKFYNSEIHATAFFCGQGWLIQQDIHK

SEQ ID NO: 2081 - protein, 220 aa, Triticum aestivum
  misc_feature (184)..(184): Xaa can be any naturally occurring amino acid
MAGEGGSGGERGKDPLEGVRAIVLKPSESLDESRFTKIAGADFNDAGLGLDGLLGSLASTGFQASNLGDAIDVVNQMLDWRLSHEKPTEDCDEAELDPKYRESVKCKIFLGFTSNLVSSGIRDVIRFLAQHHMVDVIVTTAGGIEEDLIKCLAPTYRGEFSLPGALLRSKGLNRIGNLLVPNDXYCKFENWIMPLFDQMLQEQSAENVWTPSKVIARLGK

SEQ ID NO: 2082 - protein, 506 aa, Perilla frutescens
MALYAALFLLSAAVVRSVLDRKRGRPPYPPGPFPLPIIGHLHLLGPRLHQTFHDLSQRYGPLMQLRLGSIRCVIAASPELAKECLKTHELVFSSRKHSTAIDIVTYDSSFAFSPYGPYWKFIKKLCTYELLGARNLAHFQPIRTLEVKSFLQILMRKGESGESFNVTEELVKLTSNVISHMMLSIRCSETESEAEAARTVIREVTQIFGEFDVSDIIWLCKNFDFQGIRKRSEDIQRRYDALLEKIITDREKQRRTHGGGGGGGEAKDFLDMFLDIMESGKAEVKFTREHLKALILDFFTAGTDTTAIVCEWAIAEVINNPNVLKKAQEEIANIVGFDRILQESDAPNLPYLQALIKETFRLHPPIPMLARKSISDCVIDGYMIPANTLLFVNLWSMGRNPKIWDYPTAFQPERFLEKEKAAIDVKGQHFELLPFGTGRRGCPGMLLAIQEVVIIIGTMIQCFDWKLPDGSGHVDMAERPGLTAPRETDLFCRVVPRVDPLVVSTQ

SEQ ID NO: 2083 - protein, 511 aa, Zea mays
  misc_feature (184)..(184): Xaa can be any naturally occurring amino acid
MDSPPLQPTVFSLILALILVLYLALRRRGGGKNRSYPPVAGTVLHQLFNFGRLMEYQTALSRRYRTFRMLTPTCSYIYTVEPANVEYILKANFGNYGKGSTLHELREDLLGDGIFNVDGAKWRHQRKVASHEFSTRVLRDYSTGVFRDTAAELAGIVAAAAAAAGEKLDMQELLMRSTLDSIFXRVGFGVSLGVLSGSSEEGAAFAKAFDDASEQVLRRFLDPFWKAKRFLNLSSEAAMKRSLRTINGFVYAVVDRKIEQMERDQQEFVSPEDITSPFLVERESDPGCSDNKYLRDIILNFVIAGRDTTAGTLSWFLYVLCRNQHVQDRIAQEVRAAASGDRDDVGVQEFVACLTEDAISRMRYLHAALTETLRLYPAVPIDVKCCFSDDTLPDGYAVKKGDMVNYQPYQMGRMRFLWGADAEEFRPERWLDDAGVFVPESPFKFTAFQAGPRVCLGKEFAYRQMKIFAAVLLYLFRFEMWDANATVGYRAMLTLKIDRPLYSSYVAPAMR

SEQ ID NO: 2084 - protein, 106 aa, Brassica napus
MGEPRDSLALSNLLICHESESCLNEQQQDDDDDETKIERSDEQQKPHCFATIGDDDEDYVAELVRKENRRFDDDDDKPTKTTSSLDRLIAIDWILATRTRFGFSIR

SEQ ID NO: 2085 - protein, 164 aa, Cucurbita pepo
DRGEMMSMVYNWPADQVDVIVVTDGSRILGLGDLGVHGIGIAIGKLDLYVAAAGINPQRVLPVMIDVGTNNEKLLKDPLYLGLQQNRLDGDEYLAIIDEFMEAVFTRWPHVIVQFEDFQSKWAFKLLQRYRNTYRMFNDDVQGTAGVAIAGLLGAVRAQGRPMI

SEQ ID NO: 2086 - protein, 122 aa, Adiantum capillus-veneris
MIQIQSYLDVADNSGARKLMCIRVLGTGNRKYADIGDIIIAVVKEAVPNMFLKRSEVVRAVVVRTRRGLKRRNGMVLEFDDNAAVIINQEGNPRGTRIFGPVARELRECNFARVVSLAPEVL

SEQ ID NO: 2087 - protein, 352 aa, Lagenaria siceraria
MVPPYALDSLYCSEDHWENDDEEEERGFHEQPYSNLTTESSSPILAVAEQDLFWENDELISLFSREKPNELFKTIQIDPSLAAARRSAVGWMLKVNAHYSFSALTAVLAVDYLDRFLSCFHFQRDKPWMSQLAAVACISLAAKVEETQVPLLLDLQVEDSRYLFEAKTIKKMELLVLSTLQWRMNPVTPFSFVDYISRRLGFKEHICWEILWQCERTILSVILESDFMSFLPSVMATATMLHVFKAMEEPTLSVEYDSQLLNILGIDKGNVEECCKLISNASRRNGNQFKKRKIGSIPGSPNGVMDVSFSSDSSNDSWSVASSVSSSPEPLTKKNRANGSMSGDCETFRTLS

SEQ ID NO: 2088 - protein, 213 aa, Gossypium herbaceum
ALNSAEAEAPTAAPSQLNLTEIMSKQGCKAFADLLTASGADDKFNENMDAGLTVFCPTDSAVKGFMPKYKNLTASKKVSLLLYHGIPVFMSLQMLKTNNGVMNTLATDGANSYDFSVSNEDEVVSLDTTVVTAKVLGILKEEEPLIVFKINKVLMPKELFKPVVAKEANEPEADAPADSEPADAEDNTNGVQGLGGGRLVMLVLSLWIGILLI

SEQ ID NO: 2089 - protein, 290 aa, Triticum aestivum
  misc_feature (161)..(161): Xaa can be any naturally occurring amino acid
MGGLSMEHPWAFAFGLLGNVISFSSLLAPIPTFYRIFKSKSTEGFQSVPYVVALFSAMLWIFYALVKTGEGLLISINAAGCVIETVYIVMYLVYAPRKAKIFTAKIVVLLNITGFGLIFLLTLFAFHGETRVVSLGWICVGFSVCVFVAPLSIIGRVIKTXSVEYMPFTLSLTLTLSAIVWFLYGLLIKDKYVALPNILGFTFGVIQMVLYVFYMNKTPVASEVKEGKEAWKAPAEDHVVVINVGKTDKGSCAEVRPVTEMASAVDVPRRCAAEAAAAPGVDFARSVDVV

SEQ ID NO: 2090 - protein, 213 aa, Gossypium raimondii
ALNSAEAEAPTAAPSQLNLTEIMSKQGCKAFADLLTASGADDKFNENMDAGLTVFCPTDSAVKSFMPKYKNLTASKKVSLLLYHGIPVFMSLQMLKTNNGVMNTLATDGANSYDFSVSNEDEVVSLDTTVVTSKVLGILKEEEPLIVFKINKVLMPKELFKPVVAKEANAPEADAPADSEPADAEDNTNGVQGLGGGRLVMVVLSLWIGILLI

SEQ ID NO: 2091 - protein, 213 aa, Gossypium barbadense
ALNSAEAEAPTAAPSQLNLTEIMSKQGCKAFADLLTASGADDKFNENMDAGLTVFCPTDSAVKGFMPKYKNLTASKKVSLLLYHGIPVFMSLQMLKTNNGVMNTLATDGANSYDFSVSNEDEVVSLDTTVVTAKVLGILKEEEPLIVFKINKVLMPKELFKPVVAKEANAPEADAPADSEPADAEDNTNGVQGLGGGRLVMLVLSLWIGILLI

SEQ ID NO: 2092 - protein, 209 aa, Zea mays
MAECEELVESGGAEEDMPRVVAALAGILERVANRNDAAAAAEVSAVAPASAFRATTKPGISVRAYMARIARFAGCSPACYVVAYVYLDRLLRRGRLLALAVDSYSVHRLLITAVLAAVKFMDDICYNNAYFAKVGGISLVEMNYLEVDFLFGVGFDLNVAPETFGDYCAVLRSELLCAEAAPAPLRLQHCCLSEDDAGAGCSAQQQLAA

SEQ ID NO: 2093 - protein, 425 aa, Triticum aestivum
MWRRTTGRPAQEHPTTRRAAASPPATAPRGSSPRGAAAPSWPPRAAAAPGGGFDEAAAGFLEGQILEAPNLRTFTFLELKTATKNFRPDSVLGEGGFGRVYKGWVDEKTMNPTKSGTGMVVAVKKLNSESMQGYEEWQSEINFLGRLSHPNLVKLLGYCWEDKELLLVYEFMAKGSLENHLFRKGCAPLSWELRLKIAIGAARGLAFLHASEKQVIYRDFKASNILLDASYNAKLSDFGLAKLGPTGSNSHITTRVMGTYGYAAPEYVATGHLYVKSDVYGFGVVMLEMLSGKRARGPNRPNGQQSLVDWAKPYLADRRKLARLMDPQFEGQYNSKQSHQAAQLTLNCLAGEPRMRPSMKEVLETLEQIEALKSRTRETRGGSGTSSRDRAHGRSAAVHQRSSPRGNGDGRRGSRPTNGHATKAR

SEQ ID NO: 2094 - protein, 226 aa, Agrobacterium tumefaciens str. C58
MKIKAAEAALSHVQDGMRLGIGTGSTAEEFVRLLAEKVAAGLKVEGVPTSERTARLCVELGVPLKSLDELPELDLTIDGADEVDHVLRLVKGGGGALLREKIVAAASGRMIVIADQSKVVETLGAFPLPIEINPFGQVATRIAIEKLAARSGLSGELTMRSSGDGAFMTDGGHLILDASFGRIPDAEALARELNTIPGVVEHGLFINLASLAIIAGPEGARMMQAV

SEQ ID NO: 2095 - protein, 351 aa, Pneumocystis carinii
MTASSRNVRFNVSDDYEILDVIGEGAYGIVCSAIHKPSGQKVAIKKISPFDHSMFCLRTLREMKLLRYFNHENIISILDIQQPQDFESFSEVYLIQELMETDMHRVIRTQDLSDDHCQYFIYQILRALKAMHSADILHRDLKPSNLLLNANCDLKVCDFGLARSAVSTEDSSSFMTEYVATRWYRAPEIMLTFKEYTKAIDIWSVGCILAEMLSGRPLFPGKDYHHQLMLILDVLGTPTMEDYYGIKSRRAREYIRSLPFKKRVSFASIFPRANPLALDLLEKLLAFNPAKRVTAEEALQHNYLEPYHDPDDEPTAPPISPSFFDFDRIKDSLTKNDLKILIYKEIMSMNN

SEQ ID NO: 2096 - protein, 102 aa, Yersinia pestis KIM
MSLLLSAQVRHPLKDRPRSLHYCGKIIEGNISMSNKMTGLVKWFDAGKGFGFITPADGSKDVFVHFSAIQSNDFKTLDEGQNVEFSIENGAKGPSAVNVIAL

SEQ ID NO: 2097 - protein, 406 aa, Micrococcus sp. 28
MAAESTGQAGVSPAPTVSPAAGAAPPDSSGVSTPPDASPAGASSLPEVPAAPPAEDAPAPSPEPDSPPRPETAPAPEATALLGDAAAIAPAPAGRSAAFPSLAAAEPLAPPATAPPWPTPVWEAPSPDLSFEFRGRTPGAAALADWPPAAGATPAAARPAAVPARAPLIGDAPPAAGLTPAPESSPSLASTRSTVPSTPPAPVPAAEVPPAAPVPWSENSAEDAPLPAAPAAPLSALLPAAPAAPLSAPPLAEPPAAPGSLPAPFAPAVSPEAVAPAVPLAPPAVSAAAPPPARPPPGPAAPPPPAAALPPPPAAPPARAAPAAAPAPAPPVPARMAAPAAMPRAAPATPAPENPPRPAPTTGDRNRIRVGRTSPAIPSRRMPVIAEESRTPKSSEVLVSSMNPNA

SEQ ID NO: 2098 - protein, 177 aa, Glycine max
  misc_feature (128)..(128): Xaa can be any naturally occurring amino acid
MVLEATMICIDNSEWMRNGDYSPSRFQAQTDAVNLICGAKTQSNPENTVGVLTMAGKGVRVLVTPTSDLGKILACMHGLEIGGEMNLAAGIQVAQLALKHRQNKKQQQRIIGFAGGPVKHEKKMLEMXGRKLKKKNILDLKGISFRKFQCRPVNVNLEHLSPFSLLLIVFFFIRNPL

SEQ ID NO: 2099 - protein, 307 aa, Glycine max
  misc_feature (297)..(297): Xaa can be any naturally occurring amino acid
NICFFYIVSLFFFFFFFFFFFFFFFFFYHNKLQYRKLDDVLRISRLISRSFSSTSFFSRGGNGFLGSRHCKYSTSSAIEEEPVKPSVQVEHTQLLIDGKFVDAASGKTFPTLDPRTGEVIAHVAEGHSEDVDRAVAAARKAFDHGPWPKMTAYERQRILLRAADLLEKHNDELAALETWDNGKPYEQAAKIEVPMLVRLIRYYAGWADKIHGLTVPADGPYHVQTLHEPIGVAGQIIPWNFPLLMFAWKVGPALACGNTIVLKTAEQTPLSALYAAKLFHEAGLPAGVLNVVSGFGXTAGAALASPW

SEQ ID NO: 2100 - protein, 380 aa, Lagenaria siceraria
MKKMALHSNKHRTQRLHNSLFFFDFLHCTEQQHLQTEHPIFLNNGGTNDFPLFQQTTTHFLVYEDEELNHLLSKEKDQNLQTGAVLKTLVQTDNALSLARTEAIDWLLKVNAFYGFSSLTALLAINYLDRILSGPYFQRDKPWMLQLAAVTCISLAAKVEEIRVPLLLDLQVEDSKYIFEAKTIQRMELLVLTALQWKMHPVAPVSFLGIITKGLGMKNQYIQREFLRRCERILLSLVSDSRSVGILPSIMAVSAMVSVVEEMGNCNPLEEFQDQLLNALKINKGRVKECCKVIMEAKIKGSGKRKHVEEEAEAEAESESSEAETEGEAEAEAGSPNGVMEANFSCESSNDSWEMGTIVSEYTHFSSSSSSSSKRIRPTR

SEQ ID NO: 2101 - protein, 350 aa, Glycine max
FLPSLSQLSFVSRSEQRDQENTVCEREEREFPKPCRPTVIISVAFGVLGNIASFVCFLAPLPTFYRVCKKKSTEGFQSIPYVAALFSAMLWIFYAYVKTGEMLLITINAFGCVIETIYLAVFITYCPKKARMSTLRMIVLLNFGGFCTIVLLTHLLAEGEGRVKLLGWICVVFATSVFAAPLSIIRVVIRTKSVEFLPFPLSLLLLISAIMWLLYGISLKDIYVTLPNVVGLTFGVIQIGLYAMYRNNKPVKDQKLPEHKGDIVDNNNESVIAPTVNGEKQEQEVKPQGGIIETGEKKEENNKQDQQQPEENKKFDQVVHEQTKLNNKNTNNINDDDNNKTGERVISCEV

SEQ ID NO: 2102 - protein, 176 aa, Cucurbita pepo
RVGLSGKGIPVGKLSLYTALGGVRPSACLPITIDVGTNNEKLLNDEFYIGLKQRRATGEEYYELLHEFMTAVKQNYGEKVLIQFEDFANHNAFELLAKYRTTHLVFNDDIQGTASVVLAGAVSALKLIGGTLADHTFLFLGAGEAGTGIAELIALEISKQTNAQLRRPARRFGWWT

SEQ ID NO: 2103 - protein, 497 aa, Rubrivivax gelatinosus PM1
MDKASGKTLDAALVWCRRDLRAHDHAALYHALRAARRVWVAFVFDTEILDPLPRTDRRVEFIRDSLVDLDAQLHTLGRSHGTEGVGLIVRHGRARDEIPRLAAALHVQAVYANTDYEPAAVARDAQVRGALAQTGIAFHPAKDQVVFDTDEVLTGAGTPYGVFTPYKNAWLKKLEPFYLQAYPVGRHAGALAPRPAGEAAGVPTLAAIGFEPTNLAALKLAPGTAGGRALLEDFGDERIDRYDQTRDFPAVKGPSYLSVHLRFGTLSIRELARLAWDRARAGSRGAEVWLSELIWRDFYHQVLHHHPQVVERSFKPEYDKIKWEHGKHADALFAAWCEGRTGYPLVDAAMLQINQTGYMHNRLRMVVASFLCKDLGLDWRRGERYFAEKLNDYDLAANNGGWQWASSSGCDAQPYFRIFNPVSQSQKFDAQGKFIRRYLPQLAALPDAALHAPWDAKPLDLVAAGLVLGRDYPEPIVRHELARERTLARYAVVKGAR

SEQ ID NO: 2104 - protein, 487 aa, Brucella suis 1330
MKAQPKASHFIGGAFVEDKAGKPLPVIYPATDEEIASLYSATPGIIEAAYAAALKAQGEWAALKPVERGRILRRTAEILREKNRKLSKLETLDTGKALQETLVADAASAADALEFFGGIISGFNGEFVELGGSFAYTRREALGICVGIGAWNYPIQIAAWKSAPALAMGNAFIFKPSENTPLSALALAEAYKEAGLPDGLFNVVQGYGDVGAALVNHRLTAKVSLTGSVPTGRRIMAQAGEQLKHVTMELGGKSPLIVFDDADLESAIGGAMLGNFYSTGQVCSNGTRVFVHKNIRERFIERLVERTRKIRIGDPFDEATQMGPLISAAQRDKVLSYIKKGKAEGATLACGGGVPKLQGFDKGFFIEPTVFADVTDTMTIAREEIFGPVMSVLEFSDEDEVIARANDSEFGLAAGVFTADLSRGHHVIGQIKAGTCWINAYNLTPVEVPFGGYKQSGIGRENGIAALAHYSQIKTVYVEMGKVDSPY

SEQ ID NO: 2105 - protein, 165 aa, Triticum aestivum
MAQEGLRLVCPPVSAHEGRLPRQYTLEGQGAKKDISPPLEWYGVPDGTRSLAVVVQDIDADERVPWTHWVVANISPEEKGLPEGFSGAGGNANAGSGAGGVQEGVNDWKQPGWRGPVPDSHGHRIQFRLYALDDVLSLGNKVTVDKVMEAIEGHVLGEAEITAVF

SEQ ID NO: 2106 - protein, 213 aa, Gossypium barbadense
ALNSAEAEAPTAAPSQLNLTEIMSKQGCKAFADLLTASGADDKFNENMDAGLTVFCPTDGAVKSFMPKYKNLTSSKKVSLLLYHGIPVFMSLQMLKTNNGVMNTLATDGANSYDFSVSNEDEVVSLDTTVVTSKVLGILKEEEPLIVFKINKVLMPKELFKPVVAKEANAPEADAPADSEPADAEDNTNGVQGLGGGRLVMVVLSLWIGILLI

SEQ ID NO: 2107 - protein, 439 aa, Rubrivivax gelatinosus PM1
MKILISNGRVVDPASGRDERADIAIANGRILTIGKVPADFAPERTIDAAGLVVAPGLVDLAARLREPGHEHEGMLESELAAAAAGGVTSLVCLPDTDPTLDEPGLVEMLKFRARKLSRCRLFPLGALTRGLGGEVLTEMAELTEAGCVGFSQADAVLRDTQVLSRALQYAATFGYTVWLRPNDPWLGSGVAASGAVATRLGLSGVPVAAETIALHTLFELVRSSGARVHLCRLSSAAGVALLREAKAEGLPVTADVSINSLHLTDVDIGYFNPAMRLVPPLRQQRDRDALRAGLADGTIDALVSDHTPVDEDAKTLPFAEAEPGATGLELLLSLALKWGEDSGAGLRRALATVSCEPVRVLGDALGSLASSAGRLVEGGVADVCVFDPEARWTVAPAALRSQGKHTPFAFDTSGFALPGRVRATLVAGHVAHEATRDAA

SEQ ID NO: 2108 - protein, 213 aa, Gossypioides kirkii
ALNSADAEAPTAAPSQLNLTEIMSKQGCKAFADLLTASGADDKFNENMDAGLTVFCPTDSVVKGFMPKYKNLTASKKVSLLLYHGVPVFMSMQMLKTNTGVMNTLATDGANSYDFSVSKEGEVVSLDTTVVTAKVSGILKEEEPLIVFKINKVLMPKELFKPVVAKEANAPQADAPADSEPADAEDNTNGVQGLGGGRLVMVVLSLWIGILLI

SEQ ID NO: 2109 - protein, 229 aa, Brassica napus
RPTRPLKDVILQGTDAFISGYGMKVFEYLAVDEQFSEMFDPGMSESSTMVMKKVLGKYTGFEDVNTLVDVGGGVGTVLGIVTSMYPHIKGINLDLASVLVNATPYPGVQHVAGDMFVEIPKGDALFMKWILHAWNDENCVKILKNCWTSLPDKGKVIVLDVVMRTEPKCYDFASNMELTMDMFILSQRSGGRERTLPELEALGCAAGFGRCEFICRAYSFSLIEFHKLI

SEQ ID NO: 2110 - protein, 284 aa, Ralstonia metallidurans CH34
MSATNETIDAGQQASQDWWRTEIIDMKPGEIRYRGYPIEQLIGNVSFAQMIWLMLRGELPGKREGELLDAALMAAVDHGPQAPSIAIARMAATCGVGLNNAMASAVNVLGDVHGGAGEQAVELYQDIARRFDAGTPFDDAVAAGLAHYRDLHGKFVSGFGHRFHPLDPRAPRLLALVDQAADDGVVSGRYAAIARAVEKALGAGRDKPIPMNIDGATAVIYAELGFPAPLARGLFCLSRSVGILSHAWEQTQQGGRNKGPIPRQFIWTYDGQPQRDVPVDGGAV

SEQ ID NO: 2111 - protein, 129 aa, Triticum aestivum
  misc_feature (53)..(53): Xaa can be any naturally occurring amino acid
  misc_feature (100)..(100): Xaa can be any naturally occurring amino acid
  misc_feature (106)..(106): Xaa can be any naturally occurring amino acid
  misc_feature (119)..(119): Xaa can be any naturally occurring amino acid
MSDSEEHHFESKADAGASKTYPQQAGTVRKNGFIVIKNRPCKVVEVSTSKTGXKHGHAKCHFVAIDIFNGKKLEDIVPSSHNCDIPHVNRTEYQLIDISXEDGFVXLLTQDGNTKDDLXLPTDEILWPD

SEQ ID NO: 2112 - protein, 354 aa, Nicotiana tabacum
MKTTKPLKELKLSVPAQDTPISSFLTASGTFHDGDLLLNQKGLRLISEENESPASETKEIDLQFSLEDLETIKVIGKGSGGVVQLVRHKWVGTLFALKVIQMTIQEDIRKQIVQELKINQASQCSHVVVCYHSFYHNGAISLVLEYMDRGSLADVIRQLKTILEPYLAVVCKQVLQGLVYLHNERHVIHRDIKPSNLLVNHKGEVKITDFGVSAMLASSMGQRDTFVGTYNYMAPERISGSTYDYKSDIWSLGMVILECAIGRFPYIQSEDQQAWPSFYELLEAIVSSPPPSAPADQFSPEFCSFVSACIQKDPRDRSSALDLLSHPFIKKFEDKDIDFGILVSSLEPPVNFPR

SEQ ID NO: 2113 - protein, 317 aa, Haemophilus somnus 2336
MTTQLDALRNMTVVVADTGDIDAIKKYQPQDATTNPSLILSASSLPQYAPLIDEAIAYAKAKSADKTQQLIDAEDKLAVNIGLEILKIVPGRISTEVDARLSYDTQATVEKARKLIALYNEAGISNDRILIKIASTWQGIRAAEILEKEGINCNLTLLFSKAQARACAEAGVYLISPFVGRILDWYKANSDKKEYAPAEDPGVISVTKIYNYYKQYGYNTVVMGASFRNVGEITELAGCDRLTIAPALLKELQENSTALVRKLAFKGEVKAKPQPLTESQFYWQHNSDPMAVEKLADGIRKFAIDQEKLEKMLLEKF

SEQ ID NO: 2114 - protein, 424 aa, Brucella melitensis 16M
MNPNTSPVWHPFTQHRLEPRPDRIVRTEGAYLFREDGSAVLDMISSWWVITHGHRHPAIMDAIRQASADLDQIIFADFSHQPAEELAKGLIALAPDGLSHVFYSDSGSTAVEVAIKMALGYFYNRGEPRSRIAVLQHSYHGDTIGTMSAGERGVFNAAYGALLFNVETLPFPSPGHEQPMLDRLEDVCRGGDLAALLVEPLVLGAGGMKMYPAHILATMREITERHGVLLAVDEVMTGWGRTGTLFACEQAGITPDILCTSKGLTGGSLPLAATLCTAAIFDAHYSDDRSKTFFHSSSYTANPIACAAALANLQVWLSEPVTERISALTRMQTERLHRFKDDSRFAGLRQTGTITALELDVPAGGYLSDAGPKLRTFFKQNGVLLRPLGNVIYVMPPYCVTAEELDRTYDVITQGVDMIAGQTR

SEQ ID NO: 2115 - protein, 155 aa, Glycine max
MASTKKITLKSSDGEAFEVEEAVALESQTIKHMIEDDCADSGIPLPNVTSKILAKVIEYCKKHVEANSADEKPSEDVLKAWDVDFVNVDQATLFDLILAANYLNIKSLLDLTCQTVADMIKGKTPEEIRKTFNIKNDFTPEEEEEVRRENQWAFE

SEQ ID NO: 2116 - protein, 201 aa, Triticum aestivum
  misc_feature (48)..(48): Xaa can be any naturally occurring amino acid
  misc_feature (55)..(55): Xaa can be any naturally occurring amino acid
  misc_feature (68)..(68): Xaa can be any naturally occurring amino acid
  misc_feature (151)..(151): Xaa can be any naturally occurring amino acid
  misc_feature (154)..(154): Xaa can be any naturally occurring amino acid
  misc_feature (173)..(173): Xaa can be any naturally occurring amino acid
  misc_feature (182)..(182): Xaa can be any naturally occurring amino acid
MVLESTMICIDNSEWMRNGDYSPSRFQAQADAVNLICGAKTQCEPGEXTVGVMTXAGKGVRVLVTPTXDLGKILACMHGLEVGAEANLAAAIQVAQLALKHRQNKRQQQRIIVFIGSPVTYDKKVLETIGKKLKKNNVAPLTLLHFMGETXDDXKPDENWQALIAAVNNSDSXHIVHVPPGXHALSDVLRSSPIFPGRDGV

SEQ ID NO: 2117 - protein, 227 aa, Arabidopsis thaliana
MGRGKIVIQKIDDSTSRQVTFSKRRKGLIKKAKELAILCDAEVCLIIFSNTDKLYDFASSSVKSTIERFNTAKMEEQELMNPASEVKFWQREAETLRQELHSLQENYRQLTGVELNGLSVKELQNIESQLEMSLRGIRMKREQILTNEIKELTRKRNLVHHENLELSRKVQRIHQENVELYKKAYGTSNTNGLGHHELVDAVYESHAQVRLQLSQPEQSHYKTSSNS

SEQ ID NO: 2118 - protein, 180 aa, Musa acuminata
  misc_feature (29)..(29): Xaa can be any naturally occurring amino acid
  misc_feature (128)..(128): Xaa can be any naturally occurring amino acid
  misc_feature (168)..(168): Xaa can be any naturally occurring amino acid
  misc_feature (170)..(170): Xaa can be any naturally occurring amino acid
MAKSYPTVSEEYQKAVEKAKRKLRGLIAXKNCAPLMLRLAWHSAGTYDVVSKTGGPFGTMRFPAELAHGANNGLNIAVRLLEPIKEQFPILTYADFYQLAGVVAVEVTGGPEIPFHPGREDKPEPPVXGRLPDATKGSDHLRDVFGHMGLSDRISLHYLVDTHWEGAXRXDLVSKGLGLP

SEQ ID NO: 2119 - protein, 129 aa, Brassica napus
PSLLSPPLLLARARFYKGFGARDGRRRQREPRGGGGVREQDRFLPIANISRIMKKAVPANGKIAKDAKETLQECVSEFISFVTSEASDKCQKEKRKTINGDDLLWAMATLGFEEYVDPLKIYLQKYRDM

SEQ ID NO: 2120 - protein, 161 aa, Zea mays
  misc_feature (95)..(95): Xaa can be any naturally occurring amino acid
  misc_feature (153)..(153): Xaa can be any naturally occurring amino acid
MTRVIHDSGDDMQKEALDLVSSDVNFPKGHFPDYRIGPNNQIIDPEETHEAVPLKEIVAKETAQLLEQHKRLSVRDLKEKFEKGLSGASKLSEEXAKRREAASLDRQVLLKKLRDVLDTLKGRVAGRNRDDAEEAISLVEALAVQLTQREGEXIYEKAEVK

SEQ ID NO: 2121 - protein, 293 aa, Anabaena variabilis ATCC 29413
MGLTDNYKLNLIQWYPGHIAKAEKNLKEQLSRVDVVFEVRDARIPLATHHPQIDEWVGNKARILVLNRLDMIPPQVRSLWIDYFQNRGEVPYCTNAQHGQGVAGVAKAAQAAGVELNQRRRDRGMLPRAVRAVVIGFPNVGKSALINRLLGKRVVESAARPGVTRQLRWVRISDQLELLDAPGVIPVKLGNQEAAVKLAICDDIGQASYDNQLVAAALIDIVNSLQEQAGELLPRSPLYARYELDPTPHTGEGYLHALAEYRHKGDVERTARQLLTDYRKGLLGTLPLELPPM

SEQ ID NO: 2122 - protein, 216 aa, Bacillus sp. KSM-K16
MKFFVDTANINEIKEANELGILDGVTTNPSLVAKEGVDFHERIAEIAKLVPGSVSAEVISLDAEGMIEEGKTLAAISENITVKVPMTVDGLKAVKAFAELGIKTNVTLIFSVPQALLAARAGATYVSPFLGRLDDIGHDGLQLISDIADIFSTHGLPTQIIAASVRHPVHVSEAAKRGAHIATIPLNVIKQLTGHPLTDKGIEKFLADWNKENVEK

SEQ ID NO: 2123 - protein, 371 aa, Malus x domestica
MGKGGMSDGDHADRCCGEAINGDVQQENMAAWLLGVKNLKIQPYKLPNLGPHDVRVRLRAVGICGSDVHHFKNMRCVDFIVKEPMVIGHECAGIIEEVGSEVEHLVPGDRVALEPGISCKRCNLCKQGRYNLCRKMKFFGSPPNNGCLANQVVHPGDLCFKLPDNVSLEEGAMCEPLSVGIHACRRANVCQETNVLVVGAGPIGLVTLLAARAFGAPRIVIADVNDERLLIAKSLGADAVVKVSTNIEDVAEEVAKIQKVLENGVDVTFDCAGFNKTITTALSATRPGGKVCLVGMGQREMTLPLATREIDVIGIFRYQNTWPLCLEFLRSGKIDVKPLITHRFGFSQKEVEEAFETSARGGNAIKVMFNL

SEQ ID NO: 2124 - protein, 352 aa, Solanum demissum
MEVETHMSFRTAEKISILVVNDDATYLPVVAGLLKKCNYQVVTVKYPIDALSKLRIKGDSFDLVVTDVHKSDINGFELQQVITQAFEIPVLLMSADDKEGTILKGLKGVSVDDQRDQGPCTALQVKRGKKPVPGKSAMKLGKQGKDNSVNFVLPTKSQIIWTDSLHNTFLEAISNIGFDKAVPKKIHEHMKVPGLSRENVASHWQKYRIYLRRVTDASSSIQVPDINLASRANQSTIASGTLGKHRQFHQENFGVQSSVPSLLIHTTGYRTGSLQHLKNKGKEVDDVLDPVRNFSVFHNVSATQGSQGIGDLSASSMNQGNDQPHQQNNEDEALVNFDGGFNQDMEKEDYLQ

SEQ ID NO: 2125 - protein, 479 aa, Zea mays
MDPTAAPGSGGTPADSDATSPTNTTVTLPPLTLRDVPRLASSSPAAAAAAAVPNPISRHPYFHPPANFYISPGDVSLRHAFFDLVSAAPTPLVAYRRGGPRRDLAVDPAAARAALVTCGGLCPGLNTVLRELVVGLQELYGVRHVFGVAAGYRGFYGADEDHVRLHPAAVDDWHKKGGTVLKTTRGGFDLGKIVDGIVARGYTQIYAIGGDGTMRGALAIFEEFKRRGLNISITGIPKTVDNDIGIIDRSFGFQTAVEVAQQAIDAAHVEAVSAVNGAGIVKLMGRSTGHIALHATLSSRDVDCCLIPEVDFYLEGKGGLFEFLYERIKKKGHAVVVVAEGAGQELIPRTDDQKREQDESGNTVFLDVGPWLKSELGRWWKREHPDELFTVKYIDPTYMIRAVPANASDNLYCTLLAHSAIHGVMAGFTGFVPGPINGTYSYIPLEDVAVAKNPVDVNDHKWAWVRSVTNQPDFLKSQA

SEQ ID NO: 2126 - protein, 334 aa, Mesorhizobium sp. BNC1
MQGITKLSNESGEMDLIEFPRPIAGHGNVVLEVAAAGICGTDIHILKGEYKVVPPVIVGHEVCGFVCDAGEGVDPALVGKRVVTETFYSVCHTCAYCRNGRPNMCANRKSIGTHANGAMTRWVEVPSHGLHAVPDFMSDAAASMAEPVAFVTNSMAGEYNYVGPDNEVLVIGPGAIGLIAAQVARAAGANVNIRGTTKDKARLDLAERLGFSVSDNDTPLVPQSFDRVVECSGSPYGIADALAALTKGGHLMQMGIVGRDSQLPFDYVCYKELKITAGFASTPKSWLRAMKLIRDRKVDLEPLVSDVCALHAWKTAFDRSMSAEGVKFVFDPRL

SEQ ID NO: 2127 - protein, 498 aa, Bordetella parapertussis 12822
MTLHDSAYWRAQAAALAPEGRAYIDGAYCDAADGATFAAHSPIDGRKLADIAACGAADVDRAVAAARRAFEAGVWSGLAPRERKHRLLRLAALITEHQEELALLETLDMGKPIRDALAFDLPETARCYAWYGEAIDKRYDEIAPTGADALATITREPLGVVAAVVPWNYPLMMAAWKVAPALAVGNSVILKPAEQASLSALRLAALAEQAGIPPGVFSVVPGLGAQAGQALGLHPDVDCIAFTGSTATGKRFMTYSGQSNLKRVWLECGGKSPHIVFADCPDLDRAAQVAALAIFSNQGEVCIAGSRLYVQHGIYDAFMEKVAAFAATLRPGNPLDPDSALGAMVDERQTQAVMARIAAGAQEGARLRLGGRQVLTDSGGYYIEPTIFDCPGQDNSLVREEIFGPVLAAQGFADEDEAVALANDSIYGLGAGLWTADLGRAHRLSRRLRAGLVWVNCYADGDITVPFGGVKQSGFGRDKSLHAMDKYSDLKTTWISLR

SEQ ID NO: 2128 - protein, 396 aa, Escherichia coli [sequence omitted]

SEQ ID NO: 2129 - protein, 504 aa, Burkholderia cepacia R18194
MLHRRALVLSILVLASCGLGYELISSALSSYLLGDSILQFSSVIGCYLFAMGIGSWLAKFVEDDDVLDRFVDIELLVGLLGGVSAALLFAVFAWLAAPFRAALYALVLALGMLIGMEIPLVMRAFQQRRQAFRHTVSEVLTFDYLGSLAVSLIFPLVLAPRLGLLRTSFLFGLLNAFVALWTTHLFRDEIRNVRGKLMRASLVIGLLVAGFALSDRITHWAEHGVYGDETIYSETTPYQRIVLTQWHDDMRLYLNGNLQFSSRDEHRYHEALIHPTIDALPWAKRVLVLGGGDGLAVRELLKHRNLEQITLVDLDPAMTKLFSTSAPLVKLNQGSLKDPRVHVINDDAVRWLESNADVYDAIVVDFPDPTNFGLGRLYSVPVFRLLARHLSENGYAVIQSTSPYFAPHAYWTIIATLHEAGLNTWPYHCYVPSFGDWGFVIAGKRRDFTVPTHYSVPTRWLDAQTAAEMFHFPADMPALPMSPNELNDQPLVRRFDDDWKHVLR

SEQ ID NO: 2130 - protein, 262 aa, Bacillus cereus G9241
MPMIGLGVYKAKEGDEVKRAVKTALEVGYRSIDTATVYENESGVGEAVRESGIPREDIFITTKVWNDDQGYEETLEAFEKSLKKLQMDYVDLYLIHWPIRGKYVDTYRALEKLYEEGKVRAIGVSNFHKHHLELLLPNCKVKPMVNQVELHPMLTQFELRNFCQGEQIQMEAWSPLMRGGEVFQHPIIQAIATKYEKTSAQVILRWDIQSGVVTIPKSVTPSRIQENFSIFDFSLTEEEMTQINTLNRNLHVGTNPDKYDTL

SEQ ID NO: 2131 - protein, 189 aa, Zea mays
STQSSVNHPTNHGFEFQELPKPEVPHPVPELTKPEVPPHPTAVPKLPKPEVPHPVPELRKPELTPHPAAVPELPKPEVPHPMPELPKPEVPPHPTAVPELPKPEVPHPVPELPKPELPPHPAVPELPKPEVPHQVAPELPKPELPPHPTVPKLPHPEVPEVPNHELPPLPKAELPPKPEGHYPEPEAKP

SEQ ID NO: 2132 - protein, 335 aa, Pyrococcus abyssi GE5
MKAKDIVLKKSEEIEGLAIEGPWLDEVESLEGVISYYEKIGFQATHLGKAVKIWRKVEEKRKGGEEVRVFLGYTSNIVSSGLREIIAWLVKERKVDVIVTTAGGIEEDFIKTLKPFILGDWEVNDAELREKGINRIGNIFVPNDRYIEFEKYMVPFFERILDIERKLKRPLTASEFIYEMGRYMDEVLGKEKEKSIIYWAYKRDVPIFCPAITDGSIGDMLYFFKEERHDSKLVIDIANDIVKLNNLAITAKETASIILGGSLPKHAIINANLFRGGTDYAIYISTAVPWDGSLSGAPPSEGVSWGKIKAKADYVEIWADATLVFPILVWMVMKA

SEQ ID NO: 2133 - protein, 546 aa, Triticum aestivum
  misc_feature (28)..(28): Xaa can be any naturally occurring amino acid
  misc_feature (271)..(271): Xaa can be any naturally occurring amino acid
MGNCCRSPAAAAREDVSSSHFPASAAGXKKPHQPRNGAAARGPAGEAAAQKRLAVLGEEGCDFIGGIDDKYLLDRELGRGEFGVTYLCVDRDTKEQLACKSISKRKLRTPVDVEDVRREVAIMRHLPRSPSIVTLREACEDEGAVHLVMELCEGGELFDRIVARGHYTERAAAAVTRTIVEVVQLCHRHGVIHRDLKPENFLFANKKENSPLKAIDFGLSIFFKPGEKFSEIVGSPYYMAPEVLKRNYGPEIDIWSAGVILYILLCGVPPXFWAETEQGVAQAILRGNIDFKREPWPNVSENAKDLVRRMLEPDPKLRLTAKQVLEHHWLQNAKKAPNVPLGDIVKSRLKQFSRMNRFKRRALRVIADHLSAEEVEDIKEMFKVMDTDNDGIVSYEELKSGIAKFGSHLAESEVQMLIEAVDTNGRGALDYGEFLAVSLHLQRMANDEHLRRAFLFFDKDGDGFIEPEELQEALAEDGAVDITEVVKDILQEVDTDKDGKISFEEFVAMMKTGTDWRKASRHYSRGRFNSLSIRLIKDGSVKMGNE

SEQ ID NO: 2134 - protein, 151 aa, Brassica napus
  misc_feature (6)..(6): Xaa can be any naturally occurring amino acid
  misc_feature (12)..(12): Xaa can be any naturally occurring amino acid
  misc_feature (16)..(16): Xaa can be any naturally occurring amino acid
  misc_feature (19)..(19): Xaa can be any naturally occurring amino acid
  misc_feature (21)..(21): Xaa can be any naturally occurring amino acid
  misc_feature (25)..(25): Xaa can be any naturally occurring amino acid
  misc_feature (28)..(28): Xaa can be any naturally occurring amino acid
  misc_feature (32)..(32): Xaa can be any naturally occurring amino acid
  misc_feature (38)..(38): Xaa can be any naturally occurring amino acid
  misc_feature (55)..(55): Xaa can be any naturally occurring amino acid
  misc_feature (58)..(58): Xaa can be any naturally occurring amino acid
  misc_feature (68)..(68): Xaa can be any naturally occurring amino acid
  misc_feature (77)..(77): Xaa can be any naturally occurring amino acid
  misc_feature (80)..(80): Xaa can be any naturally occurring amino acid
  misc_feature (85)..(85): Xaa can be any naturally occurring amino acid
  misc_feature (87)..(87): Xaa can be any naturally occurring amino acid
  misc_feature (92)..(93): Xaa can be any naturally occurring amino acid
  misc_feature (97)..(97): Xaa can be any naturally occurring amino acid
  misc_feature (102)..(102): Xaa can be any naturally occurring amino acid
  misc_feature (104)..(104): Xaa can be any naturally occurring amino acid
  misc_feature (106)..(106): Xaa can be any naturally occurring amino acid
  misc_feature (108)..(109): Xaa can be any naturally occurring amino acid
  misc_feature (115)..(115): Xaa can be any naturally occurring amino acid
  misc_feature (125)..(126): Xaa can be any naturally occurring amino acid
  misc_feature (130)..(130): Xaa can be any naturally occurring amino acid
  misc_feature (135)..(135): Xaa can be any naturally occurring amino acid
  misc_feature (142)..(143): Xaa can be any naturally occurring amino acid
  misc_feature (146)..(147): Xaa can be any naturally occurring amino acid
MASSMXSSAAVXTSPXQAXMXAPFXGLXSSAXFPVTRXANNDITSIASNGGRVSXMKXWPPVGKKKFXTLSYLPDLXEVXLGKEXYXLLRNXXIPCXEFELXHXFXYXXHGTTPXYYDGRYWTMXXLPLXFGCTXSAQVLKXXQEXXTEYP

SEQ ID NO: 2135 - protein, 328 aa, Trichosporonoides megachiliensis
MSYNKNIPLNDGNSIPALGYGTWQAEPGQVGEGVKLAVKAGYRHLDLAKVYQNQTEIGQALKELFDEGVVKREDLFITSKLWNNRHAPEHVEPALDETLKELGLSYLDLYLIHWPVAFKFTTPDELLPADPTNKDLAYVDDSVKLSDTWKAVVALKKTGKTKSVGVSNFSTRLVDLVEEASGERPAVNQIEAHPLLQQDELVAHHKSKNIVITAYSPLGNNVAGKPPLTENPGIVDAAKRLNHTPAAVLIAWGIQRGYSVLVKSVTPSRIKSNFEQITLSDEEFQRVTNLIKEYGESRNNVPFNYKPSWSIDVFGTQDEAKATHKINA

SEQ ID NO: 2136 - protein, 328 aa, Trichosporonoides megachiliensis
MSYNKNIPLNDGNSIPALGYGTWQAEPGQVGEGVKLAVKAGYRHLDLAKVYQNQTEIGQALKELFDEGVVKREDLFITSKLWNNRHAPEHVEPALDETLKELGLSYLDLYLIHWPVAFKFTTPDELLPADPTNKDLAYIDDSVKLSDTWKAVVALKKTGKTKSVGVSNFSTRLVDLVEEASGERPAVNQIEAHPLLQQDELVAHHKSKNIVITAYSPLGNNVAGKPPLTENPGIVDAAKRLNHTPAAVLIAWGIQRGYSVLVKSVTPSRIKSNFEQITLSDEEFQRVTNLIKEYGESRNNVPFNYKPSWSIDVFGTQYEAKATHKINA

SEQ ID NO: 2137 - protein, 375 aa, Shewanella oneidensis MR-1
MSDAKKLTGAGLRGQSAGETALSTVGVSGSGLTYRGYDVKDLAENATFEEVAYLILYGELPTTAQLAAYKTKLKGMRGLPQALKEVLERIPADAHPMDVMRTGCSMLGNLEAEHSFSEQSQIADRLLAAFPSIICYWYRFSHDGVRIDTETDDDQIGAHFLHLLHGKAPSALHTKVMDVSLILYAEHEFNASTFTARVCASTLSDMHSCVTGAIGSLRGPLHGGANEAAMELIQDMKDEADARDVLMGKLERKEKIMGFGHAIYRDSDPRNAIIKEWSEKLAADYGDDRLYRVSVACEALMWEQKKLFCNADFFHASAYHFMGIPTKLFTPIFVCSRVTGWTAHVMEQRSNNRIIRPSADYVGVSPRKVIPIANR

SEQ ID NO: 2138 - protein, 330 aa, Trichosporonoides megachiliensis
MSYKQYIPLNDGNKIPALGFGTWQAEPGQVGASVKNAVKAGYRHLDLAKVYQNQSEIGVALQELFDQGIVKREDLFITSKVWNNRHAPEHVEPALDETLKELGLSYLDLYLIHWPVAFKFTTPQELFPTEPDNKELAAIDDSIKLVDTWKAVVALKKTGKTKSVGVSNFTTDLVDLVEKASGERPAVNQIEAHPLLQQDELVAHHKSKNIVITAYSPLGNNVSGKPPLTQNPGIEATAKRLNHTPAAVLLAWGIQRGYSVLVKSVTPSRIESNYDQITLSPEEFQKVTDLIKEYGESRNNIPLNYKPSWPISVFGTSDEAKATHKINTNL

SEQ ID NO: 2139 - protein, 277 aa, Glycine max
  misc_feature (227)..(227): Xaa can be any naturally occurring amino acid
MPLVLAKSDSIQIREVWNDNLEEEFALIREIVDDYPYIAMDTEFPGIVLRPVGNFKNSYDYHYQTLKDNVDMLKLIQLGLTFSDEHGNLPTCGDESGTCCIWQFNFREFNVNEDVFANDSIELLRQSGIDFKRNNENGIDAHRFGELLMSSGIVLNDNVHWVTFHSGYDFGYLLKLLTCQDLPDTQVGFFNLINMYFPTVYDIKHLMKFGSSSMEAVAKLHEVFYVXTVGICHQAGSDSLLTSCTFRKLKDNFFSGSLEKYAGVLYGLGVENGQGSH

SEQ ID NO: 2140 - protein, 70 aa, Triticum aestivum
MADEGTANCIDIILAIILPPLGVFFKFACGIEFWICLLLTFFGYLPGIIYAVWVITKLGLQEGLLTSASK

SEQ ID NO: 2141 - protein, 462 aa, Triticum aestivum
MVDSSAGGKMSAHGGGGGGRTRVGRYELGRTLGEGTFAKVKFARNVETGENVAIKILDKDKVLKHKMIAQIKREISTMKLIRHPNVIRMYEVMASRTKIYIVMELVTGGELFDKIASRGRLKEDDARKYFQQLINAVDYCHSRGVYHRDLKPENLLLDANGTLKVSDFGLSALSQQVREDGLLHTTCGTPNYVAPEVINNKGYDGAKADLWSCGVILFVLMAGYLPFEDSNLMALYKKIYKADFSCPSWFSTSAKKLIKKILDPNPNTRITIAEVINNEWFKKGYQPPRFETAEVNLDDINSIFNESGDPAQLVVERREERPAVMNAFELISTSQGLNLGTLFEKQTDSVKRETRFASRLPANEILSKIEAAAGPMGFNVQKRNYKLKLQGENPGRKGQLAIATEVFEVTPSLYMVELRKSNGDTLEFHKFYHSISNGLKDVMWKPEGSIAEGDETRHRRSP

SEQ ID NO: 2142 - protein, 317 aa, Nicotiana tabacum
MAQNNEQQQQGQGLIEAGVLDDIINRLLEFRNARTVRQVQLSEAEIRSLCSASREIFLQQPNLLDLKPPIKICGDIHGQYGDLLRLFEYGGFPPEANYLFLGDYVDRGKQSLETICLLLAYKIKYPENFFLLRGNHECASINRIYGFYDECKRRFNVKLWKCFTECFNCLPVAALIDEKILCMHGGLSPVLTNLDQIRNLPRPTDVPDSGLLCDLLWSDPSREVKGWGMNDRGVSYTFGPDKVAEFLMQHDMDLVCRAHQVVEDGYEFFAERQLVTIFSAPNYCGEFDNAGAMMSVDESLMCSFQILKPTDRKPRFL

SEQ ID NO: 2143 - protein, 436 aa, Achromobacter obae
MTKALYDRDGAAIGNLQKLRFFPLAISGGRGARLIEENGRELIDLSGAWGAASLGYGHPAIVAAVSAAAANPAGATILSASNAPAVTLAERLLASFPGEGTHKIWFGHSGSDANEAAYRAIVKATGRSGVIAFAGAYHGCTVGSMAFSGHSVQADAAKADGLILLPYPDPYRPYRNDPTGDAILTLLTEKLAAVPAGSIGAAFIEPIQSDGGLIVPPDGFLRKFADICRAHGILVVCDEVKVGLARSGRLHCFEHEGFVPDILVLGKGLGGGLPLSAVIAPAEILDCASAFAMQTLHGNPISAAAGLAVLETIDRDDLPAMAERKGRLLRDGLSELAKRHPLIGDIRGRGLACGMELVCDRQSREPARAETAKLIYRAYQLGLVVYYVGMNGNVLEFTPPLTITETDIHKALDLLDRAFSELSAVSNEEIAQFAGW

SEQ ID NO: 2144 - protein, 310 aa, Nicotiana tabacum
MAQNGQGIEPAVLDDIINRLLEFRNARTVRQVQLSEAEIRSLCTASKEIFLHQPNLLELEAPIKICGDIHGQYGDLLRLFEYGGFPPEANYLFLGDYVDRGKQSLETICLLLAYKIKYPENFFLLRGNHECASINRIYGFYDECKRRFNVRLWKTNTDCFNCLPVAALIDDKILCMHGGLSPDLTDLDEIRNLPRPTDIPDSGLLCDLLWSDPSREVKGWGMNDRGVSYTFGSDKVAEFLMQHDMDLVCRAHQVVEDGYEFFAERQLVTIFSAPNYCGEFDNAGAMMSVDENLMCSFQILKPTDRKPRFL

SEQ ID NO: 2145 - protein, 63 aa, Triticum aestivum
  misc_feature (37)..(37): Xaa can be any naturally occurring amino acid
FEDGFVSLLPDNGNPKNALKLPTDETPLGQIKDGFFXRKDLVVFFLSPLGEEQINALKDLGPK

SEQ ID NO: 2146 - protein, 283 aa, Arabidopsis thaliana
MDAKETSATDLKRPREEDDNGGAATMETENGDQKKEPACFSTVIPGWFSEMSPMWPGEAHSLKVEKVLFQGKSDYQDVIVFQSATYGKVLVLDGVIQLTERDECAYQEMITHLPLCSIPNPKKVLVIGGGDGGVLREVARHASIEQIDMCEIDKMVVDVSKQFFPDVAIGYEDPRVNLVIGDGVAFLKNAAEGSYDAVIVDSSDPIGPAKELFEKPFFQSVARALRPGGVVCTQAESLWLHMDIIEDIVSNCREIFKGSVNYAWTSVPTYPRHWGHWIYALFN

SEQ ID NO: 2147 - protein, 180 aa, Zea mays
MQYLFDVWKDMEELKKEVREARRIKMLHQPSKAMDLENEIRILRNTFAEKSKDCVSLLKEWETHKRLKENGTIPSFDLEGLQCLGSMLRIVGLSGTHMDLSNISIQWFRIHPKESNKEIISGATRPVYALEPHDVGRYLQAEIDVGGEIAVAKTAGPVDPGLFDWTRSVSVIHMCCVLHD

SEQ ID NO: 2148 - protein, 304 aa, Nicotiana tabacum
MDTAAVDRIIEKLIEVRSSNPGKLVQLSESEIKQLCVASRDIFLKQPNLLESEAPIKTRGDIHGQYSDLLRLFEYGGFPPEANYLFLGDYVDRGRQSLETICLLLAYKIKYPENFFLLRGNHECASINRIYGFYDECKRRFNVKLWKSFTDCFNCLPVAALIDEKILCMHGGLSPDLSSLDQIRNLPRPTAIPDTGLLCDLQRSDPGKDVKGWGMNDRGVSYTFGPDKVSEFLSKHDLDLVCRAHQVVEDGYEFFAESELVTIFSAPNYCGEFDNAGAMMSVDENLLCSFQILKPAEKKNKFVM

SEQ ID NO: 2149 - protein, 180 aa, Zea mays
MADHHHHHHHGHPPDGPGGAGDQLEVIKEQDRLLPIANVGRIMKQILPPNAKISKEAKETMQECVSEFISFVTGEASDKCHKEKRKTVNGDDVCCAFGALGFDDYVDPMRRYLHKYRELEGDRAASSRGGGGGGPAGAGDPASASAAAGPSPSAASAGHFMFGAAMDRPDNNSSAGARPF

SEQ ID NO: 2150 - protein, 373 aa, Zea mays
  misc_feature (26)..(26): Xaa can be any naturally occurring amino acid
  misc_feature (50)..(50): Xaa can be any naturally occurring amino acid
  misc_feature (143)..(143): Xaa can be any naturally occurring amino acid
  misc_feature (152)..(152): Xaa can be any naturally occurring amino acid
  misc_feature (164)..(164): Xaa can be any naturally occurring amino acid
  misc_feature (185)..(185): Xaa can be any naturally occurring amino acid
  misc_feature (198)..(198): Xaa can be any naturally occurring amino acid
  misc_feature (211)..(211): Xaa can be any naturally occurring amino acid
  misc_feature (226)..(226): Xaa can be any naturally occurring amino acid
  misc_feature (245)..(245): Xaa can be any naturally occurring amino acid
MGKGAQGSDAAAAGGEVEENMAAWLXVAKNTLKIMPFKLPPVGPYDVRVXMKAVGICGSDVHYLREMRIAHFVVKEPMVIGHECAGVVEEVGARRERTCPVGDRVALEPGVSCWRCRHCKGGRYNLCEDMKFFATPPVHGSLXANQVVHPAXDLCFKLPDGVSXLEEGAMCEPLSVGVHACRRAXVGPETGVLVVGGXAPIGLVSLLGGAXPFGAPRVVVVDVDDXRLAVARSLGADAAVPVVAXAEDLADEVERIRAAMGSDIDVSLDCAGFSKTMSTALEATRPGGKVCLVGMGHNEMTLPLTAAAAREVDVVGVFRYKDTWPLCIDFLRSGKVDVKPLITHRFGFSQRDVEEAFEVSARGRDAIKVMFNL

SEQ ID NO: 2151 - protein, 123 aa, Arabis holboellii
AVLIQILNVVAFCHLQGVVHRDLKPENFLYTSKEENSQLKVIDFGLSDFVRPDERLNDIVGSAYYVAPEVLHRSYTTEADVWSIGVIAYILLCGSRPFWARTESGIFRAVLEADPSFDEPPWP

SEQ ID NO: 2152 - protein, 506 aa, Glycine max
  misc_feature (149)..(149): Xaa can be any naturally occurring amino acid
MASLSCSANDLAPLFNDTAAANYLCAQFDSISRKLNVTTYAVDNTYLLFSAYLVFAMQLGFAMLCAGSVRAKNTMNIMLTNVLDAAAGGLSYYLFGFAFAFGGPSNGFIGRHFFGLRKFPKDSPPSGDYSFFLYHWAFAIAAAGITSGXSIAERTQFVAYLIYSSFLTGFVYPIVSHWFWSSDGWASATRSHGNVLFGSGVIDFAGSGVVHMVGGIAVLWGALIEGPRIGRFDRSGRSVALRGHSASLVVLGSFLLWFGWYGFNPGSFLTIAKGYGSGGYYGQWSAIGRTAVTTTLAGSTAALTTLFSKWLLAGHWNVIDVCNGLLGGFAAITSGCAVVEPWAAIVCGFVAAWVLIWLNKLAAKVEYDDPLEAAQLHGGCGAWGVFFTGLFAKKVYVEEIYGVGRPFGALMGGGGRLLAAQVIQILVVCGWVTATMAPLFYGLHKMKLLRISRDDETAGMDLTRHGGFAYAYHDDEDGSSRGVGFMLRRIEPAASTTPSPPAAPQV

SEQ ID NO: 2153 - protein, 496 aa, Triticum aestivum
MALSRAQTNSGESLISSTFASRYVRTALPRFRIPEQSIPKDAAYQIINDELMLDGNPRLNLASFVTTWMEPECDKLIQNSVNKNYVDMDEYPVTTEFQNRCVNMIAHLFNAPIGEDETAVGVGTVGSSEAIMLAGLAFKRKWQNKMKAEGKPHDKPNIVTGANVQVCWEKFARYFEVELKEVKLREGYYVMDPAKAVELVDENTICVAAILGSTLNGDGEFEDVKMLNDLLVKKNEETGWDTPIHVDAASGGFIAPFLYPELEWDFRLPLVKSINVSGHKYGLVYAGIGWCIWRSKEDLPDELIFHINYLGADQPTFTLNFSKGSSQVIAQYYQLIRLGFEGYRNIMDNCQENAMVLKEGLERTGRFNIVSKDQGVPLVAFSLKDSSRHDEFEISEFLRRFGWIVPAYTMPPDAQHVTVLRVVIREDFSRTFAERLVIDIEKVLHELDALPSRSSGPALQHPNGDTVSEKDLARQREVVSVWKRAVAARKKTQGVC

SEQ ID NO: 2154 - protein, 362 aa, Schizosaccharomyces pombe
MGEEGIKINDTHKRRIDEVEPSEKEDNVERQTKKYNFEIDEPEEQEKKDEKEDDKEESPSKSLEEISQSVSPVEEEPRDVRFKELSTPFSYPINDPPEGRPVRVYADGVFDLFHIGHMRQLEQAKKVFPNVHLIVGLPNDQLTHRLKGLTVMNDKERAEALRHCKWVDEVLENAPWVITPEFLEEHKIDFVAHDDIPYASDDSGDIYLPVKKVGKFIPTKRTEGVSTSDLITRIIRDYDQYVMRNLARGVNRKELNVSLFKKNELDLRHHIKVLRDTLRNHWVSTTRDLKADIKSFLSMATTDYQLQKNPLHGSSEPSSPGPTGFLGGINRWMQRRSSSHYDLPRVGNEIAASSSSATEENH

SEQ ID NO: 2155 - protein, 324 aa, Triticum aestivum
MEAETAAKRARENEGAAAADGAGEQAGISAVIPGWFSEISPMWPGEAHSLKVEKVLFQGKSDYQDVLVFQSSTYGKVLVLDGVIQVTERDECAYQEMITHLPLCSIKDPKKVLVIGGGDGGVLREVSRHSSVEQIDICEIDKMVVDVSKQFFPHLALGFEDPRVSLHIGDGVAFLKNAPEGTYDAVIVDSSDPVGPAQELFEKPFFESVSRALRPGGVVCTQAESIWLHMHIIEDIVTNCRQVFKGSVNYAWTTVPTYPSGVIGFMLCSTEGPSVDFQHPVFSIEEDEYSTKSKGPLKFYNSEFHTASFCLPSFARRVIEAKAN

SEQ ID NO: 2156 - protein, 123 aa, Arabis holboellii
AVLIQILNVVAFCHLQGVVHRDLKPENFLYASKEENSQLKVIDFGLSDFVRPDERLNDIVGSAYYVAPEVLHRSYTTEADVWSIGVIAYILLCGSRPFWARTESGVFRAVLKADPSFDEPPWP

SEQ ID NO: 2157 - protein, 571 aa, Triticum aestivum
MAGGGVEDVYGEDRATEEQLITPWSFSVASGHQLLRDPRHNKGLAFTEAERDAHYIRGLLPPAIVSQEHQEKKIMHNLRSYTVPLHRYIAMMDLQERNERLFYKLLIDNVEELLPVVYTPVVGEACQKYGSIYRRPQGLYISLKDKGKVLEVLKNWPERSIQVIVVTDGERILGLGDLGCQGMGIPVGKLSLYTALGGVARPSACLPITIDVGTNNETLLNDEYYIGLRQRRATGEEYHELLQEFMNAVKQNYGEKVLVQFEDFANHNAFDLLAKYSKSHLVFNDDIQGTASVVLAGLLAALKMIGGGLVDQTYLFLGAGEAGTGIAELIALEMSKHTELPVDDCRKKIWLVDSKGLLVESRKESLQHFKKPFAHEHEELKTLLEAVQSIKPTVLIGTSGVGKTFTQEVIEAMASFNEKPVIFSLSNPTSHSECTAEEAYTWSKGTAVFASGSPFDPVEYEGKTFVPGQSNNAYVFPGFGLGVVISGAIRVHDDMLLAASEALAEEATQENFDKGLIFPPFTNIRKISASIAAKVAAKAYDLGLASRLPRPDDLVKYAESCMYTPLYRSYR

SEQ ID NO: 2158 - protein, 181 aa, Cicer arietinum
MASSMISSSAVTTVKRASSVPSGAVAPFVGLKSMAGFPVRKVNNDITSIASNGGRVHCMQVWPPIGKKKFETLSYLPPLTEEQLLKEVEYLLRKGWVPCLEFELEKGFVYREHNNSPGYYDGRYWTMWKLPLFGCTEAVQVLKELQEVVKAYPNAFVRIIGFDNVRQVQCISFIAHTPKEF

SEQ ID NO: 2159 - protein, 255 aa, Brassica napus
  misc_feature (126)..(126): Xaa can be any naturally occurring amino acid
ASVSFASASKPVSASISSAGHASVEEDAVVMRKPVWEDEWEFAEVETKTIPLWVVFDKPPSLQEAKEATDDLKDALNMAYMEGSNEVGSVSRMFSSFQPSENRAVESAVPQVALKAFAFLSENTAXAQSVVASIASDPKVWDAVMENKDLMKFLETNTASTTVEADNDDKSELSSETESEEESEAKPINLMEILRDMKLKPVQMMENVSSYFGGLFRTETFTKGGQERKRMLLNDPTTLFGLAVCVIFMVVLKRA

SEQ ID NO: 2160 - protein, 123 aa, Arabis holboellii
AVLIQILNVIAFCHLQGVVHRDLKPENFLYTSKEENSQLKVIDFGLSDFVRPDERLNDIVGSAYYVAPEVLHRSYTTEADVWSIGVIAYILLCGGRPFWARTESGIFRAVLKADPSFDEPPWP

SEQ ID NO: 2161 - protein, 314 aa, Zea mays
  misc_feature (149)..(149): Xaa can be any naturally occurring amino acid
MGGGVMRTAAKVSIAGGAAAAKSGRFRNAAPVFATAPAAAGSEAAPLVSVSSGEVPPAAAQWAASWELDDWEFADWRDDAAAAAAVVEREATAAAAKPRLVFAPPSREEAEEATTELRDAVERAYFNESPVEVVKEQDKEFNKLATDAXDSFYPGHVVQAFTLLKSSTEAQSVVASLASDRNVWDAVLKNEKVMEFYKTHQTTLVQTSPNEAVTVELPGKLEDAASENTSSGELPAGSGPSFSDFVDNAKKTVMDVVHNITDFFKDLFDDSAKTQTGAGPSAAEKGPSTADMAVGGSFMALAIAVILVVMFKRA

SEQ ID NO: 2162 - protein, 211 aa, Asarum caudigerum
NRQVTYSKRRNGLLKKAYELSVLCEAEVALIVSSSRGRLYEYANNSVRTTIDRYKKASDSSNPASVSETNSQYYQQEATKLRQQIDILQNANRQLMGESISAMNVKQLKQLETRLEKGISRIRSKKNELLFAEIEYMQKREVELRNDNIYLRGKIVENERAQQNMNMLPGGGGYEVMSQHPSYDSRNYLPVNLLEHNQHFSHQEPTALQLG

SEQ ID NO: 2163 - protein, 315 aa, Vitis vinifera
MAPGGSTYKEVLESHSTVTDYDIAMTKADTNLTPAKTTAGLSGKKGISSPNGVHELLECPVCTSLMYPPIYQCPSGHTLCSNCKSRVHNCCPTCRHELGDIRCLALEKVAESLELPCRYQSLGCHDIFPYYSKLKHEQQCRFHPYNCPYAGFECSVTGDIPTLVEHLKGDHKVDMHDGCTFNHRYVKSNPQEVENATWMLTVFNCFGKQFCLHFEAFQLGTAPVYMAFLRFMGDDNEAKKFSYSLEVGGNSRKLIWQGVPRSIRDSHRKVRDSQDGLIIQRNLALYFSGGDRQELKLRVTGRIWKESELWKDNGC

SEQ ID NO: 2164 - protein, 282 aa, Magnaporthe grisea 70-15
MAANAKYTAAPTQDPDDHLDYTSAPPSYQATGSSAAQPSDAERLASGVPRSSEDDLPDDFKFGGNVAEATVEIRHQFIRKVYSILTVQLLITGGVSALGFMSTSYRDWVRAHPGVLWLSLFGAMGMMLLTYWKRKSYPTNLLFLGGFTLLEAYTISVVVTFYDSSIVLNAVLLTAGMFVFLTAFAFQTKYDFTSWMPYLFGALWGLVLFGFVAMFLPYSSTAELIYGALAALVFSGYILVDTQLVMRTHHVEEEIAAAISLYLDIINLFLAILRILNSQQQN

SEQ ID NO: 2165 - protein, 275 aa, Bacillus sp. KSM-K16
MEFWFTEKQTERFGITMKIKRTLHTEKTDFQQLDMVETEEFGNMLLLDGMVMTTEKDEFVYHEMVTHVPLFTHPNPKHVLVVGGGDGGAIREILKHPSVEKATLVDIDGKVIEYSKTYLPTIACALEDERVDVKVADGFMHIAQSANEYDVIMVDSTEPVGPAAKLFERGFYEGISKALKEDGIFVAQTDNPWFHQELVSNVYKDVKEIFPITRLYTANIPTYPSGMWTFTIGSKKHDPLAVEATRFHDVQTKYYTPDIHRAAFVLPKFVQDLLK

SEQ ID NO: 2166 - protein, 158 aa, Escherichia coli
MKLISNDLRDGDKLPHRHVFNGMGYDGDNISPHLAWDEVPAGTKSFVVTCYDPDAPTGSGWWHWVVVNLPADTRVLPQGFGSGLVAMPDGVLQTRTDFGKTGYDGAAPPKGETHRYIFTVHALDVERIDVDEGASGAMVGFNVHFHSLASASITAMFS

SEQ ID NO: 2167 - protein, 345 aa, Burkholderia cepacia R18194
MLKALVLERTRELALRDIDLPQEVGPGDVRIKVHTVGVCGSDVHYYVHGGIGPFRVDAPMVLGHEASGTVVETGAGVTHLRVGDRVCMEPGVPRFDSPATLRGLYNLDPDVRFWATPPIHGCLTPYVVHPAAFTYRLPDTVSFAEGAIVEPLSIGLQAAKKAAMKPGDLAVVIGAGTIGAMTALAALAGGAARVILADVVPDKLALFADNPAVTTVDVRTQPLADVVAEATDGWGADVVFEASGSANAYAGLVDLMCPGGCAVLIGMPVAPVPLDVVALQAKEGRIESVFRYANIFPRALALIASGAIDVKPFISRTFPFSEGVRAFEEAASGHPRDVKIQIEMD

SEQ ID NO: 2168 - protein, 451 aa, Zea mays
MVGGGGGGPLRRVGKYEVGRTIGEGTFAKVKFAQNTETGESVAMKVLDRSSILKNKMAEQIKREISIMKLVRHPNVVRLHEVLASRKKIFIILEFITGGELFDKIIRHGRLSEADARRYFQQLIDGVDFCHKKGVYHRDLKPENLLLDSQGNLKISDFGLSAWPAQGSFLLRTTCGTPNYVAPEVLSHKGYNGALADTWSCGVILYVLLAGYLPFDEVDLTTLYGKIESAEYSFPAWFSGGAKSLIRRILDPNPETRIRIEEIRSDEWFQKNYEPIKEIENEEVNLDDVNAAFDDPEDDNEDAFEDETGPLTLNAFDLIILSQGLNLAALFDRRQDCDKLQNRFLSRNPAKVILSSMEVVAQSMGFKTHIRNYKMRVEGLNADKTSHLSVMVEVFEVAPSIFMVELQRAAGDTSEYNTFVNNYCGKLDDIIWKFPTEKGKSRIPRLSKSHS

SEQ ID NO: 2169 - protein, 496 aa, Solanum tuberosum
MEPKPATEPKKSSVWVLPYKTQSLQSLYTIGKKLGQGQFGTTHLCIEKSSGNLYACKTIPKKKLICKEDYEDVWKEIQIMHHLSEHPNVVRIKGTYEDALYVHIVMELCAGGELFDRIVEKGHYSEREAAKLIKTIVGVVEACHSLGVMHRDLKPENFLFLSSDEDAALKATDFGLSVFYKPGETFSDVVGSPYYVAPEVLCKHYGHESDVWSAGVILYILLSGVPPFWAETDMGIFRQILRGKLDLESEPWPGISDSAKDLIRKILDRNPKRRLTAHEVLCHPWIVDDTVAPDKPLDSAVLSRLKQFSAMNKLKKMALRVIAERLSEEEIGGLKELFKMLDTDNSGTITFEELKEGLRRVGSELMESEIKDLMDAADIDNNGTIDYGEFIAATVHLNKLEREENLLSAFSYFDKDGSGYITIEELQQACKEFGLSELNLDEIIKDIDQDNDGQIDYKEFSAMMRKGTGGAVGRRTIRNNLNLGEALGLVQSEEIL

SEQ ID NO: 2170 - protein, 272 aa, Pisum sativum
FVRQLNTYGFRKVDPDRWEFANEGFLAGQRILLRTIKRRRNVAQSPSMQRESGGACIELGEFGLEGEIERLRRDRSVLVAEIVKLRQQQNNSRDQISAMEARLLITEKKHQQMMAFLARALSNQSFIQQLANNKELKGVEMKRKRRLPASSSLENLQNDSVTMMTVPIESVVDYSSREQQEGLTAIESEIETLLSAYDNESRSEIKDPSANESNLSDWEELLNQKLVGGNPEDEVLIGDFSQIDAPVEDLVEKNDDWTVDLQNLVDEMDFEP

SEQ ID NO: 2171 - protein, 509 aa, Glycine max
  misc_feature (14)..(14): Xaa can be any naturally occurring amino acid
  misc_feature (152)..(152): Xaa can be any naturally occurring amino acid
  misc_feature (177)..(177): Xaa can be any naturally occurring amino acid
MSLPACPAEQLAQXLLGPNTTDASAAASLICGQFAAVDSKFVDTAFAVDNTYLLFSAYLVFSMQLGFAMLCAGSVRAKNTMNIMLTNVLDAAAGGLFYYLFGFAFAFGSPSNGFIGKHFFGLKDIPSSSYDYSYFLYQWAFAIAAAGITSGXIAERTQFVAYLIYSSFLTGFVYPVXVSHWFWSPDGWASAISSADHVFSPGDRLFSTGVIDFAGSGVVHMVGGIAGLWGALIEGPRMGRFDHAGRAVALRGHSASLVVLGTFLLWFGWYGFNPGSFNKILLTYGNSGNYYGQWSAVGRTAVTTTLAGSTAALTTLFGKRVISGHWNVTDVCNGLLGGFAAITAGCSVVEPWAAIVCGFVASIVLIACNKLAEKVKFDDPLEAAQLHGGCGTWGVIFTALFAKKEYVKEVYGLGRAHGLLMGGGGKLLAAHVIQILVIAGWVSATMGPLFWGLNKLKLLRISSEDELAGMDMTRHGGFAYAYEDDETHKHGMQLRRVGPNASSTPTTDE

SEQ ID NO: 2172 - protein, 365 aa, Stylosanthes humilis
MGSTGETQITPTVVSDEEANLFAMQLASASVLPMVLKSAIELDVLEIIAKAGPGVHLSPADIAANVPTTNPDAAVMLDRMLRLLACYNILNHSLRTLPDGKVERLYGLAPVAKFLVKNEDGVSLSALNLMNHDKVLMESWYYLKETVLEGGIPFNKAYGMTAFEYHGTDPRFNKVFNKGMNDHTTITMKKILEIYTGFEGLKSLVDVGGGVGAVVNMIVTKYPHIKGINFDLPHVIEDAPSYPGVEHVGGDMFVSVPKADAVFMKWICHDWSDEHCIKFLKNCYDAVPDNGKVIVAECILPVAPDSSLATKGVVHIDVIMLAHNPGGKERTEKEFEALAKAAGFQGFRVVCCAFNTYIMEFLKKP

SEQ ID NO: 2173 - protein, 401 aa, Triticum aestivum
MVLESTMICIDNSEWMRNGDYSPSRFQAQADAVNLICGAKTQSNPENTVGVMTMAGKGVRVLVTPTSDLGKILACMHGLEVGAEANLAAAIQVAQLALKHRQNKRQQQRIIVFIGSPVTYDKKVLETIGKKLKKNNVALDVVDFGETDDEKPEKLEALIAAVNSSDSSHIVHVPPGDHALSDVLISTPIFTGEEGGSGFAASAAAAAATGATGYDFGVDPNVDPELALALRLSMEEERARQEAIAKKAAEDNKDQASSSTDAIMAEAELTLNAPADVDADLLKDDDDAQLLQQALAMSMDEGASGAAAVADAAMAEAAADDQDLALALQMSVQDAEAAGQSDMSKVFEDRSFVTSILNSLPGVDPNDPSVKDLLASLHGQGEQEEKKDTEDKPDKPEDGKN

SEQ ID NO: 2174 - protein, 58 aa, Zea mays
FGTANCLHILIAIILPTMGVYLKYRCRHEFWICLLFTFLGYIPSIIYSIYSITKNTYH

SEQ ID NO: 2175 - protein, 416 aa, Ralstonia solanacearum
MYQHIKVPAGEKITVNQDFSLNVPDNPIIPYIEGDGTGFDITPVMIKVVDAAVEKAYAGKRKISWMEIYAGEKSTKVYGPDVWLPEETLQVLKDYVVSIKGPLTTPVGGGIRSLNVALRQELDLYVCLRPVRYFKGVPSPVKEPEKTDMVIFRENSEDIYAGIEFEAQSDKAKKLIKILQDEFGVKKIRFPETSGIGVKPVSKEGTERLVRKAIQYAIDNDKPSVTIVHKGNIMKFTEGGFRDWAYALAQKEFGAELIDGGPWCKFKNPKTGKEIVVKDAIADAFLQQILLRPAEYSVVATLNLNGDYISDALAAQVGGIGIAPGANLSDSVAMFEATHGTAPKYAGKDYVNPGSEILSAEMMLRHMGWTEAADLIISSIEKSILSKKVTYDFARLLEGATQVSCSGFGQVMIDNM

SEQ ID NO: 2176 - protein, 86 aa, Zea mays
GSGVARAAAVTQRRTVKWFNDTKVFGFICPEDGSKHLFVHQSYIKSDGFHSLADGDDVEFSIYHGDYGRTKAVDLTIPDGSFLRGC

SEQ ID NO: 2177 - protein, 123 aa, Arabis holboellii
AVLIQILNVVAFCHLQGVVHRDLKPENFLYTSKEENSQLKVIDFGLSDFVRPDERLDDIVGSAYYVAPEVLHRSYTTEADVWSLGVIAYILLCGSRPFWARTESGIFRAVLKADPSFDEPPWP

SEQ ID NO: 2178 - protein, 365 aa, Iris hollandica
MDSTPVIQIPTPYPFSDEEACLYAMQLRSFSVLPMTLKAAIELDLLEIIAKAGPGAYLSPAEISSQLPTENPEAPAMIDRMLRLLACYSVVSCRVDAAGDDGKPRRRYGAERVVKYLTKNEDGVSMAALTLMNQDKVFMESWYHLKDAVLEGGIPFKKAFGMSPFEYQGTDPRFNKVFNEGMRNHSAFIMKKILETYQGFDSVKLLVDVGGGLGGTMKAIVTKYPHIEGINFDLSHVISEAPPIPGVKHVGGDMFESVPSGDAIFMKWILHDWSDAHCLKLLSNCWKALPEDGKVIVMEGILPTIPEPTSAAQGVVHIDLVMMAHNPGGKERTKAEFESLARDAGFSGSKALCSYANCWILEFYK

SEQ ID NO: 2179 - protein, 564 aa, Zea mays
MAAAAVTSNGGAVAANGPAPGRLASVYSEVQTNRLLHALPLPSVLRSNFSVVVGPASSAAGNPDEIAKLFPNLFGQPSASLVPSAEPAATRPLKIGVVLSGGQAPGGHNVICGIFDYLQERAKGSTLYGFKGGPAGIMKCKYVELTSDFVYPYRNQGGFDMICSGRDKIETPEQFKQAEDTANKLDLDGLVVIGGDDSNTNACLLGEYFRSRNMKTRVIGCPKTIDGDLKCKEVPTSFGFDTACKIYSEMIGNVMTDARSTGKYYHFVRLMGRAASHITLECALQTHPNAALIGEEVAAKKQTLKNVTNYITDIICKRADLGYNYGVILIPEGLIDFIPEVQKLIAELNEILAHDVVDEAGAWKSKLQAESRELFEFLPKTIQEQLMLERDPHGNVQVAKIETEKMLISMVETELEKRKAEGRYSAHFRGQAHFFGYEGRCGLPTNFDSNYCYALGYGAGALLQSGKTGLISSVGNLAAPVEEWTVGGTALTSLMDVERRHGKFKPVIKKAMVELDAAPFKKYASLRDEWAIKNRYISPGPIQFSGPGSDDSNHTLMLELGAEL

SEQ ID NO: 2180 - protein, 157 aa, Zea mays
SSSVPLSAEGITVQSFNADLLYEPWEVLDDDGFPFTMFAPFWNRCLCMPDPAAPLLPPKRINSGDLSRCPWDELIFEDESERGSNALLARAWSPGWQNADKALTAFLDGPLVDYSANHKKADSASTSLLSPYLHFGELSVRKVFHQVRMKQGDPLES

SEQ ID NO: 2181 - protein, 1994 aa, Gibberella zeae PH-1
MSSAALQTAPHQHTALASSPLGTPSSRQYRPSQSSPNSQAYNAQQTSTASSSSRRPPSRKTNDSAPSPSYHLTPGFGSPVTASVANHQEPVASDWQGNMPPVAPPRSSSNHQSGSSRRSHYPNEKPPSSPRRNESTRTGSRGEQAAAENGYRSSKADTAARASSRDGKAAPSQLPVRSTHSTPSKPVHDATDSLTKAIAAAQDTIDRDRNHASNQHNGDDTAAPPPAVATGEHGEERRQRSRHDHSRSNKGNTKFGDFILGNTIGEGEFGKVKLGWKQDSSVQVAIKLIKRDTVGSNPSRFAKIYREVAILRGVQHPNIVRLIDKVETDRHIGIILEYASGGELFDYILNHRYLKDNAARRLFAQLVSGVGYLHKKGIVHRDLKLENLLLDRNRNIIITDFGFANTFDAHEELTKEEELNLTDKEFVKRMGLDRVKMNGSRKGDLMQTSCGSPCYAAPELVVSDSLYTGRKVDVWSCGVILYAMLAGYLPFDDDPANPEGDNINLLYKYIVTTPLTFPEYVTPHARDLLRRILVPNPRKRADLFEVARHSWLSEYANLVEFITSTTTLPSEVPDSGVSPDDYAEAPTVARSNSVREASKHKQPHPPVVGGLAKTHGSVDPDSEATHRGTPKDAKRRTVQVEYVAPTTKTQRGADVAPSKPSSHSLQQQQPANTPEPVTEKPLPREPPLTKDNPSRAQQSRRPQSSHKNAPPPHRPSRDTRATSDNAFMTGGTTTTRPRTQGSMQSSTSMGLQSQTNYGQPAPPTIADTNAHGRIQQPQNPEEEGNIAKDVGSVPPKVMKMTTFQNETKAAGRGHKRSNTLGDIGSKIMGRSGSIFGGRSKKRPEQQQQQQQQQAEKSSRKYPPVSMSNTMLPGEDAGPRPSMDSKASRRSFSIGLGKKRSGSVQGSSDKQNRRFSLAKAMGLGRNEGSVTGSEADSQQDLPIQHPRTEQLRGYSAHDEPRHSEPYFDAPYEQYPQRDTAQSSPVYNTRYGSQQQDGRRPSAIPTYIQGGSHLNTGSDSSVDMRRPNDPRSRPYQEDFSGSEGYDGRPVGSSREDRPGVLHKSHKKFADAYDGENYRGHEGSSGAAKRVMDFFRRRGKARGATSNEGRTPRALDDAHSQLGDHPGQLILTTYARDWLCFDCYNHINWRSVVCFDGNETRDDETTISSLTVPFAKQITSHELAGKLTERAKKLSSQRVATIAYLEYMYMRPGSVSLPDTYVTWAKLAFAYSGIQTHRRIDLNLPFGSDASYTRMLSPLRHVTSNVGFASYGSRSVAQPTAPTAQGLSEQPRLQEFDEKKTRLDNQNGRKTKSLHKIPSAGGVSSPAAGSGSVLEAPSKAEEPAQGETPSTTSKNAGFFAELKRSVRIVITYSWLNVFMVFVPVGIAVSQVPGVPAGLIFGMNAIAIIPLAGLLAFATESVALKMGDALGALLNVTFGNAVELIIFILALVKNEIRVVQSALLGSILANLLLILGMSMLLGGLRFREQVYNSTVTQMSACLLSLSVISLVLPTAFHASFKDNDKADRESLKISRGTSVVLLIVYVIYLTFQLKSHAYMYESTPQHIIDAELAPGPAAGFLDSSSSDDSSSSSSDSSDSDSSHGTMRKRMKKVLRNRRHRRSSAASADTADTKGTRSASFATNNTTTPQEEVSEAKASRQRVPRSASYEGSEHAVDDDDEEEAERSHRRRRYRRHRHRRSKKEARKAKKEAKNAQSQNGVPESIPENKGEGEPRRVDFAVQDDLEAGPSTNGGKRPFPLRGISVKALAPVFTEKPPTASGPAPHVRYGIRRTNSLPDRLQFRAPGAMLPAQIPPMLNAPGVKSTDSDEEDEEEHLSQFSAVILLLVSTALVAVCAEFLVDSIQEVVKTSHINQVGIGLIILPIVGNAAEHVTAIKVAYKNNMDLAIGVAVGSSIQIALLLTPFMVILGWIMNKEMTLYFTLFETVCLFVSAFIVNFLVLDGRSNYLEGALLCAVYIIIAVVAFFYPDSEDASVWGGGT

SEQ ID NO: 2182 - protein, 175 aa, Triticum aestivum
MAPTVMASSATSVAPFQGLKSTAGLPVSRRSNGASLGSVSNGGRIRCMQVWPIEGIKKFETLSYLPPLSTEALLKQVDYLIRSKWVPCLEFSKVGFIFREHNASPGYYDGRYWTMWKLPMFGCTDATQVINEVEEVKKEYPDAYVRIIGFDNMRQVQWVSFFAFKPPGCEESGKA

SEQ ID NO: 2183 - protein, 138 aa, Pyrococcus abyssi GE5
MGDKTKVQVSKLKPGRYIIIDDEPCRIVNITVSSPGKHGSAKARIEAVGIFDGKVRSIVKPTSAEVDVPIIDKKTAQVIAITPDTVQIMDMETYEMFEVPIDTGVAEEIRDQLKEGINVEYWETLGRVKIMRIKGEGE

SEQ ID NO: 2184 - protein, 430 aa, Deinococcus radiodurans R1
MSNVFYRSSKPYPVAVRGEGVFLYDDAGRRYLDGSSGALVANIGHGRAEVGERMAAQAARLPFVHGSQFSSDVLEEYAGRLARFVGLPTFRFWAVSGGSEATESAVKLARQYHVERGEPGRFKVITRVPSYHGASLGSLAASGMGARRELYTPLMRPEAWPKLPKPDPARNGAEDAEGLRALLEREGPETVAAFMAEPVVGASDAALAPAPGYYERVRDICDEAGIIFIADEVMSGMGRCGSPLALSRWSGVTPDIAVLGKGLAAGYAPLAGLLAAPQVYETVMGGSGAFMHGFTYAGHPVSVAAGLSVLDIVEREDLTGAAKERGAQLLAGLQALQARFPQMMQVRGTGLLLGVVLGDLATGQAFETPGIASRIGAAALKRGLITYPGSGAEPNGRGDHLLLGPPLSITAAEVDELLALLAGALEDVLG

SEQ ID NO: 2185 - protein, 168 aa, Oryza sativa
MAAAPSATSVHDFTVKDASGKDVNLSTYKGKVLLIVNVASQCGLTNSNYTELSQLYEKYKVQGFEILAFPCNQFGGQEPGSNEEIVQFACTRFKAEYPIFDKVDVNGNNAAPLYKYLKSNKGGLFGDSIKWNFSKFLVDKEGRVVDRYAPTTSPLSIEKDIKKLLGSS

SEQ ID NO: 2186 - protein, 314 aa, Thermus thermophilus HB27
MDYGMYFFEHVTPYETLVRRMERVIASGKTPFQDYFLFESKGFGKVLILDKDVQSTERDEYIYHETLVHPAMLTHPEPKRVLIVGGGEGATLREVLKHPTVEKAVMVDIDGELVEVAKRHMPEWHQGAFDDPRAVLVIDDARAYLERTEERYDVVIIDLTDPVGEDNPARLLYTVEFYRLVKAHLNPGGVMGMQAGMILLTHHRVHPVVHRTVREAFRYVRSYKNHIPGFFLNFGFLLASDAFDPAAFSEGVIEARIRERNLALRHLTAPYLEAMFVLPKDLLEALEKETMVSTDQNPFYVTPEGEARQAPYKG

SEQ ID NO: 2187 - protein, 495 aa, Deinococcus radiodurans R1
MTAEPQVSPAPTPPPAAPLLVRDRLFIGGEWVTPCGQGTLEVVNSATEEVMGTVPEGTPEDAERAILAARAAFDSWSQTPAEERAALLERISRGLNERQSEIAALVAQEVGMPFVLSNVIQVGLPAVTFMSMAEEIRQLPAEETLASSLLLREPVGVVAAITPWNYPLHQIAAKVAPALAAGCTVVLKPSEVAPLNAFVLAEIIEAAGAPAGVFNLVTGTGPVVGEVLAAHPEVDMVSFTGSTAAGKRVSELAARTVKRVALELGGKSPYLILDDADLSGEALVQAVMNGIQGCYLNSGQTCSALTRMLVPRSRLPEVEAVAQAVVSQVKVGSPFDAATTLGPLVSDVQRERVRGHIRQGVAEGARLIAGGAESPEGLERGYYVQPTIFSDVTPEMTIAREEIFGPVLVIQPYEDEEDAVRIANATHYGLAGGVWSSDRERAVRVARRLRTGQVSINGGAFNPVAPFGGYKQSGNGREFGRLGLEEFMEVKALQF

SEQ ID NO: 2188 - protein, 387 aa, Rubrobacter xylanophilus DSM 9941
MGQAGGPTAVMNASLLGFLEGCPPGAEIWGVLDGFRGLVEGDLARLPPGCVDRRLYLSPGAWLGAGRRPLGEGDPERCVERLAARGVRGLAMVGGNGTMWACARIEEAARRAGYGLAVVGIPKTVDNDLAGTDHAPGFPSAARYVAAVVRDIGADLEAMRGFESVRVLETMGRNAGWLALSAGYLRREPSDPPHLIYVPERPFDPDAFLGDVEAAVRAHGFVVAVVSEGLVRRPREEGLRRPVIGGVAPELARRVEEALGLPSRGELLGMGQRSFSLAASPLDREEARALGNRAARMLLEGRSGLMPALRRLPGRRYRVAVEEVPFGRVAGAERPLPPRWVVPPQEVPQGFRGWLAPLVGEDLAPHPPPLVRRLRGAAAGREGRSES

SEQ ID NO: 2189 - protein, 138 aa, Triticum aestivum
  misc_feature (21)..(21): Xaa can be any naturally occurring amino acid
  misc_feature (80)..(80): Xaa can be any naturally occurring amino acid
  misc_feature (99)..(99): Xaa can be any naturally occurring amino acid
  misc_feature (102)..(102): Xaa can be any naturally occurring amino acid
  misc_feature (110)..(110): Xaa can be any naturally occurring amino acid
MAPAVMASSATTAAPFQGLKXTAGLPVSRRSCSAGLSSVSNGGRIRCMQVWPIEGIKKFETLSYLPPLSTEALLKQVDYXIRSKWVPCLEFSKVGFRLXREXNSSPRVLXTVRYWDKCGNCPIVRGCTDAKGCGWREV

SEQ ID NO: 2190 - protein, 311 aa, Archaeoglobus fulgidus DSM 4304
MLDMPIDPVYYQLAEYFDSLPKFDQFSSAREYREAINRIYEERNRQLSQHERVERVEDRTIKGRNGDIRVRVYQQKPDSPVLVYYHGGGFVICSIESHDALCRRIARLSNSTVVSVDYRLAPEHKFPAAVYDCYDATKWVAENAEELRIDPSKIFVGGDSAGGNLAAAVSIMARDSGEDFIKHQILIYPVVNFVAPTPSLLEFGEGLWILDQKIMSWFSEQYFSREEDKFNPLASVIFADLENLPPALIITAEYDPLRDEGEVFGQMLRRAGVEASIVRYRGVLHGFINYYPVLKAARDAINQIAALLVFD

SEQ ID NO: 2191 - protein, 299 aa, Bartonella sp.
  misc_feature (27)..(27): Xaa can be any naturally occurring amino acid
  misc_feature (105)..(105): Xaa can be any naturally occurring amino acid
DGDKGILLYRGYPIDQLAEKGDFLESXYLLLYGELPTQQEKNDFDRCIMQHTMVHEQFARFFHGFRRDSHPMAVMVSCLGAMSAFYHDSIDITDPHQRMIASVRXISKVPTLAAMAYKYSIGQPFVYPRNDLSYAANFLRMCFAVPCEEYKTNPVLSRAMDQIFILHADHEQNASTSTVRLAGSSGANPFACIAAGVACLSIKRIPEFIARAKDKNDPFHLMGFGNRVYKNYDPRAKIMQKTCHEVLKELNIQDDPLLDIAIELEKIALNDEYFIEKKLYPNVDFYSGITLKALGFPTE

SEQ ID NO: 2192 - protein, 421 aa, Zea mays
MADNNFVCKNYLLIYKTINIRLKTSFGVALLERDILLKNLKCVLESLRGRVTGKTKDEIEESISMVEILAVQLSKREAELLQQKEEVTKLAKSLKQASEDAKRIVEEERANAHTEIETAKGSVQRVQQAVQEHEKMSQNTGKQDMEELKKEVREARRIKMLHQPSKAMDLENEIRILRNTFAEKSKDCVNLLKELEMHKRLKENGTIPSFDLEGLQCLGSMLRIAGLSGTHMDLSNISIQWFRIHPEESNKEIISGATRPVYALEPHDVGRYLQAEIDVGGEIAVAKTAGPVDPDAGLVDYVETLVRKPETEFNVVVLQLNGIDLPKESVHVLNVGRLRMRLTKGKSVVAKEFYSSSMQLCGVRGGGEAASQAMFWRPRNDLSLVLAFESTRERNTAIMLARRFAVDCNIILAGPGDKTPW

SEQ ID NO: 2193 - protein, 351 aa, Zea mays
HWVPRGRPPPRRPAKRVGLLLGRYELGRLLGHGTFAKVYHARQADTGETVAIKVLDKEKALRNGLVPHIKREIAILRRVRHPNIVRLFEVMATKSKIYFVMEFVRGGELFARVAKGRLKEDTARRYFQQLISAVGFCHARGVFHRDLKPENLLVDERGDLKVSDFGLSAVADQFHPDGLLHTFCGTPSYVAPEVLARRGYDGAKADIWSCGVILFVLMAGYLPFHDQNLMAMYRKIYRGEFRCPRWFSRDLSSLLIRLLDTNDKIMISGNKILLSMGEIRRLRMQQRIKNVELGISDEERDHELPDFPSFIPFLPPLSAANLKDYYATCFTLIAGIMGVWMAFLATNPGNL

SEQ ID NO: 2194 - protein, 322 aa, Bartonella sp.
TYIDGDKGLLLYRGYPIDQLAEKGDFLESCYLLLYGELPTKQEKNDFDRCIMQHTMVHEQFARFFHGFRRDSHPMAVMVACLGAMSAFYHDSIDITDPQQRMIASVRLISKVPTLAAMAYKYSIGQAFVYPRNDLSYAANFLRMCFSVPCEEYKTNPVLTRAMDQIFILHADHEQNASTSTVRLAGSSGANPFACIAAGVACLSGPAHGGANEACLKMLQEIGSVKRIPEFIARAKDKNDPFRLMGFGHRVYKNYDPRAKIMQKTCHKVLKELNIQDDPLLDIAIELEKIALNDEYFVEKKLYPNVDFYSGITLKALGFPTE

SEQ ID NO: 2195 - protein, 154 aa, Neurospora crassa
MSQSGVQVDPECRRAFDKLMSRQLRYIIYKLSDDFKEIVIESTSEGATENYDEFREKLVNAQTKSASGAISKGPRYAVYDFEYKLASGEGSRNKVTFIAWSPDDAGIKSKMVYASSKEALKRSLSGIAVELQANEQDDIEYEQIIKTVSKGTAA

SEQ ID NO: 2196 - protein, 585 aa, Triticum aestivum
MCGILAVLGCADDTQGKRVRVLELSRRLKHRGPDWSGMHQVGDCYLSHQRLAIIDPASGDQPLYNEDKSIVVTVNGEIYNHEQLRAQLSSHTFRTGSDCEVIAHLYEEHGENFIDMLDGVFSFVLLDTRDNSFIAARDAIGVTPLYIGWGIDGSVWISSEMKGLNDDCEHFEIFPPGHLYSSKQGGFKRWYNPPWFSEVIPSVPYDPLALRKAFEKAVIKRLMTDVPFGVLLSGGLDSSLVAAVTVRHLAGTKAAKRWGTKLHSFCVGLEGSPDLKAAKEVANYLGTMHHEFTFTVQDGIDAIEDVIYHTETYDVTTIRASTPMFLMSSKIKSLGVKMVISGEGSDEIFGGYLYFHKAPNKEELHRETCQKIKALHQYDCLRANKATSAWGLEARVPFLDKEFINEAMSIDPEWKMIRPDLGRIEKWVLRKAFDDEEQPFLPKHILYRQKEQFSDGVGYSWIDGLKAHAESNVTDKMMSNAKFIYPHNTPTTKEAYCYRMIFERFFPQNSAILTVPGGPSVACSTAKAVEWDAQWSGNLDPSGRAALGVHLSAYEQEHLPATILTGTSKKPRMIEVAAPGVAIES

SEQ ID NO: 2197 - protein, 111 aa, Glycine max
  misc_feature (51)..(52): Xaa can be any naturally occurring amino acid
CLQGPEIKVYNGELPYVDVSGGELWINILHETLKHGLAPKSWTDYLHLTVXXTLSNAGISGQAFKHGPQINNIFQLEVITGNCSCTIYILNFPCVAGFCVLRLVLVLVWGS

SEQ ID NO: 2198 - protein, 155 aa, Lycopersicon esculentum
MDLRLMGIDNTPLFHTLQHMMEAAGEDSVNAPPKKYVRDAKAMAATPVDVKEYPDSYVFVVDMPGLKSGDIKVQVEEDNVLLISGERKREEEKEGVKFIRMERRVGKFMRKFSLPENANTDAISAVCQDGSLTVTVQKLPPPEPKKSKTIQVKVA

SEQ ID NO: 2199 - protein, 199 aa, Triticum aestivum
MSSNLSFVLNKPGDVSFEERPKPSLASPHDVLVAVNYTGICGSDVHYWVHGSIGKFVVEDPMVLGHESAGTVVEVGDKVKTLKAGDRVALEPGYPCRRCQNCLAGKYNLCPDMVFAATPPYHGTLTGFWSAPADFCFKLPDNVSLQEGALIEPLAVAGHIVKQARVKPGDSVVVMGAGPVGLLCAAVAKAYGASKDVSV

SEQ ID NO: 2200 - protein, 131 aa, Triticum aestivum
  misc_feature (70)..(70): Xaa can be any naturally occurring amino acid
  misc_feature (81)..(81): Xaa can be any naturally occurring amino acid
  misc_feature (90)..(90): Xaa can be any naturally occurring amino acid
  misc_feature (99)..(99): Xaa can be any naturally occurring amino acid
  misc_feature (101)..(101): Xaa can be any naturally occurring amino acid
MAPTVMASSATSVAPFQGLKSTAGLPVSRRSSSAGLGSVSNGGRIRCMQVWPIEGIKNSETLSYLPPSPXEASLKQVDYLXRSNWVPCLXFNKLVPFPXRXHSPGYMAILAWNCYFGSTKVSVRRYLSVTA

SEQ ID NO: 2201 - protein, 470 aa, Mycobacterium bovis AF2122/97
MQGQLSRTRVYAVPVPGSAQSAYACGVERLLASYRSIPATASIRLAKPTSNLFRARVKHDARGLDASGLTGVIGIDPEARTADVAGMCTYEDLIAATLHYGLSPLVVPQLRTITLGGAVTGLGIESASFRNGLPHESVLEMDILTGAGELLTVSPGQHSDLYRAFPNSYGTLGYSTRLRIQLEPVRPFVALRHIRFSSLTAMVAAMERIIDTGGLDGESVDYLDGVVFSADESYLCIGMQTSVPGPVSDYTGQDIYYRSIQHEAGIKEDRLTIHDYFWRWDTDWFWCSRSFGAQNPRLRRWWPRRYRRSSVYWRLMALDQRFGIADRFENSRGRPARERVVQDIEVPIERTCEFLEWFGENVPISPIWLCPLRLRDHAGWPLYPIRPDRSYVNIGFWSSVPVGATEGATNRKIENKVSALDGHKSLYSDSFYTREEFDELYGGETYNTVKKAYDPDSRLLDLYAKAVQRR

SEQ ID NO: 2202 - protein, 441 aa, Sulfolobus tokodaii str. 7
MDDDKKIIREHTFKTWSKQSSWEPIIVTSSRGVYFYDSNGKKYLDFSSQFVNVNLGYGNERVINAIKEQLDTLQYINPSFGAVVRAKATKALLEVMPKNLTKFFFSTSGTEANEAAVKVSRLYKKPSYKILARYRSYHGSTEASISLTGDYRRWFVEPNTMPGVVRFPEPYCFRCPLKLKYPECNLACANYVDYIIKQEKNVAAIIVEPITGTNGVIVPPKEYMPLLWKIAKENDVLFIADEVMTGWGRVGEWFAVNLWNIQPDILTTAKGASASYVPIGITAFNKEIGEFFEDHIFAHGHTFEAHPVSLAAIPAVIEEYKRLNLLSHVKVMGEYLGKRLLELKERHKSIGDIRGIGLFWAVELVKDKNNTPFGDYEDKYEGKPTVVDIISKKALEKGVYVYNGPSWLIISPPLIINKEEIDQGIETLDEVIKEADSAFKD

SEQ ID NO: 2203 - protein, 123 aa, Arabis holboellii
AVLIQILNVVAFCHLEGVVHRDLKPENFLYTSKEENSQLKVIDFGLSDFVRPDERLNDIVGSAYYVAPEVLHRSYTTEADVWSLGVIAYILLCGSRPFWARTESGIFRAVLKADPSFDEPPWP

SEQ ID NO: 2204 - protein, 509 aa, Mycobacterium avium subsp. paratuberculosis str. k10
MTLPTAAELRARAADALRSLGAHVELGAPDAHGLPASTPITGEVLFTVAPTTSDQAEHTITQATQAFSEWRRTPAPVRGALVARLGELLRAHRDELAALVTLEVGKITSEAAGEVQEMIDICQFAVGLSRQLYGRTIASERPGHRLSETWHPLGVVGVITAFNFPVAVWAWNAALALVCGDTVVWKPSELTPLTALATQALIARAAADVGAPPGVSAVVLGDRELGELLVDDERVALVSATGSVRMGRAVGPRVAARFGRVLLELGGNNAAVVTPSADLDLAVRAVVFAAAGTAGQRCTTLRRLIVHRSVADEVVARVVSALRRLPIGDPFEPGTLVGPLIHETAYRDMVGALESARADGGEVIDGDRRHPFAVEHPSSYYVAPAVVRMPAQTPIVATETFAPILYVLTYDRLDDAIALNNAVPQGLSSAIFTTDLREAERFLDESDCGIANVNIGTSGAEIGGAFGGEKQTGGGRESGSDSWKAYMRQSTNTVNYSGALPLAQGVEFG

SEQ ID NO: 2205 - protein, 272 aa, Pseudomonas aeruginosa UCBPP-PA14
MSSTIHPLPSFGLGTFRLTGQVVVDSVRSALELGYRAIDTAQIYGNEADIGRAIAESGVPRSELFLTTKVWVDNYACEKLLASLRESLEKLRTDRLDLVLIHWPAPGNGVELAEYMAALAEAKSLGLTRRIGVSNFNIELTRQAIAAVGAGEISTNQIELSPYLQNRALTAYLEEQGIAVTSYMTLAYGKVLKDPALAGIAARHRATVAQVALAWAMQLGYAVIPSSTRRENLASNLLARDLRLDAEDMARIAGLERNGREVSPQGLAPAWD

SEQ ID NO: 2206 - protein, 212 aa, Ralstonia eutropha JMP134
MNRRQTAFAASVRRAMFATALALAAASAALLPHPARAADKPAAMPAAAPAGNCPASLNFQFPRLQDEAPQNLCQYAGKVVLVVNTASYCGFTPQYEGLEALYSKYRDRGLVVLGFPSNDFSQEPGSSKEIADFCYNTYGVKFPMLGKSHVRGGDVNPMYALLAKETGTAPKWNFYKYLIDRSGNVVGSYNSMTKPDDKQFVAKIEQLLSSPR

SEQ ID NO: 2207 - protein, 123 aa, Arabis holboellii
AVLIQILNVVASCHLQGVVHRDLKPENFLYTSKEENSQLKVIDFGLSDFVRPDERLNDIVGSAYYVAPEVLHRSYTTEADVWSLGVIAYILLCGSRPFWARTESGIFRAVLKADPSFDEPPWP

SEQ ID NO: 2208 - protein, 162 aa, Triticum aestivum
MEGRMFGLETPLMTALQHLLDVPDGEAGGPGNAAGEKQGPTRAYVRDARAMAATPADVKELPGAYAFVVDMPGLGSGDIKVQVEDERVLVISGERRREEKEDAKYLRMEPRMGKMMRKFVLPENADMEKISPVCRDGVLPVPVEKLPPPEPKKPKPIQVQVA

SEQ ID NO: 2209 - protein, 123 aa, Arabis holboellii
AVLIQILNVVAFCHLQGVVHRDLKPENFLYTSKEENSQLKVIDFGLSDFVRPDERLNDIVGSAYYVAPEVLHRSYTTEADVWSLGVIAYILLCGSRPFWARTESGIFRAVLKADPSFDEPPWP

SEQ ID NO: 2210 - protein, 282 aa, Beta vulgaris
MCESFKRQYQLCDEIGRGRFGVVFRCFSPSSHTSFAVKSIDKRLLLDDETDRECLDKEPKILQILSPHPNILQIHDIFDSDSHLLIVTDLCQESTLYDRVVSAGPFSETDACSVFTQLIDALAHCHRNYICHRDVKPDNILFDSRNRVKLCDFGSAEWFGGVEGRERMNGIVGTPYYVAPEVLAGREYNEKIDVWSAGVILYIMLGGVPPFYGDTVEDTFAAVLRGNLRFPTKIFRSISPEAKDLMRKMLSKDVSRRFSAEQVLRHPWVTSGGMTSTMNDMS

SEQ ID NO: 2211 - protein, 356 aa, Schizosaccharomyces pombe
MFKSLVRKSSAFQPLKYGGKYTVTLIPGDGIGRETSNAVTEIFKTANVPIEFEEIDVTGMEKNNKSSGDALHEAIQSLKRNKVGLKGILFTPFEKGGHTSFNVALRKELDIYASLVLIKNIPGFKTRHDNVDFAIIRENTEGEYSGLEHQSVPGVVESLKIITEYKSKRIAQFAFDFALQNGRKSVTCIHKANIMKLADGLFRRTFYDVANGYDAITPKDLIVDNASMQAVSRPQQFDVLVMPNLYGSILSNIGSALVGGPGVIPGANFGRDYALFEPGCRHVGLSITGRGEANPTAAILSACLMLRHLGLKDYADLINAATYSVIEEGKTLTKDLGGSASTGDFTHAILERMESL

SEQ ID NO: 2212 - protein, 465 aa, Bacillus cereus G9241
MTIVTFSKSTTDKPSYTYEELSEKNKAYVWHPFTQMKDYLEEDPVIIERGEGRKLYDVNGNEYWDGVSSIWLNVHGHQVPELDEAIREQLNKIAHSTMLGLANVPSILLAEKIIEVVPEGLKKVFYSDSGSSAVEIAIKMAFQYWQHKGKAKKQRFVTLKEAYHGDTIGAVSVGAIDLFHQVYSSLLFEAIKMPYPYTYRSPYGNDKAEIVRKHLEEMEELLKDKHEEIAAIIVEPLMQGAGGMITMPKGYLRGLRNLCTKYNVLFITDEVATGFGRTGKMFACEHENVTPDILTAGKGLTGGYLPVAITVTTDEIYNAFLGGYEEQKTFFHGHSYTGNPLGCAVAIANLELYEKTNLIEEVACKTEYVATQLEELFACKHVGDIRQCGLMVGIELVKNKETKEAFEWTERVGVQVCKRSRELGMILRPLGNTIVFMPPLASTIEEIDDMLRILYKAISDVTEGE

SEQ ID NO: 2213 - protein, 426 aa, Neisseria meningitidis Z2491
MENSLKEAALKFHELPVPGKISVTPTKSLATDKDLALAYSPGVAAPCMEIHADPQNAYKYTAKGNLVAVISNGTAVLGLGDIGALAGKPVMEGKGVLFKKFAGVDVFDIEIDEKDPQKLVDIIAALEPTFGGINLEDIKAPECFYIERELRKRCKIPVFHDDQHGTAIITAAAVLNALRFTGRKIEEATLVCSGAGAAAIACLNQLLDLGLKRENVTVCDSKGVIYQTREDKDRMDESKQFYAIEDNGQRVLADAVKGKDIFLGLSGANLLTPEILNTMNEKPIVFAMANPNPEILPPLAKETRPDVVIGTGRSDFPNQVNNVLCFPFIFRGALDVGATTINEEMKRACVYALADLAMEEVTEEVVAAYGKKFEFGAEYLIPTPFDSRLLPRVATAAAKAAMESGVATRPIADLEAYAAKLSEWKL

SEQ ID NO: 2214 - protein, 321 aa, Bartonella sp.
YIDGNAGVLLYRGYPIDQLAEKGDFLESCYLLLYGELPTKQEKNDFDRCIMQHTMVHEQFARFFHGFRRDSHPMAVMVACLGAMSALYHDSIDITDPQQRMIASVRLISKVPTLAAMAYKYSIGQAFIYPRNDLSYAANFLRMCFSVPCEEYKTNPVLTRAMDRIFILHADHEQNASTSTVRLAGSSGANPFACIAAGVACLWGPAHGGANEACLKMLQEIGSVERIPEFIARAKDKNDPFRLMGFGHRVYKNYDPRAKIMQKTCHEVLKELNIQDDPLLDIAIELEKIALNDEYFVEKKLYPNVDFYSGITLKALGFPTE

SEQ ID NO: 2215 - protein, 481 aa, Methylobacillus flagellatus KT
MTKSLVWFRRDLRDYDHAALYHALKDSEQVVCAFVFDTDILDGLPRDDRRVEFIWESVRELKLALQERGGDLLVRHGKATEEIPALASVLGVECVYCNRDYEPAAVKRDDTVSQQLGTQGIAFKSFKDQVIFERDEIMTKSGTPFSVFTPYKNACLRKLDDFHLKAYPVDRYIHHLAQSAPQPMPSLESLAFARSNLKQLRLPTGMSGGMALFEDFSERMPRYRDARDFPALKGPSYLSVHLRFGTVSIRHLARTAWQQGGAGAETWLNELLWRDFYFQVLYHHPQVAEGHSFKPEFEHIPFPNGESLFKAWCEGRTGYPLVDAAMRQINQTGYMHNRLRMVAAGFLVKDLLIDWRWGERYFAEKLIDFDLAANNGGWQWAASTGCDAQPWFRIFNPVTQSEKFDPEGKFIRKYVPELQPCDDKEIHAPWLIPPLRQQALGLVIGKDYPAPVVDHAMRREQVLSLYRQASSRKKWPASSVL

SEQ ID NO: 2216 - protein, 97 aa, Glycine max
  misc_feature (35)..(35): Xaa can be any naturally occurring amino acid
ILKAGEKANDVWWNEPRWKGIKRPHSAHEVHSTRXTVNQEYPRTTMAKKLFGLLKERSEQGQSGHTMGAIDPVQVTQQGANQEVLYVSRWACSSVLT

SEQ ID NO: 2217 - protein, 222 aa, Bacillus thuringiensis serovar konkukian str. 97-27
MKFFIDTANLEDIKKAYKLGVLAGVTTNPSLVAKEGIKFEDRIAEICQAVPKVESVSAEVTPDAVTAEEMIAQAEELIKINGGDEKVTIKLPMTLAGLEACRYLTEKGVKTNVTLIFTVNQALLAARAGATYVSPFLGRLDDISEDGVLLVAKIAELFDVHQLDTQIIAASVRHPDHVTRVAMAGAHIATIPYKVIEQLAMHPLTDQGIEKFAADWVKAPKL

SEQ ID NO: 2218 - protein, 312 aa, Burkholderia cepacia R18194
MPIDNHIAALLARLALAEPPSSLDALRQATETTLTGWHGPLEAVDRTETFAVPTRDGRQIRVRAYWPAATSAHAERQPAIVYAHGGGWCLGTLELYDNPCRALANATQCVVLSVDYRLAPEHEFPVPLEDFCDALDWVFGEAAGLGLDPARIAVGGDSAGGNLAAAACLVARERGGPSIAHQLLLYPPLDASMSTTSYRTCGQGYYLTDEIMQYCFDLYLADPADGSSPSVSPLRAASLEGLPPATLLACEYDPVRDDAHAYAARLREAGVPVDCVVLPGMIHACIHMVGVTPAARQVFDVAGAQMRRAFQR

SEQ ID NO: 2219 - protein, 322 aa, Bartonella taylorii
TYIDGNKGILLYRGYPIDQLAERGDFLESCYLLLYGELPTKQEKHDFDRCIMQHTMVHEQFARFFHGFRRDSHPMAVMVACLGAMSAFYHDSIDITDPQQRMIASVRLISKVPTLAAMAYKYSIGQAFVYPRNDLSYAANFLRMCFSVPCEGYNINSVLTRAMDRIFTLHADHEQNASTSTVRLAGSSGANPFACIAAGVACLWGPAHGGANEACLKMLQEIGSVERIPEFIARAKDKNDPFHLMGFGHRVYKNYDPRAKIMQKTCHEVLKELNIQDDPLLDIAMELEKIALNDEYFVEKKLYPNVDFYSGITLKALGFPTE

SEQ ID NO: 2220 - protein, 198 aa, Triticum aestivum
KPAIKTVLEAYLPQIVLIVFLALLPTLLMFLSKQEGIPSQSHAVRAASGKYFYFIVFNVFLGYTLGSTLFKSLTTIIDHPAGIVTMLANSLPGSATFFLTFVALKFFVGYGLELSRLVPLIIFHLKRKYLCKTEEDVKAAWAPGDLGYNTRVPNDMLIATVVLCYSVIAPLIIPFGVAYFALGWLIAKNQILRVYVPS

SEQ ID NO: 2221 - protein, 342 aa, Agrobacterium tumefaciens str. C58
MLSHVDGQAGELVVRGHHLAELADWSFEQVLELLWSGQTATKITAEDIRSQLGKARLRAFELMQLLFPGLAALTSVEALRLLLSWLPDDETTPHHLVAVAAVPVFATAIIRNRQGFAPIAPDASLTHSADFLRMLSGTLPSTEKVRALDTYLTTVADHGLNASTFTARVIASTGAGLFSSVVGALCALKGPLHGGAPGPVLDMLDAIGAEAEIEPWLLDALGRGERLMGFGHRIYRVRDPRADVLKHAVSTLKEGSDRIAFAGKVEEAALALLKEKKPLRPLQTNVEFYTALVLEAVGFPRDSFTNVFAAGRMAGWTAHVLEQERTGRLIRPQSHYIGPHPR

SEQ ID NO: 2222 - protein, 368 aa, Bacillus halodurans C-125
MSIKQPFVPGLDRVIAAETAISFLDTEREKIIIRGHDLIDLSVSNDYLDIVHLLLDGTLPNASEKSALEDTLKKHYDIPSYVMEILSLLPETTHPMDGLRTGLSALSSVDKEIENRSTEANKARAYKLLGKLPAITVNSYRLINGLKTVQPVPTLSYSANFLYMITGKEPKPFEAKIFDRSLLLYSEHEMPNSTFTARVIASTHSDLYGALTGGVASLKGNLHGGANEAVMYMLQSVDSAAEFQQLIQKKLVNKEKVMGFGHRVYMKKMDPRALEMKESLKQLCEKKGDYSLLDRCEAGEKTMLEEKGLYPNLDYYAAPVYWMLGIPIELYTPIFFTARTAGLAAHVMEQHQNNRIFRPRVSYIGESY

SEQ ID NO: 2223 - protein, 456 aa, Archaeoglobus fulgidus DSM 4304
MYRVKTFKYYSTYKICMIEEVFELTQNGRAKKWHAFYGGKIEILPKVPIRTLDDFSIWYTPGVAEVCNEIAEDEEKAYDYTNKWNLIAIITDGSRTLGLGNIGPKAAMPVMEGKALLFKFLGAVDAFPIALAEQDADRFIEIVKAISPTFGGVNLEDISSPKCFYILERLQKELDIPVWHDDQQGTATATLAALINALKIVGKDISEVKISIIGVGAANFATIRLLKAAGADPKKMFVVDSKGILHPDRADLKEKKGYKWQVAIETNGERRTGGMEEAIRGTDVLIAASKPGPDVIKKEWIAEMNDDAIVFPLANPTPEIWPWEAKDAGARIVGTGRSDFPNQVNNSLVFPGVFRGALTVRARKITDEMCLAAANALAEFAERNGLSEDYIIPRMTEKEVFPEVATAVGVKAVELGLARLELREEEIYEIAELMISATQRKIKKLYELGFIKEPPS

SEQ ID NO: 2224 - protein, 492 aa, Rubrivivax gelatinosus PM1
MDMKNSPLATLADPTLLKTAALIDGAWVDRGEHFAVTDPATGQVLAQVANLGAADAEAALAAAARAWPAWRAKTAKERASVLMKWYQLLLQHADDLARIMTAEQGKPLAEAKGEVGYGASFIEWFAEEAKRVYGETVPTTDNNKRYLVLKQAMGVCAAITPWNFPIAMITRKVAPALAAGCPVVIKPAEQTPLSALAVAELAQRAGMPAGVLNVLTADAERSIQIGNVLCASDTVRHLSFTGSTEVGRILMKQCAPTIKKLSLELGGNAPFIVFDDADLDSAVEGAMISKYRNAGQTCVCANRLYVQAGVYDAFVEKLAAKVKAIKVGNGFEAGVTQGPLIDEAALAKVESHVADALAKGAKLLTGGQRIGERFYSPTVLAQATGEMLCAREETFGPVAPVFRFETEAEVVALANDTEFGLASYFYSRDVGRIFRVGEALEYGMVGINTGLISTAEVPFGGVKQSGLGREGSHHGIDDYVEIKYLCLGDIQK

SEQ ID NO: 2225 - protein, 355 aa, Glycine max
  misc_feature (316)..(316): Xaa can be any naturally occurring amino acid
MGEAPEVFYINGFSKFGHEIETQQNHVNDQNHDSSWYEEIIDEDLKWSFKLNSVLHKAISEYQDIALLDTKRFGKALVLDGKMQSAETDEFVYHECLIHPPLLCHPNPKTVFIMGGGEGSAAREALKHRSMVRVVMCDIDKEVVDFCRKYLIANKEAFSHKKLDLVINDAKSNKLPPRPPARPPSRPAELEKRKEKFDIIVGDLADPLEDGPCYQLYTKSFYEKILKPKLNDNGIFVTQAGPAGIFTHKEVFTSIYNTVKQVFKYVIAYTTHVPSFADTWGWVMASDQPLSICADEMDRRIEARIDGELLYLNGGXFHSSTTMNKTVYQSLQNETHVYTEENARFIPGHGMAFHL

SEQ ID NO: 2226 - protein, 181 aa, Zea mays
MASSIVSSAAAATRSNVAQASMVAPFTGLKSAASFPVTKKNNNVDITSLASNGGRVRCMQVWPPINMKKYETLSYLPDLSDEQLLSEIEYLLKNGWVPCLEFETERGFVYRENNSSPGYYDGRYWTMWKLPMFGCTDATQVLAEVQEAKKAYPQAWVRIIGFDNVRQVQCISFIAYKPEGF

SEQ ID NO: 2227 - protein, 138 aa, Parietaria judaica
MRTVSARSSVALVVIVAAVLVWTSSASVAPAPAPGSEETCGTVVGALMPCLPFVQGKEKEPSKGCCSGAKRLDGETKTGPQRVHACECIQTAMKTYSDIDGKLVSEVPKHCGIVDSKLPPIDVNMDCKTLGVLHYKGN

SEQ ID NO: 2228 - protein, 434 aa, Escherichia coli O157:H7
MKTRTQQIEELQKEWTQPRWEGITRPYSAEDVVKLRGSVNPECTLAQLGAAKMWRLLHGESKKGYINSLGALTGGQALQQAKAGIEAVYLSGWQVAADANLAASMYPDQSLYPANSVPAVVERINNTFRRADQIQWSAGIEPGDPRYVDYFLPIVADAEAGFGGVLNAFELMKAMIEAGAAAVHFEDQLASVKKCGHMGGKVLVPTQEAIQKLVAARLAADVTGVPTLLVARTDADAADLITSDCDPYDSEFITGERTSEGFFRTHAGIEQAISRGLAYAPYADLVWCETSTPDLELARRFAEAIHAKYPGKLLAYNCSPSFNWQKNLDDNTIASFQQQLSDMGYKFQFITLAGIHSMWFNMFDLANAYAQGEGMKHYVEKVQQPEFAAAKDGYTFVSHQQEVGTGYFDKVTTIIQGGTSSVTALTGSTEESQF

SEQ ID NO: 2229 - protein, 123 aa, Arabis holboellii
AVLIQILNVVAFCHLQGVVHRDLKPENFLYTSKEENSQLKVIDFGLSDFVRPDERLNDIVGSAYYVAPEVLRRSYTAEADVWSIGVIAYILLCGSRPFWARTESGIFRAVLKADPSFDEPPWP

SEQ ID NO: 2230 - protein, 316 aa, Escherichia coli CFT073
MNELDGIKQFTTVVADSGDIESIRHYHPQDATTNPSLLLKAAGLSQYEHLIDDAIAWGKKNGKTQEQQVVAACDKLAVNFGAEILKIVPGRVSTEVDARLSFDKEKSIEKARHLVDLYQQQGVEKSRILIKLASTWEGIRAAEELEKEGINCNLTLLFSFAQARACAEAGVFLISPFVGRIYDWYQARKPMDPYVVEEDPGVKSVRNIYDYYKQHHYETIVMGASFRRTEQILALTGCDRLTIAPNLLKELQEKVSPVVRKLIPPSQTFPRPAPMSEAEFRWEHNQDAMAVEKLSEGIRLFAVDQRKLEDLLAAKL

SEQ ID NO: 2231 - protein, 112 aa, Glycine max
MILLLGGSQLPNCSASAIITYSSSPSMSGFYIVMQTASSIISFSAVVAVFRAAPGMVTPFSDIKTMVGFPSKKTNNDITSIPSTGGRVQCMQVWPPVGKKKFETLSYLPDLM

SEQ ID NO: 2232 - protein, 123 aa, Arabis holboellii
AVLIQILNVVAFCHLQGVVHRDLKPENFLYASKEENSQLKVIDFGLSDFVRPDERLNDIVGSAYYVAPEVLHRSYTTEADVWSIGVIAYILLCGSRPFWARTESGIFRAVLKADPSFDEPPWP

SEQ ID NO: 2233 - protein, 454 aa, Vibrio vulnificus CMCP6
MTITNPFNDEVIGTVPNMGEKETQEVIAGADKAFQQFKALTAQERANLLHRWHQLILEHSDELAHIMTLEQGKPLAEAKGEVLYAASFIEWFAEEARRAYGTLVPSHKANAKILVTKEPIGVVAAITPWNFPAAMITRKCGPAFAAGCPVILKPAPDTPFTALALAVLAEKAGFPAGVFNVITGDAVAIGGELTSNKRVRKLSFTGSTPVGKLLMRQSADNIKKLSLELGGNAPFIVFEDADLDAAVEGAMIAKFRNAGQTCVCANRLYVQRSVYSEFCQKLVAKVSALKVGNGFDQGVHIGPLINDAAVAKVVQHVEDAQSKGAQIECGQLPTAGSRLVQPLVLSGVTDEMLVAQEETFGPMAPLFVFDSEEEVLARANNTDFGLAAYFYTQSLSRAWRMSEALEAGIVGINEGLISTTVAPFGGVKESGLGREGSFLGMDDYMESKYILMGL

SEQ ID NO: 2234 - protein, 431 aa, Corynebacterium diphtheriae NCTC 13129
MENNSFAQFDRDHIWHPYGPMPATVAPYVVAATNNTDIILDNGTRLIDGMSSWWAAAFGHGNERLKAAAHRQIDVMSHVMFGGLTHVPAIKLARQLCELTDEPLTKVFFSDSGSVAVEVALKMVYQYQLGQGHPERRRMLTWRGGYHGDTFATMSLCDPEGGMHAMWEGRVMDNVFASRPPLWGAASNEISAYIDHLDSLIDSTIAGIIVEPVVQGAGGMRFHAPEILKGIRQLCDQHGILFIADEIATGFGRTGNLFATQAAKVTPDILCVGKSLTGGFMSLAATITTDAVAESISSAAGGGALMHGPTFMGNPLACAVASEALSIIAEGDWKQQVAEIESELKKGLVPLASNPAVRDVRVLGAIGVVEMKEPVDMKRATHAAVNAGVWLRPFGRLVYTMPPFVCTHKQIQKISCAIASIVHTEQERFER

SEQ ID NO: 2235 - protein, 267 aa, Escherichia coli CFT073
MAIPAFGLGTFRLKDDVVISSVKTALELDYRAIDTAQIYDNEAAVGQAIAESGVPRHELYITTKIWIENLSKDKLIPSLKESLQKLRTDYVDLTLIHWPSPSDEVSAEEFMQALLEAKKQGLTREIGISNFTIPLMEKAIAAVGAENIATNQIELSPYLQNRKVVAWAKQHGIHITSYMTLAYGNALKDKVIARIAAKHNATPAQVILAWAMGEGYSVIPSSTKRENLESNLKAQNLQLDAEDKKAIAALDCNDRLVSPEGLAPEWD

SEQ ID NO: 2236 - protein, 127 aa, Glycine max
KKMVNVGNIFPPPPPKTKGGFFFRMVFGGFFPQNSGRVPVSGGASFAFCPPQTFGGGAAWFNTLVPFGRAALGGPLSAFENPNNKGGGIGKINPLGGAPPGGAPPGLFKNVAKNNLGAHEDNLAKGG

SEQ ID NO: 2237 - protein, 421 aa, Bacillus sp. KSM-K16
METVLMDNLWLTISAILVLLMQGGFILLEAGSTRMKNAGHIAGKTIFTVGIASLVFWAVGYGFIYGDGNPFIGMADFFFGNYADGVGSVDFFFQLTFAAIALTIAFGGFAERGKLAAYAIFAVLFSAFVYPLVAHWIWSDQGWLANLGKQDFAGSTVVHLTGAMAALAATLMLKPRLGKYDKNGKVNDLFGHNQVYTALGVLILWVGWFGFNAGSTGGVADAFFGYVALNTQLAAGAGTIAALFLVWALNGKADVPTTLNGTLAGLVAITASCAFVAPWAAVLIGVIGGLIVVVSMNMFDKLKIDDPIFALSVHGVAGVWGTLSNGLFATPELAEMNGGLPGLFYGGGFEQLGVQLLSVVVCGVFAFVASYVLLFITKGLLGGNLRVTEEEEILGLDMSEHGSYGYPETVQSEKTSTQTGS

SEQ ID NO: 2238 - protein, 405 aa, Arabidopsis thaliana
MDRISGLPDELLVEILHCLPTKEVVSTSILSKRWEFLWLWVPKLTFVMNHYESDLPIQDFITKNLRLLKPQVIESFHLQCFSSSFKPEDIKHWVVTTISRRVRELIINYCDLSWLDKPVVLLDLPNSLYTCTSLVTLKLIGHSIIVDVPRTVSLPCLKTLELDSVAYSNEESLRLLLSYCPVLEDLTIHRDMHDNVKTLVIIVPSLLRLNLPIDGAYSCDGYVIVTPALKYLKVPGLYREDFSYLLTHMPNVEEADLSVEQDVERLFESITSVKRLSLFVLLDIEDESMYHNGIYFNQLEHLNLHIYRDNWSKLLVRLLEDSPKLRVLKIVVDGEPSFDEEFEHVSWIYNDESSVPKCLLDSLEVFEFAGYTRRPEERDFVSFILKHACHLKSSSISRLSCYVLE

SEQ ID NO: 2239 - protein, 102 aa, Glycine max
MVQQLPSLFSWGPPLMTSKLEQLKQFTTVVCDTGDLEAISRLRPVDATTNPSLLLKAAAIPEYAELLRNAVSLSKGNVGLACDHFAVSVGAGILKVIPGRIS

SEQ ID NO: 2240 - protein, 85 aa, Zea mays
  misc_feature (7)..(7): Xaa can be any naturally occurring amino acid
  misc_feature (9)..(9): Xaa can be any naturally occurring amino acid
  misc_feature (15)..(15): Xaa can be any naturally occurring amino acid
  misc_feature (17)..(18): Xaa can be any naturally occurring amino acid
  misc_feature (21)..(21): Xaa can be any naturally occurring amino acid
  misc_feature (25)..(26): Xaa can be any naturally occurring amino acid
  misc_feature (28)..(30): Xaa can be any naturally occurring amino acid
  misc_feature (32)..(32): Xaa can be any naturally occurring amino acid
  misc_feature (37)..(37): Xaa can be any naturally occurring amino acid
  misc_feature (39)..(39): Xaa can be any naturally occurring amino acid
  misc_feature (47)..(47): Xaa can be any naturally occurring amino acid
  misc_feature (70)..(72): Xaa can be any naturally occurring amino acid
  misc_feature (74)..(75): Xaa can be any naturally occurring amino acid
LEEEVVXAXSMLSSXAXXVPXRSQXXMXXXFXGLKSXAXFPVTRKAXNDITSIASNGGRASCMKVCPPVXXXKXXIFLPAPPLPS

SEQ ID NO: 2241 - protein, 64 aa, Triticum aestivum
  misc_feature (18)..(18): Xaa can be any naturally occurring amino acid
  misc_feature (35)..(35): Xaa can be any naturally occurring amino acid
  misc_feature (51)..(51): Xaa can be any naturally occurring amino acid
  misc_feature (55)..(55): Xaa can be any naturally occurring amino acid
KSSPSAGKNKGGKGNCIXINLAIILPPLGVFLKFXCGHEFWIWLLVNFLGXIPGXIYAIYANNK

SEQ ID NO: 2242 - protein, 123 aa, Arabis holboellii
AVLIQILNVVAFCHLQGVVHRDLKPENFLYTSKEENSQLKVIDFGLSDFVRPDERLNDIVGSAYYVAPEVLHRSYTTEADVWSIGVIAYILLCGSRPFWARTESGIFRAVLKADPSFDEPPWP

SEQ ID NO: 2243 - protein, 351 aa, Thermoplasma volcanium GSS1
MNPGCRLRGPMGYPDYLTGPLSLSCINIKTKRNIQKAYFRMFDVNPMPIDPQVRKYLDAMSKVSVPELNKTPIEDLRKIFDTPASGAPKVKISVVEDMILDTDAAKLPARLYDDSNSDSLVLYFHGGGFVFGSIETHDSLCRRIAKYSGSKVISVGYRLGPENKFPVAQIDAFNSYLYVLKRSEELGVDSDKIALMGDSAGGNLAAVASLMARDKGIKLPRLQVLVYPSTGPDMTSKSYLEYSSIYLTKELLNWFSSQYLNSIEDALNPYFSPILADLSGLPEAIVVTDEYDPLLEQGETYSATLRDSGVPVTSIRVNGMIHGFLSNFHLFRAADVSLMMISGAIHTILES

SEQ ID NO: 2244 - protein, 243 aa, Zea mays
MRAKARPCPRWPRRKHCPPSSVASRRVACSASAADADVVDLFDAAKLTVDKFVTSGMVVGLGSGPASALAIQYLGTRLRRGSLAGITAVTSASEADKAGIRANSYQEGTQIDFAFTDAEAIEEGTLAAVIGRRKTESGEPSFMAEKAMAKSAHKLAFITGNDKYVTTGVEGSIPVLIKSVWRRPSFGTAGPLGGDHPLVTKEGHHVLDVIFTTPIQDLGTPPYAVIASKGEVQVLDEKSSVIQ

SEQ ID NO: 2245 - protein, 148 aa, Glycine max
MSDAPPSPTHESGGEQSPRGSSSGAREQDRYLPIANISRIMKKALPPNGKIAKDAKDTMQECVSEFISFITSEASEKCQKEKRKTINGDDLLWAMATLGFEDYIEPLKVYLARYREAEGDTKGSARSGDGSATPDQVGLAGQNSQLVH

SEQ ID NO: 2246 - protein, 403 aa, Oryza sativa (japonica cultivar-group)
MRGGAGALPVPGGLALGVVLLLVLAVLPSRAAGVNVTAALAAFPSFADFARLLESSPVAGELAARSSLTLLAVPNNNLPRSPSAFAAASGADIADVLRYHVLLEYLSPSDLARLPASGKLVTTLFQTTGRAPSDLGAVNLTVGGNSTVVVRSPAPFPGSSATVLGAVTAVPYNLSVLAVGGLIVPSGLDVAASDSRPAGGVNITHVLADARGFNVAASMLEASGVADEFTADERGAGITVFVPTDDAFADLPATDRLQSLPADRKATVLRFHVLHSYYPLGSLESIVNPVQPTLATERFEAGQFTLNITRVNGSVAIDTGIVQASITRTVFDQNPVAVFAVSKVLLPKEMFGRGGADSDVMAPPPDAMAPDAAENVRTPPTRLSSPPALRGGADKCVLRECDG

SEQ ID NO: 2247 - protein, 201 aa, Brassica rapa subsp. pekinensis
PGTDTAAAVVVWAMTYLIKYPEAMKKAQDEVRNVVGDKGYVSEEDIPNLPYLKAVIKESLRLEPVIPILLHRETIADAKIGGYDIPAKTIIQVNAWAVSRDTAAWGDNPNEFIPERFMNEQKGVDFKGQDFELLPFGSGRRMCPAMHLGVAMVEIPFANLLYRFDWSLPKGIKPEDIKMDVMTGLAMHKKDHLVLAPRTHI

SEQ ID NO: 2248 - protein, 326 aa, Candida albicans
MTGSSSQFQQLEKLGEGTYATVYKGRNRATGALVALKEISLDSEEGTPSTAIREISLMKELDHENIVTLYDVIHTENKLTLVFEYMDKDLKKYMEVHGQQSALDLKVVKSFMFQLLKGIMFCHDNRVLHRDLKPQNLLINNKGELKLGDFGLARAFGIPFNTFSNEVVTLWYRAPDVLLGSRAYTTSIDIWSAGCIFAEMCTGKPLFPGTANEDQLIKIFRLMGTPNERTWPGISQYTNYKNNWQIFVPQDLRLIVPNLDSMGLNLLQSLLQMRPESRITARQALQHPWFHEITMPNAVPQHLSDPYQQQQQQQQHPHQPIIDQQY

SEQ ID NO: 2249 - protein, 428 aa, Myxococcus xanthus
MYDATPTTADTSPHAKLHAQRFEGIKRNYTPKDVEKLRGSITVSHTLAELGAKKLWELLHTEDYINALGSLTGNQAVQMVRAGLKAIYLSGWQVAADANSAGQMYPDQSLYPVDSVPTVVRKINNALRRADQIDHAEGRKDRYWFAPIIADAEAGFGGPLNAFELMKGMIEAGAAGVHFEDQLASEKKCGHMGGKVLVPTSHFIRTLNAARLAADVMGVPTLLVARTDADSAKLLMSDADEYDHAFIDKKSGRTPEGFYRLNGGLDCAIARGLAYAPYADLVWCETITPDLAQAKKFAESIRAKYPNKLLAYNCSPSFNWKKNLDDATIAKFQRELGAMGYKFQFVTLAGFHALNFGMYELARKYKDRGMAAYSELQQAEFAAEKDGYTATRHQREVGTGYFDQVAEAICGGNASTLALTESTEAHQF

SEQ ID NO: 2250 - protein, 316 aa, Buchnera aphidicola str. Sg (Schizaphis graminum)
MNQLNALKQFTTIVADTSDIESICKYKPQDATTNPSLILKAVSSSVNKRFIDQAIEYARKKGGSYNYKIVNASDKILVDLGVEILKHIPGYISSEVDARLSFNKEKCILKAKKIIDMYEEKGISRNRVLIKLAATWECIKAAEELKKNNIACNLTLLFSFAQARACAESNVFLISPFVGRIYDWYLSQNLILKNPADQDPGVLSVCKIYDFYKKYNYKTIIMGASFRNVQQILSLSGCDRLTISPVLLKELESSNKELNRKLCPPTSFLNPPVPLTEAEFRWEHNQDEMAVQKLSEGIRNFGKDQLSLEKIFSKLI

SEQ ID NO: 2251 - protein, 305 aa, Bordetella parapertussis 12822
MGHGVIIRENVLQECRIFHPVRFVNTREGFMAQVPVLKLNDGNAMPQLGLGVWQVPNDQAAASVKAALAAGYRSIDTAAIYGNEAGVGEGLRAAGVARKDLFVTTKLWNDRHGYDEAQRAMDESLRKLGLAYVDLFLIHWPVAGSDKFVDAWRAMVAMKEDGRARSIGVSNFTIANLRRLVDETGVVPAVNQVELHPGFAQRELRAFHAEQGIATESWSPLGQGAVMHDATLAGIAARHGKSAAQVTLRWHLQNGLIVIPKSVTPARIQANIDVFDFELSADEMADIDALPEGPRLGPDPATFTG

SEQ ID NO: 2252 - protein, 509 aa, Xanthomonas axonopodis pv. citri str. 306
MNALASAKSLNNDPHSIFKPRYDNFIGGQWVAPHSGQYFDNTTPINGKVFTSIARSTAPDIEAALDAAHAAKDAWGKTSTTERSNVLLKIADRIEQNLELLAYAETWDNGKPVRETLNADVPLCVDHFRYFAGAIRAQEGGISEIDSDTIAYHFHEPLGVVGQIIPWNFPLLMACWKLAPALAAGNCVVMKPAEQTPASILVLMELIGDLLPPGVLNVVNGFGLEAGKPLASNPRIAKIAFTGETTTGRLIMQYASQNLIPVTLELGGKSPNIFFADVMAEDDDFLDKAVEGFVLFAFNQGEVCTCPSRALIQESIYDAFMEKALSRVAAIKQGNPLDPNTMVGAQASSEQLEKILSYIDIGKQEGAEVLIGGERNTLDGDLAEGFYVKPTVFKGHNKMRVFQEEIFGPVVSVTTFKDEADALAIANDTLYGLGAGVWSRDASRLYRMGRAIQAGRVWTNCYHAYPAHAAFGGYKQSGIGRENHKMMLDHYQQTKNLLVSYSPKALGFF

SEQ ID NO: 2253 - protein, 296 aa, Magnaporthe grisea 70-15
MGYRHIDGAHAYGNEKQIGEAIKESGIPREEIFVTSKLAQTWHEPGDVERGLDLSLRNLQLDYGKPWKVGTGPLPHAYKAGENNETIRHPSGNGKPVIDYDLSRRYPETWQAMERLVDSGKAKAIGVCNFNVLKTKRILEIARIIPAVNQVELHPYLPQHELMEFSAKHGILLMAHQPLGGRPVPAVRGHPDQSPPTEDQTIVDVASSCGMSPAQVCLSWLIQKGIPVIPKSNQREHLRSNMQVRKLSVELFNLVDGLAALRLGGPVRFLDPSRHVGFEIFDEENDQPIEDAAAWD

SEQ ID NO: 2254 - protein, 425 aa, Bacillus thuringiensis serovar konkukian str. 97-27
MKNERIEKLQESWELDTRWKGITRPYSAEDVIRLRGSIDIEHTLAHRGAEKLWASLHTEDYINALGALTGNQAMQQVKAGLKAIYLSGWQVAADANLSGHMYPDQSLYPANSVPAVVKRINQTLQRADQIQHMEGSGDTDYFVPIVADAEAGFGGQLNVFELMKGMIEAGASGVHFEDQLSSEKKCGHLGGKVLLPTQTAVRNLISARLAADVMGVPTIIVARTDADAADLITSDIDPVDKAFITGERTPEGFYRTKAGLDQAIARGLAYAPYADLVWCETSEPNLDDAKRFADAIHKEHPGKLLAYNCSPSFNWKQKLDEKTIASFQKEIASYGYKFQFVTLAGFHSLNYGMFELARGYKERGMAAYSELQQAEFAAEKHGYSATRHQREVGTGYFDEVAQVITGGTSSTTALKGSTEEAQFTK

SEQ ID NO: 2255 - protein, 469 aa, Agrobacterium tumefaciens str. C58
MSAVAFMGVRSVMNEVSKPMSNLAAIDAAHHLHPFSDMGKLNAAGTRIIERAEGVFIYDSTGKKYLDAFAGLWCVNIGYGRREIADVVQRQMNELPYYNAFFGTTTPPATLLAQKIASRAGPKMNHVFFTNSGSEATDTWFRMARVYWKALGHPTKTRVIARRNGYHGSTVAGASLGGMKWMHEQGNLPIEGIAHIGQPYWYAEGGDLSPAEFGLKVARELDAKIDELGEENVAAFVAEPIQGAGGVIVPPETYWPEIARICKARNILLVSDEVICGFGRLGSWFGYQHFGVEPDLAPVAKGLSSGYLPIGGVIVSDRVAEVMLSEVGDFNHGFTYSGHPVCAAAALENLRIIEDEGLVERVRDDIGPYFSEGWKSLADHELVGEAVNVGLMGGLQLTADKATRRRFAKPDDIGTAVRNHCLANGLVMRATGDRMLASPALTVSRSEVDEIIETLRQGLNHLRDTREHF

SEQ ID NO: 2256 - protein, 468 aa, Archaeoglobus fulgidus DSM 4304
MVGRMCVAVLIVLLLVATAGADPNGAETLKENPELPVDFVWALICGFLVMFMQAGFAMLEAGFSRAKNVANVMMKNLMDFAVGSLAFFAVGFALMMGADWQGIAGTTGWFLAGESYDVSTIELWFFMLVFAATAATIVSGSIAERPKFSVYLVYSAVVSAVIYPIYGHWLWGGGWLSSSEFMVKLGGGYGALDFAGSGVVHALGGYIALAAVMLLGPRLGKYDSDGNPRAIPGHNLAFAVIGTFILWFGWFGFNAGSTLSAHELRVSIIASNTNLAAAAGAVTAMAITWLRNGKPDVGMTCNGAVAGLVAITAPCAWVQPWSSVVIGTIAGFIATYGYWWLEKRGLDDVVGAIPVHGFSGTWGLIALGIFADGSYGLYATESPLVTGLLYGNWGFFIVQLISAIVNFAWAFGTGFALFWILKKVIGIRVSPEEEMLGLDIAEHAAVAYPNFVCTETELPLAMKQGGGR

SEQ ID NO: 2257 - protein, 116 aa, Cicer arietinum
MASMKVVCVALIMCIVIAPMAESAITCGRVDTALAPCLGYLQGGPGPSAQCCGGVRNLNSAAVTTPDRQAACNCLKSAAGSISRLNANNAAALPGKCVVNIPYKISTSTNCATIRV

SEQ ID NO: 2258 - protein, 75 aa, Zea mays
CFFFSYSRDQLYPFTIIAEANSTAQHLVDFTEAEEDLVSRMHRLVGNRWEIIAGRIPGRTAEEVEMFWSKKYQER

SEQ ID NO: 2259 - protein, 176 aa, Triticum aestivum
  misc_feature (124)..(124): Xaa can be any naturally occurring amino acid
MAPTVMASSATSVAPFQGLKSTAGLPVSRRSNGASLGSVSNGGRIRCMQVWPIEGIKKFETLSYLPPLSTEALLKQVDYLIRSKWVPCLEFSKVGFIFREHNASPGYYDGRYWTMWKLPMFGCXTDATQVINEVEEVKKEYPDAYVRIIGFDNMRQVQCVSFIAFKPPGCEESGKA

SEQ ID NO: 2260 - protein, 182 aa, Zea mays
GFKNKKRFQAGPFEVEPIRVTHSIPDCCGLVLRCGDGIIFHTGDWKIDESPVDGKKFDRQALEELSKEGVTLMMSDSTNVLSPGRSISESVVAGSLLRHISEAKGRVITTQFASNIHRIGSIKAAADLTGRKMVFVGMSLRTYLEAAFKDGKAPLDPSTLESPGVNARKVPRHRSTPRWMAG

SEQ ID NO: 2261 - protein, 182 aa, Fagus crenata
MASSMISSATVATVSRATPAQATMVAPFTGLKSTAAFPATRKSNNDITSLASNGGRVQCMKVWPPLGLQKFETLSYLPPLSIESLAKQIEYLILKGWIPCLEFELEHPFVYRENNRSPGYYDGRYWVMWKLPMFGCTDATQVLAELQEASKTYPTSHIRIIGFDNKRQVQCISFIAYKPPAK

SEQ ID NO: 2262 - protein, 496 aa, Nicotiana tabacum
MVLSKTASESDVSIHSTFASRYVRTSLPRFKMPENSIPKEAAYQIINDELMLDGNPRLNLASFVTTWMEPECNKLMMDSINKNYVDMGEYPVTTELQNRCVNMIAHLFNAPLGDGETAVGVGTVGSSEAIMLAGLAFKRKWQNKMKAQGKPCDKPNIVTGANVQVCWEKFARYFEVELKEVKLSDGYYVMDPEKAVEMVDENTICVAAILGSTLNGEFEDVKRLNDLLIEKNKETGWDTPIHVDAASGGFIAPFLYPELEWDFRLPLVKSINVSGHKYGLVYAGIGWAIWRNKEDLPDELIFHINYLGADQPTFTLNFSKGSSQVIAQYYQLIRLGFEGYKNVMENCQENARVLREGLEKSGRFNIISKEIGVPLVAFSLKDNSQHNEFEISETLRRFGWIIPAYTMPPNAQHVTVLRVVIREDFSRTLAERLVIDIEKVLHELDTLPARVNAKLAVAEANGSGVHKKTDREVQLEITAAWKKFVADKKKKTNGVC

SEQ ID NO: 2263 - protein, 500 aa, Arabidopsis thaliana
MVNFLLVLCYCRLILIHCKTIQLTQWLSKSFLTDVLVTKVPNCVLWQYFVDADDSVPQKIVVHKDGPRGIHFRRAGPRQKVYFESDEVHACIVTCGGLCPGLNTVIREIVSSLSYMYGVKRILGIDVSFCDCNLLLTKTNTGGYRGFYAKNTVSLDSKVVNDIHKRGGTILGTSRGGHDTTKIVDSIQDRGINQVYIIGGDGTQRGASVIFEEIRRRGLKVAVIGIPKTIDNDIPVIDKSFGFDTAVEEAQRAINAAHVEAESIENGIGVVKLMGRYSGFIAMYATLASRDVDCCLIPESPFYLEGEGGLFEYIEKRLKESGHMVLVIAEGAGQDLMSKSMESMTLKDASGNKLLKDVGLWLSQSIKDHFNQKKMVMNLKYIDPTYMIRAVPSNASDNVYCTLLAQSAVHGAMAGYTGYISGLVNGRQTYIPFYRITEKQNHVVITDRMWARLLSSTNQPSFLGPKDVFDNKEKPMSALLDDGNCNGVVDVPPVTKEITK

SEQ ID NO: 2264 - protein, 494 aa, Brassica juncea
MVLSRAATESGENVCSTFGSRYVRTALPKHKIGESSIPKEAAYQIIKDELMLDGNPRLNLASFVTTWMEPECDKLIMESINKNYVDMDEYPVTTELQNRCVNMIARLFNAPLEETETAMGVGTVGSSEAIMLAGLAFKRNWQNKRKAEGKPYDKPNIVTGANVQVCWEKFARYFEVELKEVKLSEGYYVMDPDKAAEMVDENTICVAAILGSTLNGEFEDVKRLNDLLVKKNEETGWNTPIHVDAASGGFIAPFIYPELEWDFRLPLVKSINVSGHKYGLVYAGIGWVVWRTQQDLPDELIFHINYLGADQPTFTLNFSKGSSQIIAQYYQLIRLGFEGYKNVMENCRENMVVLREGIEKTERFNIVSKEVGVPLVAFSLKDHSFHNEFEISEMLRRFGWIVPAYTMPADAQHITVLRVVIREDFSRTLAERLVADIVKVLHELDTLPSKISKKMGAEDFGNVKGKKVDRDVLMEVIVGWRKFVKDRKKMNGVC

SEQ ID NO: 2265 - protein, 325 aa, Glycine max
  misc_feature (171)..(171): Xaa can be any naturally occurring amino acid
MGGGGAMRSAAAKIAGIGISKAALRPSALPTEQAVHNASRPTSVVGVKGAKSTEVAPLHAAAPWDDWDLADDGDLVVPRMVFGSVPTFAEAKEATAELKDAIDQVYLSPESSQYSSRGGQVSALSPTGGQVSALSPTLYEPVNRSCVVDAISDSSAPKHAIQAFHLLSTSXTAQAVVASLACDPNVWNAVMENPAVSSFFQSQQSVADLGAAGNTEELDKFSSCTSETVESPERLGVSAESHPGNGIFDFMDLLQNVKLTVIELVSRVSGFLQNIFPTPDAMKEKMSGDVDGNTKASFMDSKISMGGTFTGLAIIVIMVIVTKRA

SEQ ID NO: 2266 - protein, 368 aa, Glycine max
MGEAKGKEEEVLASVHSTVFKESESLDGKCVKIEGYDFNRGVNYPLLLSSMVTTGFQASNLGDAIQVVNQMLDWRLVDEPVAEDCSDQERDLEYRKSVTCKVFLGFTSNLISSGVRDTVRFLLQHRMVDVVVTTTGGIEEDLIKCLAPTYKGDFSLPGAYLRSKGLNRIGNLLVPNDNYCKFEDWIIPIFDQMLGEQNNENVLWLREDDRRGLGKEIKNESSYLYWAYKNNIPVFCPGLTDGSLGDMLYFHSFRNPGLIVDIVQDIRAMNGEAVHASPRKTGMIILGGGLPKHHICNANMMRNGADYAVFINTAQEYDGSDSGARPDEAVSWGKIRDSAQTVKVHCDATIAFPLLVAETFASRVKPPH

SEQ ID NO: 2267 - protein, 293 aa, Meiothermus ruber
MNMAYKDYYKILGVPKNASEDEIKKAFKKLARKYHPDVNKEPGAEEKFKEINEAYTVLSDPEKRRYYDTYGAAAGSAGWQGPPPGPGGFGGFTGNVGDFSDFFQQLFGGRGGFGGLGDLFEQTPGRGARRVAGDLEAELPLSLEEAYRGGEKTISVGAERLTVRIPPGVREGQKIRLAGKGRAGGDLYLHVKLQSRPEMRLEGDDIYTVVEVPAPIAVVGGKVRVQTLDGPVEITIPRRTQAGRKLRLAGKGWPRKDKSRGDQYAEVRVTIPTNPSPEEERLYAQLAELIKVQ

SEQ ID NO: 2268 - protein, 176 aa, Triticum aestivum
MAGVGRNMVAPLLVLNLIMYIIVIGFASWNLNHFINGLTNRPGVGGNGATFYFLLFAILAGVVGAASKLAGVHHVRTWRGDSLATSASSALVAWAITALAFGLACKEIHIGGYRGWRLRVLEAFVIILVFTQLLYVLALHSGLFGNHAGGYGAEHGGYGAGDPHNKGMGTGGVARV

SEQ ID NO: 2269 - protein, 212 aa, Zea mays; identical to SEQ ID NO: 208

SEQ ID NO: 2270 - protein, 239 aa, Treponema denticola ATCC 35405
MDTSQLKERVAYHAIDTLFSEGKIFDGMKIGLGTGSTAMPAVHRLAQLLSSGKLKKIYAVPTSFQTSIECEKLGIPIYSLSSQQIGGSLDLAIDGADEIDPDKNLIKGGGAALLKEKIIAYNSKEFVVIADERKKVKSMGKGFALPIEIIPEARLSITKALEAQGIEVFLREGVKKMGPVVTDNGNFIIDVKWPKAADVDPKALEESLNKITGVVENGFFTKNTPRVFIVHQDGNIEDL

SEQ ID NO: 2271 - protein, 402 aa, Bordetella parapertussis 12822
MLSPEVRALVKATAPVLKEHGEALTRHFYTRMLGGNPELRQLFNQGHQQSGQQQQALAAAVAAYAEHIDDPSVLLPVVERIAHKHVSLGVRAEHYAIVGKHLLASIREVLGEAATDELIDAWAAAYGQLADLLIGRERALYAAAASRDGGWTGWRAFKVVRKTPESAEITSFYLAPADGGATPDYLPGQYVSVRVYVPELGLMQPRQYSLSEAPGMPGQLRISVKREAGSPAGMVSGTLHNRINEGDVLDVSPPQGDFTLDAEDGRPVVLLSGGVGLTPMVSMLNHLTARDDGRQIRFVHACREAGVHAMKEHINALAAKRPNVRKAVFYERVGADDRRGVDYDYEGRVDLHAIRDEVILPDADYYLCGPLPFMQAQRRALADLGVAEHRIHAEVFGTGGVA

SEQ ID NO: 2272 - protein, 348 aa, Bacillus halodurans C-125
MQALRWHGVKDVRVDDIAEPATLKGKVKIKVKWCGICGSDLHEYAAGPIFIPQNSPHSLTEEKAPIVMGHEFSGQVVEVGDGVTKCEEGDRVVVEPIFACGTCTACKQGKYNLCEQLGFLGLAGGGGGFSEYVTVDEHMVHKIPDTVSFEQGALVEPAAVALYAVRQSQFNVGDQAVVFGTGPIGLLVIEALKASGASKIYAVELSTERRQRAEQLGAIALNPAEVNVVEEIQRLTDGGADVSFEVTGVPIVLTQAIESTKLNGQTMIVSIFEKEASFQPNLVVMRERNIAGIIGYRDIFPAVISLMNQGYFSAETLVTKRIGLHDIVEQGFEALMKTNCNIKCDTTK

SEQ ID NO: 2273 - protein, 374 aa, Wolbachia endosymbiont of Drosophila simulans
MIENKFGKFDIVVIRENEEDVYTGIEHRLTGDSYQCTKIITRSGSEKICRYAFEYAKKHNRKKVTCLTKDNIMKMTDGTFHAAFDRIAKEYQDIKAEHYIVDIGMARVATEPENFDVIVTENLYGDILSDIVAQTSGSVGLAGSSNIGNEYAMFEAVHGSAPDIAGKNIANPSGLLNAAVHMLIYIGQVGTAKLIYDAWLKTLEGGIHTADLYKEKRSKQKVGTKEFAEAVIDNLGKKPAELTIGSGSDSKINLDSKINKVQDNYEQDYKVKKLVGSDITLAWDKSSNVDQIVGLFESSNPQIIAIYSKGLAIWPGSSKSSSDQITCRFIANSEKKPITNSDVNDLLIKLEENTFDVVRMDKLYLYDGKEGFFS

SEQ ID NO: 2274 - protein, 413 aa, Thermobifida fusca
MGPAAVAVADGRIAAVADYFDDLPSRKEVDLGETALLPGMVDVDAAVQAPGQLLSQGYARTTRAAAAGGITTLVVAPAPAQPAITSTEALRAHLHASASNSATHVAFLGGITPRSSSAELADLRANGVVGFACSLSDELMGLPALDDIHLSKSMAEVAAMDVPIVVHAEDANELGTVVGPGNSALLAARPPRAERRGLERVLAAARSSGARVHISPFVAAECAAILAAARDIGIPVSAQTCPHYLCLPAEHVPDTDPSYRCRPPLRSDANRQALWNALLHGAESFGDVIVDSVGSGNRPGTGISAIRWTLPALWTAAQKRGCGLAELTQWTAQRPAELMGLATKGRIQVGYDADLVAFEPDTFQRVPASDGGPYRGRRLQGRVTGTWLCGIPVPSDADNDPSPRGGPLLSAYR

SEQ ID NO: 2275 - protein, 506 aa, Arabidopsis thaliana
MERTLLQWRLLPLLALIVALFSFFFASPRSLQGNNKCSLLPHDHYWISSKRIVTPNGLISGSVEVKGGIIVSVVKEVDWHKSQRSRVKVIDYGEAVLMPGLIDVHVHLDDPGRSEWEGFPSGTKAAAAGGITTLVDMPLNSFPSTVSPETLKLKIEAAKNRIHVDVGFWGGLVPDNALNSSALESLLDAGVLGLKSFMCPSGINDFPMTNITHIKEGLSVLAKYKRPLLVHAEIERDLEIEDGSENDPRSYLTYLKTRPTSWEEGAIRNLLSVTENTRIGGSAEGAHLHIVHLSDASSSLDLIKEAKGKGDSVTVETCPHYLAFSAEEIPEGDTRFKCSPPIRDAANREKLWEALMEGDIDMLSSDHSPTKPELKLMSDGNFLKAWGGISSLQFVLPITWSYGKKYGVTLEQVTSWWSDRPSKLARLHSKGAVTVGKHADLVVWEPEAEFDVDEDHPIHFKHPSISAYLGRRLSGKVVSTFVRGNLVFGEGKHASDACGSLQLATT

SEQ ID NO: 2276 - protein, 492 aa, Burkholderia cepacia R18194
MQANDRTIPLDHPDCFYIDGQWTPAPSAETFEVLDCSTERVAARVARADAAVAARAIDAARRAFDQGPWPRMTPAERAACLERIAQHLEAANDEFARGWSIESGILQRIAKPRIGQFLGAAFRQYAAMADTYPFVEPHRSVTGHQAYAVKEAVGVVLAIVPWNGPAALIAYKVAPALLAGCTVIIKPSPEAPTSAYLFAQICDEIGLPPGVVNVVTADREVSEAMVRNPSVDKITFTGSTAAGRSISEAAAGRIARVTLELGGKSAALVLDDYDLDAAAQVLGKSYFSYLTGQVCHSLTRIIVPRAKHDTMVEALSEAAREMVLGDPFSDATTVGPLATARQRDTVEHHVAKGIAEGATLAAGGARPRHLSRGFFFEPTVFANVDNRSTLAQQEIFGPVLSVIAADSEAHAIELANDSIFGLNAVVFTSDAQHALQVARQLRTGSVGHNASRTDFSIGFGGFKQSGIGREGGVEGLNAFVESKTIVLDQPLA

SEQ ID NO: 2277 - protein, 377 aa, Zea mays
  misc_feature (224)..(224): Xaa can be any naturally occurring amino acid
ACRVAASKTKIYMVLEFVNGGELFDKIAIKGKLSEHEGRRLFQQLIDGVSYCHDRGVYHRDLKPENVLVDRKGTIKISDFGLSALPQHLGSDGLLHTTCGSPNYIAPEVLQNRGYDGSLSDLWSCGVILYVMLVGCLPFDDRNLVVLYQKIFKGDCQIPKWLSPAAQDLLKRILQPNPMKRINVAGIREHEWFKKDYVPAVPHDDDEDVLPSPAPSIKPIDEPXQEKCSPINAFQLIGMASSLDLSGFFEEEDAAQRKIRFTSTHPPKDLFDKIESVVMEMGFKVHRGAGKLKVLKNSKCSRNPSSLLVCTEVFELGPSLYVVELRKSHGDSTLYRQLCERLSDELGACKTDQIARTESSSDDLSSVDGEAFPLSGF

SEQ ID NO: 2278 - protein, 493 aa, Brassica juncea
MVLSKTASESDVSIHSTFASRYVRTSLPRFEMPENSIPKEAAYQIINDELMLDGNPRLNLASFVTTWMEPECDKLMMESINKNYVDMDEYPVTTELQNRCVNMIARLFNAPLGDGEAAVGVGTVGSSEAIMLAGLAFKRQWQNKRKAQGLPYDKPNIVTGANVQVCWEKFARYFEVELKEVKLREGYYVMDPEKAVEMVDENTICVAAILGSTLTGEFEDVKLLNDLLVEKNKQTGWDTGIHVDAASGGFIAPFLYPELEWDFRLPLVKSINVSGHKYGLVYAGIGWVVWRTKSDLPDELIFHINYLGADQPTFTLNFSKGSSQVIAQYYQLIRLGFEGYRNVMDNCRENMMVLREGLEKTGRFNIVSKENGVPLVAFSLKDSSRHDEFEVAETLRRFGWIVPAYTMPADAQHVTVLRVVIREDFSRTLAERLVADFEKVLHELDTLPARVQAKMANGNANGVKKTEEETTREVTAYWKKFVEAKKSNKNRIC

SEQ ID NO: 2279 - protein, 134 aa, Helianthus annuus
GVGYSWIDGLKSHAEQHVTNKMMLNAERIFPHNTPVTKEAYYYRMIFERFFPQNSAKLTVPGGASVACSTAKAIEWEGFWSNNLDPSGRGALGVHNAAYKKKSGSISPAKLAPSIADNVPRMMDITGPEIVIRS

SEQ ID NO: 2280 - protein, 267 aa, Salmonella typhimurium LT2
MTIPAFGLGTFRLKDDVVIASVKTALELGYRAVDTAQIYDNEAAVGQAIAESGVPRNELYITTKIWIENLSKDKLIPSLKESLKKLRTDYVDLTLIHWPSPGDAVSVEEFMQALLEAKKQGLTREIGISNFTIPLMEKAIAAVGADNIATNQIELSPYLQNRKVVDWAKAHGIHITSYMTLAYGKALKDEVIARIAAKHNATPAQVILAWAMGEGYSVIPSSTRRENLASSLLAQDLHLDAEDKNAIAALDCNDRLVSPEGLAPAWD

SEQ ID NO: 2281 - protein, 493 aa, Brassica juncea
MVLSKTASGTDVSVHSTFASRYVRNSLPRFEMPENSIPKEAAYQIINDELMLDGNPRLNLASFVTTWMEPECDKLMMESINKNYVDMDEYPVTTELQNRCVNMIARLFNAPLGDGEAAVGVGTVGSSEAIMLAGLAFKRQWQNKRKAQGLPYDKPNIVTGANVQVCWEKFARYFEVELKEVKLREGYYVMDPEKAVEMVDENTICVAAILGSTLTGEFEDVKLLNDLLVEKNKQTGWDTGNHVDAASGGFIAPFLYPELEWDFRLPLVKSINVSGHKYGLVYAGIGWVVWRTKSDLPDELIFHINYLGADQPTFTLNFSKGSSQVIAQYYQLIRLGFEGYRNVMDNCRENMMVLREGLEKTGRFNIVSKENGVPLVAFSLKDSSRHNEFEVAETLRRFGWIVPAYTVPADAEHVTVLRVVIREDFSRTLAERLVADFEKVLHELDTLPARVRAKMANGKAKVVKQTEEETTREVTAYWKKFVETKKTNQNKIC

SEQ ID NO: 2282 - protein, 374 aa, Arabidopsis thaliana
MDRISQLSDDLLLQILSFIPGKDVVATSLLSKRWQSLWMLVSELEYDDSYHTGDYKSFSQFVYRSLLSNNAPVIKHLHLNLGPDCPAIDIGLWIGFALTRRLRQLKINIRTSSNDASFSLPSSLYTSDTLETLRLINFVLLDVPSSVCLPSLKVLHLKTVDYEDDASLPSLLFGCPNLEELFVERHDQDLEMDVTFVVPSLRRLSMIDKNYGQCDRYVIDVPSLKYLNITDDAVYDVRQIENMPELVEAHVDITQGVTHKFLRALTSVRQLSLCLSLSEKQHESGLCGIETPIGWKLPSSVPECLLFSLEAFEWIGYKGRRGDREVATYVLKNAACLRTAKFSPESTDVGEKYHMLKELASVPTASTSSKLLFD

SEQ ID NO: 2283 - protein, 183 aa, Triticum aestivum
  misc_feature (69)..(69): Xaa can be any naturally occurring amino acid
  misc_feature (119)..(119): Xaa can be any naturally occurring amino acid
MAPTVMASSATSVAPFQGLKSTAGLPVSRRSNGASLGSVSNGGRIRCMQVWPIEGIKKFETLSYLPPLXSTEALLKQVDYLIRSKWVPCLEFSKVGFIFREHNASPGYYDGRYWTMWKXLPMFGCTGPTGYSTKVEGGQKRSYPGRVISQSRIPTTRPCAFKFPPSSQPSGSPGKGKLHNANI

SEQ ID NO: 2284 - protein, 262 aa, Brassica juncea
MVLSHAASDSDVSVHSTFASRYVRTSLPRFKMPENSIPKEAAYQIINDELMLDGNPRLNLASFVTTWMEPECDKLIMASINKNYVDMDEYPVTTELQNRCVNMIAHLFNAPLGRDETAVGVGTVGSSEAIMLAGLAFKRKWQNKRKAEGKPFDKPNIVTGANVQVCWEKFARYFEVELKEVKLSEGYYVMDPEKAVEMVDENTICVAAILGSTLNGEFEDVKLLNDLLVLKNKENGWDTPIHVDAASGGFIAPFLYPELEWD

SEQ ID NO: 2285 - protein, 431 aa, Arabidopsis thaliana
MDIISQCPDHLLLRILSFIPTKDVIVTSLLSKRWGSLWRWVPKLEYDFTRQNMRFVKFVYRSLLQNNAPVLESLHLKNIILYAECRTVDIGGWIDIAVSRRVRELEISINCSDEKFRLPSSLYTCGTLESFILTIKHCHLVDVPLAVCLPSLKKLHLRCIGWAYNATLLRLISGCTNLEELRLARPDDDGDYIMIHEAGSTIDYMSIFERRYMFEFMFDQMFGKGSSNGINAPLKYFSISNNYRIHNFRGIEKMPDWVEARIAVTGGSHKYLKEITYAKGLYVCLSVSEVMNPYDMIFHMLVDLTICTCTQGWWDLLTHMLQGSPKLRFLTLTNDHCRELPSLETPACWKRPSSVPACLLSSLQAFTWSGYKGRQGDKEVVKYVLRNATGLKKRIFISKSNDFGEKFCMLQELASVPTPSPSCQLLFDRIF

SEQ ID NO: 2286 - protein, 206 aa, Zea mays
MEAGGAGSGLNGAVQAKGTGADDGSAKRLPPCCVKARAAAPESEARCHATVVSGWFTEPRSRCGKASKVQYYNNPMWPGEANSLKVEKILYQGKSLYQEVLVFESSTYGKVLVLDGIVQLTDKDECAYQEMITHLPLCSIPSPKKVLVIGGGVGGVLREVSRHSSVESIDICEIDQLVIDVCKDFFPHLSVGFQDPRVQLHVGDGM

SEQ ID NO: 2287 - protein, 1342 aa, Shigella flexneri 2a str. 2457T
MSQEYTEDKEVTLTKLSSGRRLLEALLILIVLFAVWLMAALLSFNPSDPSWSQTAWHEPIHNLGGMPGAWLADTLFFIFGVMAYTIPVIIVGGCWFAWRHQSSDEYIDYFAVSLRIIGVLALILTSCGLAAINADDIWYFASGGVIGSLLSTTLQPLLHSSGGTIALLCVWAAGLTLFTGWSWVTIAEKLGGWILNILTFASNRTRRDDTWVDEDEYEDDEEYEDENHGKQHESRRARILRGALARRKRLAEKFINPMGRQTDAALFSGKRMDDDEEITYTARGVAADPDDVLFSGNRATQPEYDEYDPLLNSAPITEPVAVAAAATTATQSWAAPVEPVTQTPPVASVDVPPSQPTVAWQPVPGPQTGEPVIAPAPEGYPQQSQYAQPAVQYNEPLQQPVQPQQPYYAPAAEQPAQQPYYAPAPEQPVAGNAWQAEEQQSTFAPLSTYQTEQTYQQPAAQEPLYQQPQPVEQQPVVEPEPVVEETKPARPPLYYFEEVEEKRAREREQLAAWYQPIPEPVKEPEPIKSSLKAPSVAAVPPVEAAAAVSPLASGVKKATLATGAAATVAAPVFSLANSGGPRPQVKEGIGPQLPRPKRIRVPTRRELASYGIKLPSQRAAEEKAREAQRNQYDSGDQYNDDEIDAMQQDELARQFAQTQQQRYGEQYQHDVPVNAEDADAAAEAELARQFAQTQQQRYSGEQPAGANPFSLDDFEFSPMKALLDDGPHEPLFTPIVEPVQQPQQPVAPQQQYQQPQQPVAPQQQYQQPQQQVAPQPQYQQPQQPVAPQQQYQQPQQPVAPQPQYQQPQQPVAPQPQYQQPQQPVAPQPQDTLLHPLLMRNGDSRPLHKPTTPLPSLDLLTPPPSEVEPVDTFALEQMARLVEARLADFRIKADVVNYSPGPVITRFELNLAPGVKAARISNLSRDLARSLSTVAVRVVEVIPGKPYVGLELPNKKRQTVYLREVLDNAKFRDNPSPLTVVLGKDIAGEPVVADLAKMPHLLVAGTTGSGKSVGVNAMILSMLYKAQPEDVRFIMIDPKMLELSVYEGIPHLLTEVVTDMKDAANALRWCVNEMERRYKLMSALGVRNLAGYNEKIAEADRMMRPIPDPYWKPGDSMDAQHPVLKKEPYIVVLVDEFADLMMTVGKKVEELIARLAQKARAAGIHLVLATQRPSVDVITGLIKANIPTRIAFTVSSKIDSRTILDQAGAESLLGMGDMLYSGPNSTLPVRVHGAFVRDQEVHAVVQDWKARGRPQYVDGITSDSESEGGAGGFDGAEELDPLFDQAVQFVTEKRKASISGVQRQFRIGYNRAARIIEQMEAQGIVSEQGHNGNREVLAPPPFD

SEQ ID NO: 2288 - protein, 336 aa, Bartonella schoenbuchensis
STASCESKITYIDGDEGVLLYHGYSIDQLAENGDFLEVCYLLLYGELPTKQEKDDFDRRIMHHTMVHEQFSRFFHGFRRDSHPMAVMVACLGAMSAFYHDSIDITDAKQRMIASIRLIAKVPTLAAMAYKYSIGQPFVYPRNDLGYAANFLHMCFSVPCEEYKVNPVLARAMDRIFTLHADHEQNASTSPVRLAGSSGANPFACIAAGVACLWGPAHGGANEACLKMLQEIGSIEKIREFIARAKDKNDPFRLMGFGHRVYKNYDPRAKLMQKTCHEVLKELNIKDDPLLDIAMELEKIALSDEYFIEKKLYPNVDFYSGITLKALGFPTEMFTVL

SEQ ID NO: 2289 - protein, 564 aa, Zea mays
  misc_feature (248)..(248): Xaa can be any naturally occurring amino acid
MASSHIILPKEEEEEAAAAAVAEVGLGAAVEADHDHRPYQEQGPGKAALPFSATCVRISRDSYPNLRALRNASTMTLHDDDAAFVKLEEGDYGYVLDDVPHLTDYLPDLPTFPNPLQDHPAYSTVKQYFVNADDTVPEKVVVQKNSPRGVHFRRAGPRQRVYFESEEAKACIVTCGGLCPGLNTVIRELVCGLSHMYNVSNVFGIQNGYKGFYSSNYLPMTPKSVNDIHKRGGTVLGTSRGGHDTKKXVDNIQDRGINQVFIIGGDGTQKGAYEIYKEIRRRGLQVAVAGIPKTIDNDIAVIDKSFGFDSAVEEAQRAINAAHVEASSAENGIGLVKLMGRYSGFIAMYATLASRDVDCCLIPESPFYLEGEGGLFEYIDRRLKENNHMVIVVAEGAGQDLIAQSIPAADQQDASGNKLLLDVGLWLTHKIKDYCKSKKMEMTIKYIDPTYMIRAIPSNASDNVYCTLLAHSAIHGAMAGYSFTVGMVNGRHAYIPFHRVTSTRNKVRITDRMWARLLSSTNQPSFLSQKDIDAAREADKAANRTKSREDAKKQSTPVLANGEK

SEQ ID NO: 2290 - protein, 294 aa, Triticum aestivum
  misc_feature (103)..(103): Xaa can be any naturally occurring amino acid
MSAPPPPASSDDDGKPADEEGVEIREVWANNLEAEFAVIRDVVDDYPYIAMDTEFPGIVCRPLGSFRSNDEYNYATLKANVDMLSLIQLGLTLSDENGALPAXATGGRPCAWQFNFRGFDPRSDPANADSIDLLRNSGIDFDRFTTEGADTGHFAELLMSSGVLLNAELQWVTFHSGYDFGYLLKLLTGRNLPDTMPGFFDLIRIYFPVLYDIKHLMKYCGSLHGGLSKLGELLGVQRVGICHQAGSDSLLTLQCFQKLKEAYFRGSTENYAGVLYGLISDGGENRPPAALLIE

SEQ ID NO: 2291 - protein, 337 aa, Bartonella schoenbuchensis
STASCESKITYIDGDEGVLLYHGYSIDQLAENGDFLEVCYLLLYGELPTKQEKDDFDRRIMHHTMVHEQFSRFFHGFRRDSHPMAVMVACLGAMSAFYHDSIDITDAKQRMIASIRLIAKVPTLAAMAYKYSIGQPFVYPRNDLSYAANFLHMCFSVPCEEYKVNPVLARAMDRIFTLHADHEQNASTSTVRLAGSSGANPFACIAAGVACLWGPAHGGANEACLKMLQEIGSIEKIPEFIARAKDKNDPFRLMGFGHRVYKNYDPRAKLMQKTCHEVLKELNIKDDPLLDIAMELEKIALSDEYFIEKKLYPNVDFYSGITLKALGFPTEMFTVLF

SEQ ID NO: 2292 - protein, 493 aa, Ustilago maydis 521
MMNTKLKDLSLLEASDFLKAPDSLDTSDNESFDVMDPGSGRPICRLTASNLKDVDYAIQAASQAFPSYSAIPARERAMLLLNFDKLIRDNLDDLAWILVYETGKPLEEARAEVQYALTFSWWYVGETERVQGQVVKSATNPSLRYLTVWQPVGPVAILTPWNFPVALFVRKAVSALAAGCTIVAKPSPETPLSTLAVANLLHRAGFPSGSVNIVLASYRNTPAIGQALCTDLRIKKLSFTGSTRVGRLLMQQCAPTLKKLTLELGGLGAYLIFDDADIEAAATALVANKLRHAGQTCISAQRTFVHESIVDRVLKCIIELLDRVTLGHGAQPSTTLGPLQTERSQQKVREHIEDARAKGATVYTSKAAVPSSGYFVAPTLIVGCTAEMLVFQEESFGPLISLTSFATEQEAVALANKTDMGLTSYVFTKDSARLWRMFEQLKAGNVGLNVGGSTTAAEIPFGGVDQSGFGKEAGIGAGLKEYMVEKSATMSIA

SEQ ID NO: 2293 - protein, 474 aa, Bacillus cereus ATCC 10987
MKKHLYINGDWKSVNTYKPLYAPYSEETLAEIAQGTEEDVKEAVIAAKNAMKEMNRLSAYDRATILEKVAQKMDERREEFAEIIAKEAAKPIRAARGEVDRTVQTYKFAAEEAKRIYGETLPLDAAPGADGRIAYTIRKPIGVIGAITPFNFPLNLVAHKVGPAIAAGNTVVLKPADQTPLSSYALVELFEEAGLPKGALNIISGPGSTVGEAIVTNDDVASITFTGSPKVGLGIKAKAGLKRVTLELGSNAAVIIDEDVELTDELIERVKWGAFVNNGQVCISVQRVFVHEERMDEFLSKLQKAMETVVVGDPLLEETDVSALISKKDVERIDNWVQEAVKEGASVLYGGNKRDERIFKPTVLTNVPEHVSVQCQEVFGPLMTVNTFKEFDEAIEQVNHSRYGLQAGVFTNNLFKVMRAIDELEVGGVMINDIPTFRVDHMPYGGVKESGTGREGIKYAIEEMTEMKLVCIKK

SEQ ID NO: 2294 - protein, 324 aa, Bartonella schoenbuchensis
STASCESKITYIDGDEGVLLYHGYSIDQLAENGDFLEVCYLLLYGELPTKQEKDDFDRRIMHHTMVHEQFSRFFHGFRRDSHPMAVMVACLGAMSAFYHDSIDITDAKQRMIASIRLIAKVPTLAAMAYKYSIGQPFVYPRNDLSYAANFLHMCFSVPCEEYKVNPVLARAMDRIFTLHADHEQNASTSTVRLAGSSGANPFACIAAGVACLWGPAHGGANEACLKMLQEIGSIEKIPEFIARAKDKNDPFRLMGFGHRVYKNYDPRAKLMQKTCHEVLKELNIKDDPLLDIAMELEKIALSDEYFIEKKLYPNVDFYSGITLK

SEQ ID NO: 2295 - protein, 473 aa, Hordeum vulgare
GSFGKVKIAEHIITGHKVAIKILNRRKIKSMEMEEKVKREIKILRLFMHPHIIRLYEVIDTPADIYVVMEYVKSGELFDYIVEKGRLQEEEARRFFQQIISGVEYCHRNMVVHRDLKPENLLLDSKCNVKIADFGLSNVMRDGHFLKTSCGRPNYAAPEVISGKLYAGPEVDVWSCGVILYALLCGTLPFDDENIPNLFKKIKGGIYTLPSHLSPLARDLIPRMLVVDPMKRITIREIREHSWFKARLPRYLAVPPPDTAQQVKKLDDETLNDVIKMGFDKNQLTESLQKRLQNEATVAYYLLLDNKLRTTSGYLGAEYQESMDSSFSQISPETPSSASEARQYGSPGFGLRQHFAAERKWALGLQSRAHPREIITEVLKALQELNVCWKKIGHYNMKCRWSPGFFENMMHNNNGFGVESAIIEADGLGDKSTHIVKFEIQLYKTRGDKYLLDLQRVSGPQLLFLDLCSAFLT

SEQ ID NO: 2296 - protein, 318 aa, Bartonella schoenbuchensis
  misc_feature (25)..(25): Xaa can be any naturally occurring amino acid
KITYIDGDEGVLLYHGYSIDQLAEXGDFLEVCYLLLYGELPTKQEKDDFDRRIMHHTMVHEQFSRFFHGFRRDSHPMAVMVACLGAMSAFYHDSIDITDAKQRMIASIRLIAKVPTLAAMAYKYSIGQPFVYPRNDLSYAANFLHMCFSVPCEEYKVNPVLARAMDRIFTLHADHEQNASTSTVRLAGSSGANPFACIAAGVACLWGPAHGGANEACLKMLQEIGSIEKIPEFIARAKDKNDPFRLMGFGHRVYKNYDPRAKLMQKTCHEVLKELNIKDDPLLDIAMELEKIALSDEYFIEKKLYPNVDFYSGITLKA

SEQ ID NO: 2297 - protein, 280 aa, Listeria monocytogenes str. 1/2a F6854
MTLSFSDTYRLNNGIEMPRHGFGVYKLTDEARMRTALETAVDVGYRLFDTASFYHNEKELGDFFASSGLKRDEFFVTTKMWNTEQGYDETLWAFEKSQKKLQLDQIDLYLVHWPKQDTFFDTWRAVEKLYDEGLVRAIGVSNFEAHHLDRLRTSANVLPVVDQLETHPHFPNHLLHRYLEELHIVHQAWSPLGRGGVLQEQILIDLAEKHGKSPAQIVLRWHLQNNISIIPKSETPSRIRENAAIYDFELSEADMRQVERLNTGERVSHAPDVMYVRSEI

SEQ ID NO: 2298 - protein, 417 aa, Rubrivivax gelatinosus PM1
MYQHIKVPADGQKITVNADFSLNVPDQPIIPFIEGDGTGFDITPVMIKVVDAAVEKSYGGKRKIHWMEIYAGEKSTKVYGPDVWLPEETLQVLKEYVVSIKGPLTTPVGGGIRSLNVALRQELDLYVCLRPIQYFEGVPSPVKEPHKTNMVIFRENSEDIYAGIEFEAESEKAKKLIKILQDEFGVKKIRFPATSGIGIKPVSREGTERLVRKAIQYAIDNDKPSVTIVHKGNIMKFTEGGFRDWAYGLAQKEFGAQPIDGGPWCKFKNPKTGKEITVKDSIADAFLQQILLRPAEYSVIATLNLNGDYVSDALAAQVGGIGIAPGANLSDSIAMFEATHGTAPKYAGKDYVNPGSEILSAEMMLRHMGWTEAADLVISSMEKSILSKKVTYDFARLLDGATQVSCSGFGQVMIDNM

SEQ ID NO: 2299 - protein, 175 aa, Triticum aestivum
MAPTVMASSATSVAPFQGLKSTAGLPVSRRSSSAGLGSVSNGGRIRCMQVWPVEGIKKFETLSYLPPLSTEALLKQVDYLIRSKWVPCLEFSKVGFVFREHNSSPGYYDGRYWTMWKLPMFGCTDATQVLNEVEEVKKEYPDAYVRVIGFDNLRQVQCVSFIAFRPPGCEESGKA

SEQ ID NO: 2300 - protein, 319 aa, Clostridium acetobutylicum ATCC 824
MKTIAVLTSGGDAPGMNAAIRAVVRTAIEKGINVKGIQGGYSGLINGEIFDMNRHSVSDIIQRGGTILRTARCPEFLKEEVRQKAANVLRVFGIDGLVVIGGNGSFMGAQKLSKLGVKTVGLPGTIDNDLPYTDYTIGFDTTLNTVLDAINKLRDTSTSHERVSIIEVMGRDCGDIALFSGIAGGAESVIIPEIGYDFNELCKNILEGKLRGKMHNLIILAEGVGGAAELAKKVEEVTGIETRSTILGHIQRGGSPSAFDRMLASRMGVKAVEVLMEGKTSRVIGIKEGKIMDQDIDEALAVPRSFNKELYDIANMLSK

SEQ ID NO: 2301 - protein, 156 aa, Glycine max
  misc_feature (99)..(99): Xaa can be any naturally occurring amino acid
  misc_feature (101)..(101): Xaa can be any naturally occurring amino acid
  misc_feature (142)..(142): Xaa can be any naturally occurring amino acid
ASSMIYSPTVTTVNRAGAGMVATFTGLKSMAGFPTKNTNNDITSIASNGGRVQCMHVWPPVGKNKDETHCYLPDLDDAQLAKEVEYLFRKGWIPRLEFXVXHGFMYGEHTRSPGYYDGHYWTMWKLPMVCCTDASKVLNDLXDAKTAYPNGFIRII

SEQ ID NO: 2302 - protein, 399 aa, Oryza sativa (japonica cultivar-group)
MALSISTPPTSSSLLPASLQVGRWSSSAAMSARPVAFSLRRPVLAARVAAGGNAPSSSVDEVVTELDAVASFSEIVPDTVVFDDFEKFAPTAATVSSSLLLGIAGLPDTKFKSAIDTALADGECNTMEKPEDRMSCFLTKALANVGAEMAHLVPGRVSTEIDARLAYDTQGIIQRVHELLKLYSDHDVLSERLLFKIPATWQGIEASRLLESEGIQTHLTFVYSFAQAAAAAQAGASVVQIFVGRVRDWARTHSGDPEIDEALKKGEDAGLALAKKVYAYIHKNGYKTKLMAAAIRNKQDVFSLLGIDYIIAPLKILQSLEESVTDTDVKYGYVPRLTPALGKTYNFTEEELVKWDQLSLAAAMGPAAEELLASGLEGYVNQARRVEELFGKIWPPPNV

SEQ ID NO: 2303 - protein, 286 aa, Rubrivivax gelatinosus PM1
MAWADQWIPVGAGEPLKARVYGSRPRGRSAPLVLHFHGGAFVAGGLDSGATVAGLLAEAGAVVVSLDYPLAPAHPFPAAIEAGHAALTWMHRHRSRLAGQSATVWVAGEEAGGNLAAAVALMARDRRSPPLAGQILMSPMLDPCVATASLRDADAGPVGCLWADGWHQYLPGAADADHPYAAPASAMRLTGVPRTLLITAQDDPLRDEARAYARRLRDAGVEVDEAFLDQPTGWPCACKQPAGAQAAWAPVVRGQFQAFLQRAHAPAAVPVSASSSIQNRRPGSLS

SEQ ID NO: 2304 - protein, 255 aa, Neurospora crassa
MSDSPQSNSKDVEQGAPSPGEEPQMNDPQDPHSSGLNQYEFEVKEQDRWLPIANEHFQNKRCAYSLYTSMSHHSSSKSPEAPRASSSSSKADRCDAYDANIRNFAPVARIMKNALPENAKIAKEAKECMQECVSEFISFITSEASEKCQQEKRKTVNGEDILFAMTSLGFENYAEALKIYLSKYREQQQNQTNRSENQQNRPSSQGYGAPQGQNQPGQGGFSSNDLGGQQESGDASGYNLYGAQTGHNGGGAEGY

SEQ ID NO: 2305 - protein, 169 aa, Lactobacillus plantarum WCFS1
MQLSIPTINGALAATYSKQAAVAQTYKGHPIISFPVDISDVPAGTHSLAFTFVDHDAIPVGGFTWIHWIAANLPATTTHIPENASQTGAIPMVQGNNSTAGAYVHETDPKVSQHYVGPYPPDKDHRYSFKLFALDTELDLQPGYWLNEFHDAIAGHVLATAKTTVIGKV

SEQ ID NO: 2306 - protein, 480 aa, Streptomyces coelicolor A3(2)
MASAPAFDYAPAPESRAVVDIAPSYGVFIDGEFTEAADGKVFKTVSPATEEVLSEVAEAGEADVDRAVKAARKAFEKWSALPGAERAKYLFRIARIIQERSRELAVLETLDNGKPIRETRDADLPLVAAHFFYYAGWADKLDHAGYGADPRPLGVAGQVIPWNFPLLMLAWKIAPALATGNTVVLKPAETTPLSALFFADICRQAGLPKGVVNIITGDGRAGAALTAHPDVNKVAFTGSTAVGKQIARTVAGTRKKLTLELGGKGANIVFDDAPIDQAVEGIVNGIFFNQGQVCCAGSRLLVQESIHDELLDSLKRRLTTLRLGDPLDKNTDIGAINSAEQLARITALADQGEAEGAERWSPACELPSAGYWFAPTLFTNVTQAHTVARDEIFGPVLSVLTFRTPDEAVAKANNTPYGLSAGIWTEKGSRILAVANKLRAGVIWSNTFNKFDPTSPFGGYKESGFGREGGRHGLEAYLDV

SEQ ID NO: 2307 - protein, 291 aa, Ralstonia metallidurans CH34
MTKTTTARSSAVQPAAEQGEPYVVQHMVVSGDREIKVCVCYPAGYWPLSAGSATLPWLVYLHAGGFVEGDVEAAKELARDLAESVPAVVVTPGYSLAPENPFPAAPEDAVATVTWVLKQAKKLKVDKLRFALVGEEAGGNLAIATAQMLRDRGLPQPAGQWLIRPVTDPCLSAMSSTRQVPMEMLRRLACNYREYLPTPADSVHPYAAPALASRMAGLPATLVQVAEQDALRAEGEAFAAKLAKAGISARALIMPGACGDGVEQSHEKCQAWVEEGARFLRDCFAKADDAS

SEQ ID NO: 2308 - protein, 188 aa, Mougeotia scalaris
VYEDDGQPFTTFSQFWTRWQDMPFQPDNPLSTPNRLVLPPAVELQSMRVDELGLEERQEKSSNALLARAWTPGWANADRSLLVFIQGPLQRYSSSKNKADKHTTSLLSPHLHFGEILRTLKCTIKVRRMKAQWKSQGAEGASQGVDAFVRSLGLREYSRYLSFNFPFTHERSLLSNLKSFPWRLDEAG

SEQ ID NO: 2309 - protein, 350 aa, Mesembryanthemum crystallinum
EDEACSYAMTITSGSVPPMVLKAVIELDVLEIIKRAGPGAQLSPAEIANQLPTKNPDAATMLDRMLRLLASYSILSYSLRTLSDGRVERLYGLAPVCQFLTKNQDGVTLGALSLMNQDKILMESWYHLKDAVLDGGIPFNKAYGMSAFEYHGTDPRFNKVFNSGMSNHSTITMKKILDDYQGFEGLSTLVDVGGRHWGYPNMIISKHTTIKGINFDLPHVIEDAPAYPGVEHVEGDMFVSVPKGDAIFMKWICHDWSDEHCLSFLKNCYAALPNHGKVIVCEYILPVAPETSHAARTVFHVDAIMLAHNPGGKERTEQEFQALAKGSGFEGFKVACSAYDTKVMEFLKQN

SEQ ID NO: 2310 - protein, 77 aa, Glycine max
  misc_feature (30)..(30): Xaa can be any naturally occurring amino acid
  misc_feature (52)..(52): Xaa can be any naturally occurring amino acid
TTVNRAGAGMVAPFTGLKSMAGLLTKKTNXDITCIATNRGRVQCMHVWPRVXQEELETLSYLTTMDDTQYQTEAEYL

SEQ ID NO: 2311 - protein, 567 aa, Triticum aestivum
  misc_feature (116)..(116): Xaa can be any naturally occurring amino acid
  misc_feature (127)..(127): Xaa can be any naturally occurring amino acid
  misc_feature (313)..(313): Xaa can be any naturally occurring amino acid
  misc_feature (332)..(332): Xaa can be any naturally occurring amino acid
  misc_feature (378)..(378): Xaa can be any naturally occurring amino acid
  misc_feature (393)..(393): Xaa can be any naturally occurring amino acid
  misc_feature (398)..(398): Xaa can be any naturally occurring amino acid
  misc_feature (433)..(433): Xaa can be any naturally occurring amino acid
  misc_feature (502)..(502): Xaa can be any naturally occurring amino acid
IVPASAARSSWLLPPRGGPPPRSPPAACSPRPAASPAAVPSALRRADGARGLLPGTPSGVRHCGSSRRSPFRLLSKWATITAPYQRQIPVAAASGKTLPDCGTRRTGEVIARVAEXGDAEDVDRAAXAARKAFDEGPWPRMTAYERSRILLRFADLIEKHNDDIAALETWDNGKPYEQAAHIEVPMLVRLMRYYAGWTDKIHGLIVPADGPHHVQVLHEPIGVVGQIIPCDFPHLMYRAKILPPLACGDTILLKTAEQTPLSALYVSKLLHEAGLPEGVLNIVSGFGPTAGAALASHMDVDKIAFTGSTATGXVILELSARSNLKRVRLGRXGKTPFIVMDDVHIEPAPESSHISLCFIHGHSCGAGCRTFVYMSVYXERFLRKSKARALKRXVVGDXPFRKGVEQGPQIDDEQFKKILRYIKSGVDSGATLXTGGDKLGDKGYYIQPTIFSDVQDGMKIAQEEIFGPVQSIFKFNDLNEVIKRANASQYGLAAGVFTNNLXTPANTLTRALRAGTVWVNCFDIFDAAIPFGGYKMSGIGREKGIDSLKNYLQVKAVVTALKNPAWL

SEQ ID NO: 2312 - protein, 490 aa, Burkholderia fungorum LB400
MWRARAQEIRPEGRAFIDGNYVGALSGRTFATVNPATGQVIAQVAECGEEDVNLAVASARKAFESGVWSRRAPAERKAVMLRFAQLMMEHREELALLESLDVGKPVANAYNGDIVSSATCIQWYGEAIDKLYGETAPAAPDMTTMIVREPLGVVAAVVPWNYPLSMASWKLGPALAAGNSVVLKPAEQSPLSAIRIAALAMEAGLPAGVLNVLPGYGETAGRALGLHMDVDAVGFTGSTAVGKLFMQYSGQSNIKRVGLECGGKSPHIVLDDCADLDAAARAVAAGIFGNSGQVCNAGSRLIVQAAVRDELLEKVAAIARELVPGDPLDPATKMGAIVSDVQHASIMSYIDAGRADGARVVAGGRAARPESGGYFIEPTVFDGVNNDMRIAREEIFGPVLSAITVDSPEEAVRVANDTIYGLAAAVWTSNVTRAQQVSRQLKAGVVWVNCFDRGTMSSPFGGFKQSGFGRDKSMHAFDKYMDWKAIWIAG

SEQ ID NO: 2313 - protein, 282 aa, Saccharomyces cerevisiae
MVPKFYKLSNGFKIPSIALGTYDIPRSQTAEIVYEGVKCGYRHFDTAVLYGNEKEVGDGIIKWLNEDPGNHKREEIFYTTKLWNSQNGYKRAKAAIRQCLNEVSGLQYIDLLLIHSPLEGSKLRLETWRAMQEAVDEGLVKSIGVSNYGKKHIDELLNWPELKHKPVVNQIEISPWIMRQELADYCKSKGLVVEAFAPLCHGYKMTNPDLLKVCKEVDRNPGQVLIRWSLQHGYLPLPKTKTVKRLEGNLAAYNFELSDEQMKFLDHPDAYEPTDWECTDAP

SEQ ID NO: 2314 - protein, 330 aa, Burkholderia cepacia R18194
MPVPEVPDVPDVPDVPDVPDVPEVPDVPEVPEVPEVPDVPEVPDVPEVPDVPEVPDVPEVPDVPEVPEVPEVPDVPEVPDVPEVPDVPEVPDVPEVPDVPEVPDVPEVPEVPEVPDVPEVPEVPEVPDVPEVPDVPEVPDVPEVPDVPEVPEVPEVPEVPEVPEVPEVPDVPEVPEVPEVPDVPEVPDVPEVPEVPEVPEVPEVPEVPEVPDVPEVPEVPEVPDVPEVPEVPEVPDVPEVPDVPEVPDVPEVPDVPEVPDVPEVPDVPEVPDVPEVPEVPDVPEVVPDVPEDPEVPEEPDVPEVPELPPVPDVLGLIVGGVVGPSTEPQP

SEQ ID NO: 2315 - protein, 501 aa, Ustilago maydis 521
MPHMPQGIVKGGKEDVKLNNQSLWQTKAYINGVWTDADNKSTLKVFNKATGAEIGQVPDMGANETAAAISAADEAFKSWSKTTAKHRHDLLMKLYYAHQENAEDLAKIIVAENGKALPEAKGEISYSNGFLEWFAEEATRTYGHTVPSPLPGVRNVVQMQPVGVAGLITPWNFPAAMITRKAAPALAAGCTVVVKAPAETPFSALAFAHLAEKVGFPKGTINVVTCAKGDNEIAVGKQLCENPAVRKISFTGSTRVGKILMSQSASTLKKLSMELGGNAPFIVFEDADLDKAVEGAIACKFRGSGQTCICANRIYVHASIKDEFLQKLAAKVNDFKVGYGMDKGTTHGPLVSEAGLSKVEEHVNDSVKKGAKVIVGGKRGEGLFFEPTIITDLPEDVPTDREETFGPLAAVYTFTSEQEVVRKANNVDVGLAGYFFSKDTARCWRVAEELQVGMVGINTGLISQHAVPFGGVHESGFGREGGRTGIDEYLVQKLMVFGGVN

SEQ ID NO: 2316 - protein, 272 aa, Kineococcus radiotolerans SRS30216
MEVGRAVTVHPATLVGEGDLPARIAGRTNLWPQVRYFGSAAFDPHTDGGFSQFRTVRSDQLRFLPEGVDTLRGALAEPLAVAMHAVGRAGSLAGRDVLVNGAGPIGSLVVAAAVHAGAASVTAADVSPAALRVAAAMGARSVLDLSAGAVLPADVELVFEASGAAAALGGVLRATARGGTLVQVGNLPGGAVQAVLGDLVTREITWIGSYRFVEEIDDALVALAEGLDVMPVVSHRFAMADAAEAFAVMGDRSSGSSKVVLRLDGKPVEDAS

SEQ ID NO: 2317 - protein, 131 aa, Zea mays
  misc_feature (90)..(90): Xaa can be any naturally occurring amino acid
FFQACGTVHRVPFFSAKFGHPKGFAYVEFLEQKPVQEVLNLNEWELHGRQIKVAPKRTNVPGMKQGPPPGFNPSHGSPYSSYGAPFFPPXGFGGAPKFPPPLGSSPFFLRTGGGIMFNANPPMVCGRFQEN

SEQ ID NO: 2318 - protein, 490 aa, Burkholderia cepacia R18194
MNTTPDLAFDPPLHTRHFIDGAWRASVDGATLPVVDPSTEAVLADVSAGSEADVEHAVQAASRAYPGWKRTTGAMRAALLRAIARGVDARRTRLATLQSLNNGKPLAEAEIDVADVIATFDYYAGLAERLDTDGETEIALPDADHRAWIRREPAGVAALIVPWNFPMVTTAWKLAPALAAGCTVVLKPSEITPLPELELAAIAAEAGLPPGVLNVVTGTGHDVGARLCAHPRVAKVSFTGSTAVGAQVMKTAADTIKGVGLELGGKSSIVVFDDADLDHAVELVTGGGLFNAGQMCSATSRVLVAASLADDLIARLAQRIDATVVGPPFAPGVQMGPLTNRAQYERVQRHIAQGRADGARLVTGGNALDGPGYFIRPALFADVPADSSLWCEEIFGPVLCVRAFDTEDEAIAAANDTEYGLVATVVTRDTARARRVADALEAGVVWINTPQLIYPQTSWGGYKRSSIGRELGPFGLAAFQEIKQVMMPAG

SEQ ID NO: 2319 - protein, 333 aa, Enterobacter cloacae
NGVAGSYAEYVPLLHIVGAPCSGVQQRGELLHHTLGDGDFHHFYRMSEPVTAARAILTAQNACYEIDRVLEVMLMQSRPGYLMLPADVAKKPATPPVNALTTPPFPVNEACLNAFRQHAQAMLSVGSSVALLADFLAAFGFIQMLQCWMTDQLPTHTTVILGKGIVKRKHGGFSYPYHGAGGQRGPVPAIEGADTVICIGTRFTDTVTAGFTQQFARERTIEIQPFAARVGDVWFSGIPMREAINALIPLVRARAHAAANHRPPQAARAPVHQGTLNQETLWQTVQQFIRPDDILLADQGTAAFGAASLRLPAGAELLVQPLWGSIGYTLAAA

SEQ ID NO: 2320 - protein, 388 aa, Glycine max
  misc_feature (73)..(73): Xaa can be any naturally occurring amino acid
GIPWERLNYSRDKYRETRLKQYKNYQNFSRSPHHLRKECFQVQKGQTFYDFFFNTRLVKSTIVHFQLQLGRTXIMLRNLLWATSKHDVYLMQNYSVMHWSALLRRGKEVLNVAKPIIPTLKRPGFLAQPVSRVQISTMTVKENLMVAGGFQGELICKNLKHPGVLFCGKITTDDNAITNAVDVYSNPAGSLRVITANNDFQVRVFDAENFASLGCFKYDWSVNNTSVSPDGKLLAVLGDSTECLIADANTGKITGSLKGHLDYSFSSAWHPDGQILATGNQDKTCRLWDIRNLSQSMAVLKGRMGAIRALRFTSDGRFLAMAEPADFVHIFDSHSGYEQGQEIDLFGEIAGISFSPDTEALFVGIADRTYGSLLEFNRKRHYNYLDSF

SEQ ID NO: 2321 - protein, 475 aa, Bacillus halodurans C-125
MFRGKLYIDGTWTGDLLDTFDVKNPATGEVVGVMPNGGKAEAAAAIEAAQRAFLKWRKYTAAERANFLMTWHDLLLQQKEEIAEMLTMEMGKPLAEARGEIEYSASFIRWFAEEGKRVYGRTVPASAENKRIHVQKQPVGVVAAITPWNFPAAMIVRKMAPALAAGCTFVGKPAELTPLTAVKIVELCEEAGFPKGVVNLVCGDAKEIGEEMTSHEHVRKLTFTGSTAVGKLLMKQSAGRMLNLSLELGGQAPMIICDDADLDKAVAGVVASKYRNAGQTCVCGNRIYVQETIVDEFVKRLTGKVVQLKVGNGLEEGVHIGPLIEKKGYEKVKAHVDDAVAKGARVVIGGKGQEGNDSYFYDPTILTDVHDEMLVMQEETFGPVAPIQTFATDEDVIEKANGTRYGLAAYFFTENYARGIRLSEALDFGIVGWNDGAPSIAQAPFGGMKESGLGREGGQEGIEAFLETKFVSIGL

SEQ ID NO: 2322 - protein, 202 aa, Bacillus sp. KSM-K16
MTKTNSNLVWHEASVSKQERHARHNHKGCVLWFTGLSGSGKSTLANALDRSLFDAGLSTYVLDGDNIRHGLNKDLGFSDRDRQENIRRIGEVAKLFVDAGTIVSTAFISPFQSDRDQARALLADGEFVEVYVKCPLEECERRDVKGLYKKARNGEIPQFTGISSPYEEPETPEITVDTSVQTVEESVEQIIGWLEKHHILTR

SEQ ID NO: 2323 - protein, 485 aa, Mesorhizobium loti MAFF303099
MLQKTSHFMRQANLINGEWVQADSGQTVDVNNPATGLKIGTVPKSGKAETRRAIEAADAAFKTWRKTTALERSKLLRKLHDAMMDNQDVLAELLTIEQGKSLFESKGEIGSAAAYILWFAEEGRRTYGDVVPSPWADRRILVTKEPVGVIAAITPWNFPSSMLARKLGPALAAGCTAVVKPASQTPYSGLAWGALAEEVGFPKGVVNILTGSASEIGDEICANPLVSKITFTGSTEVGKLLIQKSSVTVKKVSMELGGNAPFIVFDDADIERAVAGAITAKYRNSGQTCVCTNRFLVQAGVYDKFVEKLAAASNGLKVGSGLEEGVQQGPLIDEKAVEKVEELIADATSKGGKIVAGGKRHALGGSFFQPTVIANATPKMRFMKEEIFGPVAPVFKFETEAEAIALANDTEFGLACYFYTGDLGRAFRVMEGLKYGMVGVNEGLITTPEAPFGGVKESGLGKEGGHQGIEDYLDTKYVCIGGLGL

SEQ ID NO: 2324 - protein, 126 aa, Glycine max
  misc_feature (13)..(13): Xaa can be any naturally occurring amino acid
  misc_feature (25)..(25): Xaa can be any naturally occurring amino acid
  misc_feature (27)..(27): Xaa can be any naturally occurring amino acid
  misc_feature (47)..(47): Xaa can be any naturally occurring amino acid
  misc_feature (60)..(60): Xaa can be any naturally occurring amino acid
SSMICSPAGATVXRGGGGMVAPFAXLXSMGGLPTGETRADITCVASXGGRAPCFFFWPPXGAKKGEILSYLPEVGDAQLAKEVESLLRKGWIPCLEFELEPGFVSRAPGRAPRIYDGRSRSLGKLA

SEQ ID NO: 2325 - protein, 124 aa, Arabidopsis thaliana
MSGVWVFNKNGVMRLVENPYNQSAGDSSESSSSGGNQQQRMRRKILVHLPSSEVVSSYGSLEKILKNLGWERYYSGDNTDHLLQFHKRTSIDLISLPRDFSKFNSIHMYDIVVKNPNVFHVRDM

SEQ ID NO: 2326 - protein, 129 aa, Treponema pallidum subsp. pallidum str. Nichols
MAALSNEQIIEAIRGKTILELSELIKAVEEEFGVTAAVPVAPVAEGGGAGSVAAEEQTEFTVVLKGLAEPGKKIAVIKEVRNVISGLGLKEAKDLVEGAPKTLKENVSKEEAAKIKESMTAAGALIEIS

SEQ ID NO: 2327 - protein, 488 aa, Vibrio cholerae O1 biovar eltor str. N16961
MRSLAMLPTDFPFFHQSAFINGQWILGEPQARQTVTNPFDGSLIGSVPLLSAAQVQEAIAGAQAAQILWCQQPAENKAKILRRWYELIEQHHESLAKLLTIEQGKPLAEARGEIHYAASFVEWYAEEAKRAYGELIPSHKPDARIMVSRQPVGVVAAITPWNFPAAMITRKCAPAFAAGCAVVLKPAPDTPFTALALADLAQQAGIPDGLLQVVTGDAIEIGRVLTESKTVRKLSFTGSTGVGKLLMAQSANNVKKLSLELGGNAPFIVFEDADINAAIDGVMVAKFRNAGQTCVCANRIYVHDAVYDQFAAKLVDRVSRLNVGYGLDAGVNIGPLINDAAVAKVTSHIVDAQSKGAKVMFGALPEAGSRLFQPHVLTEVTDEMRVADEETFGPLAALFRFSSEQEVIERANATDSGLAAYCYTQSLRRAWHMSEALEAGIVGINEGLISTTLAPFGGIKESGLGREGAKHGLEEYLEVKYTLMGGLA

SEQ ID NO: 2328 - protein, 526 aa, Triticum aestivum
  misc_feature (148)..(148): Xaa can be any naturally occurring amino acid
  misc_feature (215)..(215): Xaa can be any naturally occurring amino acid
MAMAMRRAAALGARHILAASVSASSRVASRRHMGSVDAGAAMEKIRAAGLLRTRGLIGGKWVDAYDGKTIEVQNPATGEVLANVACMGNRETADAITSANTTFYTWSKLTASERSKALRKWHDLLMSHKEELALLMTLEQGKPMKEAXGEVNYGASFIEFFAEEAKRVYGDIIPPTLADRRLLVLKQPIGVVGAITPWNFPLAMITRKVGPALGXGCTVVVKPSEFTPLTALAAADLALQAGIPAGALNVVMGNAPEIGDELMQSMQVRKITFTGSTAVGKKLMAGSANTVKKVSLELGGNAPCIVFDDADIDVAVKGSLAAKFRNSGQTCVCANRILVQEGIYEKFASAFVKAVQSLQVGNGLEESTSQGPLINEAAVQKVEKFVGDATSKGANIMLGGKRHSLGMSFYEPTVVGNVSNDMLLFSEEVFGPVAPLIPFKTEEEAIHLANDTNAGLAAYMFTKNIARSWRVSEALEYGLVGVNEGLISTEVAPFGGVKQSGLGREGSKYGMDDYLEIKYVCMGNLG

SEQ ID NO: 2329 - protein, 156 aa, Glycine max
MEPMDIVGKAKEDASLPKATMTKIIKEMLPPDVRVARDAQDLLIECCVEFINLVSSESNEVCNKEERRTIAPEHVLKALGVLGFGEYIEEVYAAYEQHKLETMQDSLKGAKWSNRAEMTEEEALAEQQRMFAEARARMNGGAITSKQPDAHQSLES

SEQ ID NO: 2330 - protein, 451 aa, Thermoplasma volcanium GSS1
MTTMIMENEERTEKYNEDALRYSEYYKGKIQTMSKVPVRSLDDFSIWYTPGVAAVSRKIATDHDLSFELTGRWNTIAILTDGTRVLGLGNIGPEAAMPVMEGKALIFNYLGGVNAIPVPIRVSSREEFVSVAKSLEPSFGGINLEDIESPKCFFLLETLQKEMNIPVWHDDQLGTASITLAGIINSIRIVGKKIEEVKVVFNGAGAANIAAAYLFKAAGFKKENIILVDSKGVLQPERQDMDSLMLNNPWKYQLAIETNGERVKGDLKEALKGADILISAAKSGPDTVDAKLVKEMNNDPIVFVLANPIPEMWPEEAKENGAKIVATGRSDFPNQINNSLVFPGVFRGVLDARAKGVNFDVMVAASYEIANFVEEPTAEKIVPTMEEWELYPRLASAVATKTVELGLARKIDSKEGFYKRARDIIENNRNIYRKMMDLGLIRMMPNGERKY

SEQ ID NO: 2331 - protein, 275 aa, Schizosaccharomyces pombe
MLGSFVKLNNGLKCPQFAYGSYMVNRTKCFDSVYAALQCGYRHIDSAQMYHNEADCGRAILKFMEETGTKREDIWFTSKLNDLSGYKSTLSSIDASVKACGLGYIDLFLLHSPYGDRIESWKALEKGVEEGKLRAIGVSNFGPHHIQELLDSHPKIIPCVNQIELHPFCSQQKVVDYCESKGIQLAAYAPLVHGEKFGNKQLLAIASKYNKSEAQIMIRYCLQRGFIVLPKSSTPRRIKENGDVFDFEISKEDMEKLYNLDEDYHSDWNPCVSPL

SEQ ID NO: 2332 - protein, 213 aa, Triticum aestivum
MEIAMVCTRVNLLILILSLCSPYKFIQSPMDFGPLNLLPTTIAASSDFGRILFHSPSAVLKPQSPRDISLLLSFLSASSLGKVTVAARGAGHSIHGQAQALDGIVVEMRSLPAEIELHKGGEGDASYADVSGGAMWIELLEQSLKAGLAPRSWTDYLYITIGGTLSNAGISGQTFKHGPQISNVLQLEVVTGRGETVTCSPTKNAELFSAVLG

SEQ ID NO: 2333 - protein, 308 aa, Neurospora crassa
MADHTEVDLDSIIDRLLEVRGSRPGKQVQLLEAEIRYLCTKAREIFISQPILLELEAPIKICGDIHGQYYDLLRLFEYGGFPPEANYLFLGDYVDRGKQSLETICLLLAYKIKYPENFFILRGNHECASINRIYGFYDECKRRYNIKLWKTFTDCFNCLPIAAIIDEKIFTMHGGLSPDLNSMEQIRRVMRPTDIPDCGLLCDLLWSDPDKDITGWSENDRGVSFTFGPDVVSRFLQKHDMDLICRAHQVVEDGYEFFSKRQLVTLFSAPNYCGEFDNAGAMMSVDESLLCSFQILKPAEKKQKFGRR

SEQ ID NO: 2334 - protein, 117 aa, Atriplex nummularia
MASSVVFKLACAVFMCMLVAAPHAEALTCGQVTSSMTPCMSYLTGGGSPTPACCGGVKSLNSMASTPADRKAACGCLKSAAGAMTNLNMGNAASLPGKCGISLPYPISTSTDCSKVN

SEQ ID NO: 2335 - protein, 108 aa, uncultured Rickettsia sp.
MLKEIGSSEYIPRYIAKAKAKDKNDPFRLMGFGHRVYKNYDPRAAVLKETCKEVLKELGQLDNNPLLQIAIELEAIALKDEYFIERKLYPNVDFYSGIIYKAMGIPSQ

SEQ ID NO: 2336 - protein, 296 aa, Bacillus thuringiensis serovar konkukian str. 97-27
MVIQWFPGHMAKARRQVTEKLKLIDVVIELVDARLPLSSRNPMIDEIITHKPRLVVLNKADMADDRLTKQWIAYFKEKGHMAISINAQAGQGMKEIAAACKVLVKEKFDKMVAKGIRPRSIRALIVGIPNVGKSTLINKLAKKNIAKTGDRPGVTTAQQWIKVGKEMELLDTPGILWPKFEDELVGLRLATTGAIKDSILNLQDVAVYALRFMEKHYPERLKERYNLNDIPEDIVELFDAIGKNRGCLMGGGMIDYDKTSELVLRELRGGKLGKMTFETPEEFAEQTEDAEKVEEV

SEQ ID NO: 2337 - protein, 520 aa, Glycine max
  misc_feature (84)..(84): Xaa can be any naturally occurring amino acid
  misc_feature (415)..(415): Xaa can be any naturally occurring amino acid
MESRTKSNPQLTRALCYGNDGKQQGRSPSVIVIGGGMAGIAAARALHNASFQVVLLESRDRIGGRIHTDYSFGFPVDMGASWLXMGVSNENPLASVIGRLGLPLYRTSGDNSILYDHDLESYGLFDMDGKQVPQELVAKVGEIFEAILQETDKIRQESSEDMSVLRGLSIVFDRKPELRLEGIAYKVLQWYLCRLEGWFAADTDAISLKGWDQEVLLPGGHGLMVRGYLPVVNSLAKGLDIRLGHRVTKVVRRYNGVKVTVENGKTFFADAAVIAVPLGVLKAKKILFEPKLPDWKEAAIADLGIGLENKIILHFENVFWPNVEFLGVVADTPYECSYFLNLHKATGRAVLVYMPSGQLAKDVEKMPDEAAVNFAFMQLKKIFPDASSPIQYLVSRWGSDINSLGSYSYDAVGKXPHELYERLRVPVDNLFFAGEATSMSYPGSVHGAYSTGTMAAEDCRMRVLERYGEVDLFQPVMGEEGSMGSVCSASLLLCLIDLDMRNVQCINIPTLSLQHCSQHF

SEQ ID NO: 2338 - protein, 263 aa, Arabidopsis thaliana
METDSIDSVIDDDEIHQKHQFSSTKSQGGATVVISPATSVYELLECPVCTNSMYPPIHQCHNGHTLCSTCKSSKLKHESQCNFRPYSCPYAGSECAAVGDITFLVAHLRDDHKVDMHTGCTFNHRYVKSNPREVENATWMLTVFQCFGQYFCLHFEAFQLGMAPVYMAFLRFMGDEDDARNYTYSLEVGGSGRKQTWEGTPRSVRDSHRKVRDSHDGLIIQRNMALFFSGGDKKELKLRVTGRIWKEQQNPDSGVCITSMCSS

SEQ ID NO: 2339 - protein, 444 aa, Glycine max
  misc_feature (306)..(306): Xaa can be any naturally occurring amino acid
MEKRGNVLMEKYEFGKLLGQGNFAKVYHARDVRTGESVAVKVIDKEKILKIGLVDQTKREISIMRLVKHPNVLQLYEVLATKTKIYFIIEYAKGGELFNKIAKGRLTEDKARKYFQQLVSAVDFCHSRGVYHRDLKPENLLLDENGVLKVADFGLSALVESHRQKDMLHTICGTPAYVAPEVISRRGYDGTKADVWSCGVILFVLLAGHLPFYDLNLMSLYNKIGKADYKCPNWFPFEVRRLLAKILDPNPNTRISMAKLMENSWFRKGFKPKSGQVKREAVNVALVDSDQVFCLCENTSAAVVEXRASIVKPSQFNAFNIISLSAGLDLSGLFAGNVELDDTKFTFMSSASSIMSTMEDIARVLSMEIIKKDGGLLKLERSREGRKGPLSIDAEIFEVAPSFHLVELKKSCGDALEYQKILKEDLRPALKDIVGVWQGEQHLH

SEQ ID NO: 2340 - protein, 294 aa, Arabidopsis thaliana
MALTNNLWAFVFGILGNIISFVVFLAPVPTFVRICKKKSTEGFQSLPYVSALFSAMLWIYYAMQKDGTAFLLITINAFGCVIETIYIVLFVSYANKKTRISTLKVLGLLNFLGFAAIVLVCELLTKGSTREKVLGGICVGFSVSVFAAPLSIMRVVVRTRSVEFMPFSLSLFLTISAVTWLFYGLAIKDFYVALPNVLGAFLGAVQMILYIIFKYYKTPVAQKTDKSKDVSDHSIDIAKLTTVIPGAVLDSAVHQPPALHNVPETKIQLTEVKSQNMTDPKDQINKDVQKQSQV

SEQ ID NO: 2341 - protein, 355 aa, Colletotrichum lagenarium
MSRANAPNPSGSRKISFNVSEQYDIQDVVGEGAYGVVCSAIHKPSGQKVAIKKITPFDHSMFCLRTLREMKLLRYFNHENIISILDIQKPRSYETFNEVYLIQELMETDMHRVIRTQDLSDDHCQYFIYQTLRALKAMHSANVLHRDLKPSNLLLNANCDLKVCDFGLARSAASQEDNSGFMTEYVATRWYRAPEIMLTFKEYTKAIDVWSVGCILAEMLSGKPLFPGKDYHHQLTLILDVLGTPTMEDYYGIKSRRAREYIRSLPFKKKVPFRTLFPKTSDLALDLLEKLLAFNPVKRITVEDALKHPYLEPYHDPDDEPTAPPIPEEFFDFDKHKDNLSKEQLKQLIYQEIMR

SEQ ID NO: 2342 - protein, 228 aa, Triticum aestivum
  misc_feature (127)..(127): Xaa can be any naturally occurring amino acid
  misc_feature (177)..(177): Xaa can be any naturally occurring amino acid
  misc_feature (188)..(188): Xaa can be any naturally occurring amino acid
  misc_feature (205)..(205): Xaa can be any naturally occurring amino acid
MGERLKGTVKWFNVTKGFGFISPEDGSEDLFVHQSAIKADGYRSLNENDVVEFEVITGDDGRTKATDVTAPGGGALAGGSRPSEGGGDRGGRGGGGYGGGGYGGGGGGYGGGGGGYGGGGGSYGGGXAGYGGGGGGGRYGGGSGGGGRYGGGSGGGRECYKCGEEGHISRDCPQGGXGGGGGGYGGGXPFAVVGGGGGCFSWGDXGHFSRHCPNRTIRRACRSNLSSR

SEQ ID NO: 2343 - protein, 417 aa, Pirellula sp. 1
MRSSTKAPPMLSEKTIRIVKEITPLVAANAETITRRFYERMFEANPEVKAFFNQAHQHSGGQQKALAGAICAYFTHIDNPAVLMPAVELIAQKHVSLGIKPEHYPIVGSNLLAAIGDVMGDAATPEIVEAVSEAYGFLADIFIGREGAIYEEQASMPGGWNGTRTFVVTKKVRESEIVTSFYLKPEDEGPLPPFKPGQYITVHMDHPHTPTSPRNYSLSDCASQPHYRISVKREERLVPDAPDGLISNHLHDGIEEGHRIELGPPCGEFTVDPATIAKPIVLIAGGIGVTPLLSMAKSIVHANPNAELHFIQAARNSKVHAFADELRRLAQAGPNVHTKVIYDSPLPGDVEEGKCDEAGFVTENQIRESTPFTDADFYFCGPKPFMKNVHSCLRELGVDEHRVRYEFFGPKEELVAV

SEQ ID NO: 2344 - protein, 277 aa, Sinorhizobium meliloti 1021
MGGPMSVYFEKSYQRGFGTYPLKGEPLKAAVREAITVGYRAFDTAQMYGNEAETGEALAESGLARDELCITTKVHPDNYSEEAFLPSVEASLKALRVDQADVLMLHWPEINGENARSLRLLQKAFDIGLARNIGVSNYTAPMMREAQSIVEAPLVTNQVEFHPLIDQSRLLDAAEETKIALSSYCSVARGEVFKHPVFAEIGARYGKTAAQTVLRWILQKGVSMNTMSTKPENIRANFEILDFALSPHDMKRIDAMNATNYRILKAGMLPWVPDWDR

SEQ ID NO: 2345 - protein, 331 aa, Bartonella koehlerae
STASCESKITYIDGNEGILLYRGYPIDQLAEKGDFLESCYLLLYGELPTKQEKIDFDRCIMQHTVVHEQFARFFHGFRRDSHPMAVMIACLGAMSAFYHDSIDITDPQQRMIASIRLISKVPTLAAMAYKYSIGQAFVYPRNDLSYAANFLHMCFSIPCEEYKINPVLTRAMDRIFTLHADHEQNASTSTVRLAGSSGANPFACIAAGVACLWGPAHGGANEACLKMLQEIGSVERIPQFIARAKDKNDSFRLMGFGHRVYKNYDPRAKIMQQTCHEVLKELNIQDDPLLDIAIALENIALNDEYFVGKKLYPNVDFYSGITLKALGFPTE

SEQ ID NO: 2346 - protein, 498 aa, Sinorhizobium meliloti 1021
MDQLNNFLSPPAAPRDFGFFVDGKWQSGHDFFVRHSPGHGVAVTRTAKCSVDDLNAAVAAARRAFEDRRWSGLPGGSRASVLLRVAEILRTRRDELAYWETLENGKPIAQARGEIDHCIACFEVGAGAARLLHGDSFNSLGDGLFGMVLREPIGVVGLITPWNFPFLILCERVPFILASGCTMVVKPSEVTSATTLILAEVLAEAGLPDGVYNVITGSGRTIGQAMSEHPDIDMLSFTGSTAVGRSCVHAAADSNFKKLGLELGGKNPIIVFADSDLEDAADGAAFGISFNTGQCCVSSSRLIVERSVAREFEALLAEKMKRIRVGDPLDETTQVGAITTEAQNTTILDYIAKGKTEGAELVTGGTAIDLGRGQYIAPTLFSGVSREMAIARDEIFGPVLCSMTFDTVEQAVELANDTVYGLAASVWTKNIDKALTVTRRVRAGRFWVNTMMAGGPEMPLGGFKQSGWGREAGMYGVEEYTQVKSVHVEIGKRTHWIS

SEQ ID NO: 2347 - protein, 341 aa, Sinorhizobium meliloti 1021
MKAAVLVEPRRFEVREVGIPEIGPADVLIRVTRAGICGTDLHIFNGHYAADRLPIVPGHEFCGTIAEIGASVTHLKTGMRVVADINIGCGNCYWCRRNEVLNCGEVEQIGIGRDGAFAQYVALPGRLVLPVPDGVPEAVLALVEPVACVVRAARKAGAAFGRSGVVLGAGPIGNLHVQMMRLVGMAPIIVADLSSERCRMAVEAGADAAVSEPATLRSKVLEMTGGRGADFVVESVGSSKLYRQAFDLVRKGGHVAFFGITPPGETIPIEILRTVLEENSLKGSVAGMGEDMHDALTLLSHGRFRTAAFTAAHYPLERIQEAFETIPARTGHLKTQILLDA

SEQ ID NO: 2348 - protein, 185 aa, Brassica napus
RVIFHINYLGADQPTFTLNFSKGSSQIIAQYYQLIRLGFEGYKNVMQNCRENMLVLKEGIEKTERFNIVSKDVGVPLVAFSLKGQSFHSEFEISEMLRRFGWIVPAYTMPADAQHITVLRVVIREDFSRTLAERLVADILKVLHELDTLPSKISRKMGAEDFGNVKGKKVERDILMEVIVGWRKV

SEQ ID NO: 2349 - protein, 473 aa, Brucella melitensis 16M
MRIGKMEMQTRYPDVKLFIDGTWRDGSRGETIEIFNPATDEVIGHIARATTADLDDALAAVDRGFEAWSKVSAFDRYKIMRRAADIFRSRGEEVARLLTMEQGKPLAEARIEAAAACDLIDWFAEEARRSYGRIVPPRQAYVMQAEVKEPVGPVAAFTPWNFPINQAVRKISAALAAGCSILLKAAEDTPAAPAELVRAFAEAGLPDGAINLVYGDPAEISAYLIPHPVIRKVSFTGSTQVGKQLAALAGLHMKRVTMELGGHAPVIIAADADVEQAIKVVSGSKFRNAGQVCISPTRFLIENSVYDQVVEGMAAYATSLKVGDGLEAGTTMGPLVNAKRVNAMERLVQDAREHKARVVTGGERIGNRGNFFEPTILADVPRDAAIMNEEPFGPVALLNRFDALDEALSEANRLNYGLAAYAFTGSSAKAARISSTVRSGMITINQLRSGPAGSALRRDQRFRLWNGRRCRRA

SEQ ID NO: 2350 - protein, 472 aa, Oceanobacillus iheyensis HTE831
MQSYKMFVGGKWFGNNLEQIDVINPATNEQIGTIPNGGKEEAKQAVDAAHNALKEWSARTAEDRSNYLVKWHELIKEERETIAKIMTEEQGKPLKEAIGEVDYANGFISWYAEEGKRIYGDIIPASHTNKRIFVQKKPVGVVAAITPWNFPAAMITRKVGPALAVGCTVVIKPATQTPLTAFKLVELAEKAGIPRGVINIVTGSSSQIGKVWNDDGRVRKLTFTGSTEVGKILMKDAANTMKKISLELGGHAPFVVMEDADLDKAVAGVIASKFRNAGQTCVCTNRVYVHESIKDIFQDKLTEAVSKLKVGNGLEEGINIGPLIDQSAVDKVDEQVKDAISKGGRVTFGGKSLRGLYVEPTIVVDATDDMLCMYEETFGPLVPVTTFRDEEEVIARANNSPYGLAAYVFTENIGRAIRISEALEYGIVGLNDGAPSTPQAPFGGFKESGLGREGGYYGIEEFLEIKYISLAF

SEQ ID NO: 2351 - protein, 169 aa, Oryza sativa (japonica cultivar-group)
MEHMFRYQNVLKHSSFLFYYTTNTATRTHPPPNVYAVTNTTTMDATTTAKRKRPAASDIADDAPTTVDEVSDAEVEEFYAILRRMRDATRRLGARPPPPRAPAWRPSFSWEDFADAPPKQAPPPPQQPADHERVAENATPPRRPAPGLDLNVEPPSDAPATPRSARAPA

SEQ ID NO: 2352 - protein, 469 aa, Glycine max
KVYYARNIKTGEGVAIKVIDKEKILKGGLVAHIKREISILRRVRHPNIVQLFEVMATKSKIYFVMEYVRGGELFNKVAKGRLKEEVARKYFQQLISAVGFCHARGVYHRDLKPENLLLDENGNLKVSDFGLSAVSDQIRQDGLFHTFCGTPAYVAPEVLARKGYDGAKVDLWSCGVVLFVLMAGYLPFHDQNVMAMYKKIYRGEFRCPRWFSPDLSRLLTRLLDTKPETRIAIPEIMENKWFKKGFKQIKFYVEDDRLCNVVDDDGLMDNDDDTASIVSVASFSDYSVSESDSEIETRRRINAPLPRPPSLNAFDIISFSPGFNLSGLFEEKEDETRFVTAAPVNRIISKLEEIAQLVRFSVRKKDCRVSLEGTREGVRGPLTIAAEIFELTPSLVVVEVKKKGGDRAEYERFCNDELKPGLQNLMVEESATSSELSTPIQPSLLRGLSEPVPDISSDIETPLCIPSDD

SEQ ID NO: 2353 - protein, 363 aa, Pichia jadinii
MPEKTIVVLPGDHVGTEITAEAIKVLKAIEEVKPEIKFNFQHHLIGGAAIDATGVPLPDDALEASKKADAVLLGAVGGPKWGTGAVRPEQGLLKIRKELNLYANLRPCNFASESLLDLSPIKAEVVKGTDFVVVRELVGGIYFGERKEDDGSGVASDTETYSVPEVQRITRMAAFMALQHNPPLPIWSLDKANVLASSRLWRKVVTETIEKEFPQLTVQHQLIDSAAMILIKYPTQLNGIVITSNMFGDIISDEASVIPGSLGLLPSASLASLPDSNKAFGLYEPCHGSAPDLPANKVNPIATILSAAMMLKLSLDLYEEGVAVETAVKQVLDAGIRTGDLKGTNSTTEVGDAVAEAVKKILA

SEQ ID NO: 2354 - protein, 423 aa, Schizosaccharomyces pombe
MKPNTTNLRNECWDTFSIPKRSQNIKINQSTKHQRSISDFVGTAGPGRQVGNWIIKKTIGAGSMGKVKLVVNILTGEKAALKMIPFTPNNTSQTVRVQREALLGRLLRHPNICRVIDCIRTPACTYILFEYVPGGQLLEYILARGKLDEDLARSFAMQLINALVYLHKNFIVHRDLKIENVLLTQDSRQVKLIDFGLSNFYSKDDLLRTYCGSLYFAAPELLDAKPYIGPEVDVWSLGVVIYVMVCGRVPFDDVSVPMLHSKIKSGKLEFPSYISEDCCSLIAAMLNVNPRKRCSLEQAAKFPWLKKNSFCLYLPIPLTSIPSTPSIRSHVFKPPFNLKVLQLLHEHGLASIPELKHELYMAYIERKTTSLVCLYLLGVESLAPALRIPTALPPVYSRHQRHHSEILGAMDLTEKITAMQCPP

SEQ ID NO: 2355 - protein, 124 aa, Cyanidioschyzon merolae strain 10D
MSTKINSLLEEIKSLTLLEAAELVKQMETTFGIDASAVATAAPAVQVETKKEEKTEFALVLSQVPADKKINVLKVVRTITGLGLKEAKELVDSVPKTLKEGLSASEAEQLKTQLTEAGAQVELK

SEQ ID NO: 2356 - protein, 509 aa, Brassica juncea
MTSVNVKLLYHYVITNLFNLCFFPLTAIVAGKAYRLTIDDLHHLYYSYLQHNLITIASLFAFTVSGFGLYIATLPKPLTLVEYSCYLPPRHLKVSVSKIMDIFYQIRKADTSSRNVACDDPSSLDFLRKIQERSGLGDETYSPEGLIHVPPRKSFAASREETEKVIIGGIENLFENTKVKPKDIGILVVNSSKFNPTPSLSAMVVNTFKLRSNIKSFNLGGMGCSAGVIAIAIDLAKDLLHVHKNTYALVVSTENITQGIYAEENRSMMFSNCLFRVGGAAILLSNKSGDRRRSKYELVHTVRTHTGADDKSFRCVQQGDDEDGKIGVCLSKDITNVAGTTLTKNIAICRPLILPLSEKFLFFATSVAMKLLKDKIKHYYVPDFKLAVDHFCIQPGGRAVIDELEKNLGLSPIDVEASRSTLHRFGNTSSSSIWYELAYIEPKERLKKGNKGWQIALGLGFKCNSAVWVALNNVKASANSPWEHCIDRYPVKNDSDLSKSKTHVQNGRS

SEQ ID NO: 2357 - protein, 178 aa, Arabidopsis thaliana
MAESQAKSPGGCGSHESGGDQSPRSLHVREQDRFLPIANISRIMKRGLPANGKIAKDAKEIVQECVSEFISFVTSEASDKCQREKRKTINGDDLLWAMATLGFEDYMEPLKVYLMRYREGDTKGSAKGGDPNAKKDGQSSQNGQFSQLAHQGPYGNSQVTFPLFSSHSSNTHHSLLIC

SEQ ID NO: 2358 - protein, 174 aa, Triticum aestivum
  misc_feature (98)..(98): Xaa can be any naturally occurring amino acid
  misc_feature (109)..(109): Xaa can be any naturally occurring amino acid
  misc_feature (120)..(120): Xaa can be any naturally occurring amino acid
  misc_feature (124)..(124): Xaa can be any naturally occurring amino acid
  misc_feature (141)..(141): Xaa can be any naturally occurring amino acid
  misc_feature (150)..(150): Xaa can be any naturally occurring amino acid
MAPTVMASSATSVAPFQGLKSTAGLPVSRRSNGASLGSVSNGGRIRCMQVWPIEGIKKFETLSYLPPLSTEALLKQVDYLIRSKWVPCLDSTSWFIFXREHNASPGVLXDGGYWTMWNCXYFGXTGPTQVINEVEESKKDXPDAYFRIIXSTTSSRAWLNSSPTGSKIRKAKYH

SEQ ID NO: 2359 - protein, 252 aa, Arabidopsis thaliana
MEGIQHPIPRTVEEVFSDFRGRRAGLIKALSTDVQKFYHQCDPEKENLCLYGLPNETWEVNLPVEEVPPELPEPALGINFARDGMQEKDWISLVAVHSDSWLISVAFYFGARFGFGKNERKRLFQMINDLPTIFEVVTGNAKQSKDQSANHNSSRSKSSGGKPRHSESHTKASKMSPPPRKEDESGDEDEDDEQGAVCGACGDNYGGDEFWICCDACEKWFHGKCVKITPAKAEHIKHYKCPSCTTSKKMKA

SEQ ID NO: 2360 - protein, 409 aa, Aspergillus nidulans FGSC A4
MFNKLSGQPESYEKKSLYRFGRTLGAGTYGIVREADCSSGKVAVKIILKRNVRGNERMVYDELDLLQKLNHPHIVHFVDWFESKDKFYIVTQLATGGELFDRICEYGKFTEKDASQTIRQVLDAVNYLHQRNIVHRDLKPENLLYLTRDLDSQLVLADFGIAKMLDNPAEVLTSMAGSFGYAAPEVMLKQGHGKAVDIWSLGVITYTLLCGYSPFRSENLTDLIEECRSGRVVFHERYWKDVSKDAKDFILSLLQVDPAQRPTSEEALKHPWLKGESASDRDLLPEIRAYIARSRLKRGIEIIKLANRIEALKMQEEDEEDIPSAVDVQASEASDKSGLSPFPALSTENSNTHPASTGNGESGGTKKRSLSKIARGAIFREVVLAKVREMKENEEREKVEREARERAHS

SEQ ID NO: 2361 - protein, 210 aa, Triticum aestivum
  misc_feature (47)..(47): Xaa can be any naturally occurring amino acid
  misc_feature (88)..(88): Xaa can be any naturally occurring amino acid
MEEEDQELYGQKTPVDAEDVNRAAGGDAAARLQDLEKMSRLLKRMEXEDAAPRDKMPKELQREMRGRAPSAHISEEKKRMVFLLFLCXDVYSACTPEEEQQPAFSSLADPSTTFTTDKFGQPKGFAYVEFVEAEAIQEAVKLSESELHGRQIKVAPKRTNVPGLKQPRGGRGFNPYGGHPYMRPYPPPFYNPYGGYGRAPRFRRPRRPFY

SEQ ID NO: 2362 - protein, 244 aa, Triticum aestivum
  misc_feature (116)..(116): Xaa can be any naturally occurring amino acid
  misc_feature (152)..(152): Xaa can be any naturally occurring amino acid
  misc_feature (158)..(158): Xaa can be any naturally occurring amino acid
  misc_feature (176)..(176): Xaa can be any naturally occurring amino acid
  misc_feature (193)..(193): Xaa can be any naturally occurring amino acid
  misc_feature (219)..(219): Xaa can be any naturally occurring amino acid
MCGILAVLGCADDTQGKRVRVLELSRRLKHRGPDWSGMHQVGDCYLSHQRLAIIDPASGDQPLYNEDKSIVVTVNGEIYNHEKLRAQLSSHTFRTGSDCEVIAHLYEEHGENFIDXLMGFSSLVIHATQFLCRDAGSTPLWIAVEAKPLYIXWGIDGXSVGISSEMKGLNDDCGHXEIFPPGHLFSQEGGKVXRFDPPPWVLESSSLRGLYNPFSPRKXFQKGLSQRGLMRDLPCGVLPSGGAC

SEQ ID NO: 2363 - protein, 113 aa, uncultured Rickettsia sp.
ANEAVINMLKEIGSSEYIPRYIAKAKDKNDPFRLMGFGHRVYKNYDPRAAVLKETCKEVLKELGQLDNNPLLQIAIELEAIALKDEYFIERKLYPNVDFYSGIIYKAMGIPSQ

SEQ ID NO: 2364 - protein, 418 aa, Pseudomonas aeruginosa PAO1
MGYQKIQVPATGDKITVNADMSLSVPKNPIIPFIEGDGIGVDISPVMIKVVDAAVEKAYKGERKIAWMEVYAGEKATQVYDQDTWLPQETLDAVRDYVVSIKGPLTTPVGGGIRSLNVALRQQLDLYVCQRPVRWFEGVPSPVKKPGDVDMVIFRENSEDIYAGVEWKAGSPEAEKVIKFLTEEMGVKKIRFTENCGIGIKPVSQEGTKRLVRKALQYAVDNDRSSVTLVHKGNIMKFTEGAFKDWGYEVARDEFGAELLDGGPWMQFKNPKTGKNVVVKDVIADAMLQQILLRPAEYDVIATLNLNGDYLSDALAAEVGGIGIAPGANLSDSVAMFEATHGTAPKYAGQDKVNPGSLILSAEMMLRHMGWTEAADLIIKGTNGAIAAKTVTYDFERLMDGATLLSCSEFGDAMIAKM

SEQ ID NO: 2365 - protein, 113 aa, uncultured Rickettsia sp.
ANEAVINMLKEIGSSEYIPKYIAKAKDKNDPFRLMGFGHRVYKNYDPRAAVLKETCKEVLKELGQLDNNPLLQIAIELEAIALKDEYFIERKLYPNVDFYSGIIYKAMGIPSQ

SEQ ID NO: 2366 - protein, 208 aa, Vibrio harveyi
LAPHREEIGKNIRTMIMGIPNVGKSTIINALAGRTIAVTGNQPAVTRRQQRINLQNGIVLSDTPGILWPKVENPHSGFRLAATGAVKDTAMEYDEVAFYTVEYLAAHYPEKLKERYQIDELPESDIEIMEEIGRRRGALRAGGRVDLHKVSEILLHELRQGTLGQITLELPEMITQELIEVEIETARKEEEKAKRKEERRKRYLRNKR

SEQ ID NO: 2367 - protein, 213 aa, Zea mays
MGCFHSTAKRQHPGYEDPVHLASQTAFSVSEVEALFELFKSISGSVIDDGLINKEEFQLALFKNQRKENLFANRIFDLFDVKKRGVIDFGDFVRALNVFHPNIPMEEKVDFSFKLYDMDSTGFIERKEVKQMLIALLGESEMRLSDEIIETILDKTFSDADANQDGKIDRTEWENFVTRNPSLMKIMTLPYLKDITTTFPSFVFNSEVDDLVT

SEQ ID NO: 2368 - protein, 128 aa, Brassica oleracea var. alboglabra
DPFEGLLTPSSARDMAAFTNARVDWKETPEAHVFKADLPGLMKEEVKVEVEDKNILQISGERSKENEEKNDKWHRLERASGKFMRRFKLPENAKMEEVKATMENGVLTVTVPKAPEKKPEVKSIDISG

SEQ ID NO: 2369 - protein, 347 aa, Anabaena variabilis ATCC 29413
MNREELLQETVQPIDIKAFDVVGLVEAMSKTAFQGRNLGRAAKIYDAMLQDKECTIILCLAGSLFSAGLKGIVHDLITHNMVDAIVSTGANIVDQDFFEALGYRHYVGDPFADDEVLRQQRIDRIYDTYIDEDQLRVCDMTIAEIAENLEKRPYSSREFIEQMAVYLERRGNYGQSVVQAAYQHQVPIFVPAFSDCSAGFGLVHHQWNSPESHVTIDSVRDFRELTQCKLASNYTGLVMIGGGVPKNFAQDTVVAAELLGFETSMHKYTIQVTVADERDGALSGSTLKEAHSWGKVDKATEQMVFSEATVALPLIAGYAYHKGNWRDRQPHRLAQLFTKPQPKVATV

SEQ ID NO: 2370 - protein, 507 aa, Oceanobacillus iheyensis HTE831
MSGNQEVDVLSGKHEELANKLDDIKLYINGEFMDAEDRGTFDNISPFSNEKINSVASGQAADIDKAVQSAKKAFKGEWGNLKQVERLEYVYKIGDLIEQHTDEIAILESLDTGLPISQTRKQVSRSANNFRFYADTVKSQMYGEVYQVDDEFINYTVRSAVGVAGLITPWNAPFMLETWKIAPALATGNTVILKPAEWSPLTANRMAEIIDQAGLPDGVFNIVHGFGETAGDALVKHPDVQLISFTGETTTGSTIMRNGADALKRFSMELGGKSPIIVFEDADLERALDAATWGIFSFNGERCTANSRLYLHESIADEFIEKLKQRVWNIRVGDPLENNTQIGPLIKTEHYNNVKKYLKIAEEEGCEIISGVIPKELNRGNYVAPTILLNASNEMRVVQEEIFGPVIAVMTFNDETEVIEKANDVRYGLAGYVWTNDMKRGHRVAHAIDSGMLWVNSQNVRDLRTPFGGSKDSGIGREGGHYAFEFYTEQKIIHVAIGDHHIPQFGK

SEQ ID NO: 2371 - protein, 221 aa, Glycine max
MGRGKIVIRRIDNSTSRQVTFSKRRNGLVKKARELSILCDAEVGLIVFSSTGKLYDYASTSMKSVIERYNKVKEDHQQLINPASEVKLWQREVASLRQQVQYMQECHRQMMGQELSGLGIEELGNLEKRLEMSLKGVRMKKDQILIDEVKELHQKGSLAHQENVELNRKINLIRKENEELQKVIEAKCRKGVAASNPPFTINYGCNMLAPISLQLSLPEST

SEQ ID NO: 2372 - protein, 169 aa, Hordeum vulgare
MAAAASSASSVHDFTVKDASGKDVDLSTYKGKVLLIVNVASQCGLTNSNYTELAQLYEKYKDQGFEILAFPCNQFGGQEPGTNEEIVQFACTRFKAEYPIFDKVDVNGDNVAPVYKFLKSSKGSLFGDNIKWNFSKFLVDKDGNVVDRYAPTTSPLSIEKDIKKLLASS

SEQ ID NO: 2373 - protein, 131 aa, Glycine max
  misc_feature (102)..(102): Xaa can be any naturally occurring amino acid
  misc_feature (125)..(125): Xaa can be any naturally occurring amino acid
MAPLMISSPAATTGNRALAYVGAPFTDLKYMAGLRTRNTNTDITSIASNGGRVQCMQAWPPIGKKKFETLSYLPDLDDAQLTKEVAYLLRNGWIPCLAFELXTGSLYREHITSPGYYDRRYWTCXKLSMFG

SEQ ID NO: 2374 - protein, 347 aa, Listeria monocytogenes EGD-e
MKNTIKWIAIGFAGIILLPLLIVFFIYKKAVGKKDYNPEVLENLDKASQEFVKNTSPLSDVDSRYKYMRLATKALPSAKDIEIGDVENKKIDGPAGKIPIRIYTPQEDGPFEIIVYYHGGGFVLGGLQTHDAIARKLVQTTGARVVTVDYRLAPENPFPAAVEDAYAALLWVQNHRTSLRAKSSDIIVAGDSVGGNLATVVTQIAKSKGKPNITAQILLYPATDIFSRDASVLYPSMDEFAEGYVLTKESLDKFFKLYIANASDRKYDPLVAPIRSKDLVGLPKTFIATAEFDPLRDQGEAYAKKLKDAGVEVFAKRFEKVPHGFMTTNSEATDETYELISEFLEEK

SEQ ID NO: 2375 - protein, 267 aa, Shigella flexneri 2a str. 2457T
MAIPAFGLGTFRLKDDVVISSVKTALELGYRAIDTAQIYDNEAAVGQAIAESGVPRHELYITTKIWIENLSKDKLIPSLKESLQKLRTDYVDLTLIHWPSPNDEVSVEEFMQALLEAKKQGLTREIGISNFTIPLMEKVIAAVGAENIATNQIELSPYLQNRKVVAWAKQHGIHITSYMTLAYGKALKDEVIARIAAKHNAIPAQVILAWAMGEGYSVIPSSTKRKNLESNLKAQNLQLDAEDKKAIAALDCNDRLVSPEGLAPEWD

SEQ ID NO: 2376 - protein, 485 aa, uncultured bacterium 582
MREVKGYWQNYIDGAWVDGGAGRIDVINPGTGEKIAEQALADARDVDLAVQAAKRVHSTGVLTDMRPVERGRIVQAMGRYLLEHLEEIAALLSLEQGKPIWEARIEVTGAARYFEYYGNQAETLEGRSIPLGAGYFDFTTDEPYGVSAQIIPWNFPVEMTARSLSAALTTGNTVVVKPPEMTPLSNAWFAHAAEAVGLPKGAVNLVCGYGHQAGAALSAHPDINQVVFTGSVATGIAIASAAAKNVVPCVLELGGKSAAIVHSDADLVAMETDIRKGIFINAGQVCSAMSRIIVHESRHDELVQRAVSIAESLSVGPGADRQTFGANMGPMVSVKQRDRAAGLVSEAVSQGAKLVTGGRAMNIPGAFLQPTVLAEVTPEMTIAQTEVFGPVLSVLRFREDAEAIEIANGTDYGLVGGVFTRDLDRATQVARKIRAGQVFVNEWFAGGVETPFGGYGKSGYGREKGREALWNYVQTKNIAIKLKRT

SEQ ID NO: 2377 - protein, 175 aa, Oryza sativa (japonica cultivar-group)
MAPSVMASSATTVAPFQGLKSTAGMPVARRSGNSSFGNVSNGGRIRCMQVWPIEGIKKFETLSYLPPLTVEDLLKQIEYLLRSKWVPCLEFSKVGFVYRENHRSPGYYDGRYWTMWKLPMFGCTDATQVLKELEEAKKANPDAFVRIIGFDNVRQVQLISFIAYKPPGCEESGGN

SEQ ID NO: 2378 - protein, 330 aa, Triticum aestivum
  misc_feature (143)..(143): Xaa can be any naturally occurring amino acid
MAAAGDDDLQLQHAAVPIPCVTLNTGHAMPVLGFGTGSSRAPADLPDTIVHAVRLGYRHLDTAAMYGTEPAVGVAVAEAVRSGAGGISSREDLFVTSKLGIPDARPGRVVPALRESLGRLGVDYLDLFLVHWARRRRQPRGQXSTHTEFDMEGVWRGMEECHRLGLARSVGVSNFSAAKMERLLALAAVPPAVNQVELNVGWRQEKVREVCARHGVVVAAYSPLGAYGAFWGSDAVMHSGVMHDVAAAKAKTVAQVALRWVYEQGVCFVARSFNKERLKQNMDIFVDWELSDEDKAMIATIPQKRACQGDYFVSPDGPYKSLEELWDGEM

SEQ ID NO: 2379 - protein, 431 aa, Azoarcus sp. EbN1
MSTERTATLTVDGKTVEFPVMTGTHGNDVIDIRTLGAKTGFFTYDSGFLSTASCKSTITFIDGDKGELLYRGYPIEQLADKCSFLEVAYLLKNGELPNGTQKVEFENTIKNHTMLHDQMTKFFTGFRRDAHPMAVMVGVVGALSAFYHEAMDFSDSEHRNISINRLIAKLPTIVAMAYKYNMGQPFMYPRNELDYTANFMHMMFGTPCEEYKPNPVLVRALDTIFTLHADHEQNASTSTVRLAGSSGANPFACISAGIACLWGPAHGGANEACLNMLEEIGDVSRVGEYIARAKDKNDSFKLMGFGHRVYKNFDPRAKLMRQVCYDVLGELGLENDRLFKLAMELEKIALEDQYFVEKKLYPNVDFYSGIVQKALGIPTSMFTCIFALARTVGWITQWEEMITDPEYKIGRPRQLYIGAARRDVPTLAQRP

SEQ ID NO: 2380 - protein, 280 aa, Thalassiosira weissflogii
PHSFPPHSVALQVLGTFILWFGWYGFNPGSTLGISGEGVPDVAALCAVTTTIAAASGSVSAMFTDMLPSRRSTGETMYDITMCMNGALSGLVGITAGCSVVEPWAAFVIGIVAGWTYIFWSALLVKLKIDDAVDAIPVHFGNGIWGCIAVGLFAEPTRTINAFGEHGHYGRFYSWGNGSADAHLLAAQVCGVLWIIGWVTVIMLPYFLILNAIGLFRVDALEEEVGLDISHHKGAAYDMSGPSADVQEKFEISRSQRKIRFPRRTLMKQPKQATLQLLDF

SEQ ID NO: 2381 - protein, 143 aa, Brassica napus
  misc_feature (23)..(24): Xaa can be any naturally occurring amino acid
  misc_feature (26)..(26): Xaa can be any naturally occurring amino acid
  misc_feature (28)..(29): Xaa can be any naturally occurring amino acid
  misc_feature (31)..(32): Xaa can be any naturally occurring amino acid
  misc_feature (34)..(34): Xaa can be any naturally occurring amino acid
  misc_feature (39)..(39): Xaa can be any naturally occurring amino acid
  misc_feature (49)..(49): Xaa can be any naturally occurring amino acid
  misc_feature (53)..(53): Xaa can be any naturally occurring amino acid
  misc_feature (58)..(64): Xaa can be any naturally occurring amino acid
  misc_feature (66)..(66): Xaa can be any naturally occurring amino acid
  misc_feature (70)..(71): Xaa can be any naturally occurring amino acid
  misc_feature (78)..(78): Xaa can be any naturally occurring amino acid
  misc_feature (82)..(83): Xaa can be any naturally occurring amino acid
  misc_feature (87)..(87): Xaa can be any naturally occurring amino acid
  misc_feature (89)..(90): Xaa can be any naturally occurring amino acid
  misc_feature (93)..(94): Xaa can be any naturally occurring amino acid
  misc_feature (96)..(96): Xaa can be any naturally occurring amino acid
  misc_feature (103)..(106): Xaa can be any naturally occurring amino acid
  misc_feature (109)..(109): Xaa can be any naturally occurring amino acid
  misc_feature (111)..(116): Xaa can be any naturally occurring amino acid
  misc_feature (118)..(118): Xaa can be any naturally occurring amino acid
  misc_feature (126)..(126): Xaa can be any naturally occurring amino acid
  misc_feature (131)..(132): Xaa can be any naturally occurring amino acid
  misc_feature (134)..(134): Xaa can be any naturally occurring amino acid
  misc_feature (141)..(141): Xaa can be any naturally occurring amino acid
NVKRKEEEEVVVASSMLSSAAVXXSXAXXTXXAXFTGLXASAAFPVTRXAYNXITSIXXXXXXXSXMKVXXPVEKKKXETLXXLPDXTXXELXXEXDYLLRNXXXXCGXFXXXXXXVXREHGNTPXYYDGXXWXMWKLPLXGC

SEQ ID NO: 2382 - protein, 146 aa, Treponema denticola ATCC 35405
MNSLSLFSPSFTDSVFDALDRSLGPNFGVFAPIKNASCGMPSVDIRETEKAYVMEVDLPGYSEKDVEISLKDRLMTISSSKKEEKEDKGAEYIIKERSSRHFMRRFTLPEDINSDEVSAKFENGVLVVNIPRKPDTQPKQIEIKTA

SEQ ID NO: 2383 - protein, 484 aa, Dechloromonas aromatica RCB
MKQILNFINGEFVATGKQFEKRTPLDNSLIGMVHEAGKAEVDAAVKAAHDALEGPWGKMTVVERTDILNKVADEITRRFDEFLEAECADTGKPKSLASHIDIPRGAANFKIFADVIKNAPTEFFEMATPDGKGALNYAIRRPVGVVGVVCPWNLPLLLMTWKVGPALACGNTVVVKPSEETPSTATLLGEVMNACGVPKGVYNVVHGFGPNSAGEFLTTNQNVNAITFTGETRTGAAIMKAAADGARPVSLEMGGKNPAIVFADANLDVAIEATLRSCFSNCGQVCLGTERVYVERPFFETFVAALKAGAEKLKLGVPSDPSANMGPLVSQEHRNKVLSYYKKAVEEGATVVTGGGIPDMPGELANGAWVQPTIWTGLDDNAAVVREEIFGPCTTVMPFDSEDEVIKRANNTTYGLAASVFTQDVNRAHRVAGRIEAGLVWVNSWFLRDLRTPFGGAKQSGIGREGGVHSLEFYTELKNVCIKL

SEQ ID NO: 2384 - protein, 292 aa, Zea mays
  misc_feature (124)..(124): Xaa can be any naturally occurring amino acid
  misc_feature (168)..(168): Xaa can be any naturally occurring amino acid
EDYYNPNFAVEDARGPREPWDDLHSKIDGPEAYDVLKNFEERWLKASKRSAAKKLSKLSRSHNDSLLWINKIPDIIAIDDEIYSNDDDPERWDMQIFRSIDSNSVKGFPKDPREATSKNLVCGXNVLIDMSVHTTYVNAIRGAQHFIYIENQYFLGSSFNWDSHRDVXKMTMQIMYEIIYKAMKEVGLDGTYEPQDYLNFFCLGNREAEDTTCTSSGPFSTTWISNQDQARNNRRFMVYVHSKGMIVDDEYVIIGSANINQRSMEGTRDTEIAMAAYQPQHTLANMLSAPRG

SEQ ID NO: 2385 - protein, 184 aa, Aspergillus nidulans FGSC A4
MSNKFKITDLLPLPNSSVKIPRLGFGVYRSPATQTKQSVLKALETGYRHIDTAQFYANEKEVGDAIHESGLPRSEIFVTTKILAPAGSPEATYEKIIESVNKIGGKDGYVDLFLIHSSSSGSSGRKELWQALEKLLEEGRTKSIGVSNFGVKHIEEMKEYAKVWPPHVNQIEVGFQEFSAPEAC

SEQ ID NO: 2386 - protein, 384 aa, Zea mays
  misc_feature (102)..(102): Xaa can be any naturally occurring amino acid
PLWVDVLRATLRHGLAPRVWTDYLRLTVGGTLSNAGIGGQAFRHGPQIANVHELDVVTGTGEMVTCSMDVNSDLFMAALGGLGQFGVITRARIRLEPAPRRXRWVPLAYTDVATFTKDQEFLISNRASQVGFDYVEGQVQLSRSLVEGPKSTPFFSGADVARLAGLASRTGPAAIYYIEGAMYYTKDTAISVDKVQKMKALLDQLSFEPGFAFTKDVTFVQFLDRVREEERVLRSAGAWEVPHPWLNLFVPRSRILDFDDGVFKALLKDSNPAGIILMYPMNKDRWDDRMTAMTPATNDDDVFYAVSFLWSALSADDVPQLERWNKAVLDFCDRSGIECKQYLPHYTSQDGWRRHFGAKWSRIAELKARYDPRALLSPGQRIFP

SEQ ID NO: 2387 - protein, 316 aa, Pseudomonas putida KT2440
MIDAVVVSRNDEAQGICSFELAAADGSLLPAFSAGAHIDVHLPDGLVRQYSLCNHPEERHRYLIGVLNDPASRGGSRSLHEQVQAGARLRISAPRNLFPLAEGAQRSLLFAGGIGITPILCMAEQLSDSGQAFELHYCARSSERAAFVERIRSAPFADRLFVHFDEQPETALDIAQVLGNPQDDVHLYVCGPGGFMQHVLDSAKGLGWQEANLHREYFAAAPVDASNDGSFAVQVGSTGQVFEVPADRTVVQVLEENGIEIAMSCEQGICGTCLTRVLQGTPDHRDLFLTEEEQALNDQFTPCCSRSKTPLLVLDI

SEQ ID NO: 2388 - protein, 178 aa, Triticum aestivum
  misc_feature (100)..(100): Xaa can be any naturally occurring amino acid
  misc_feature (109)..(109): Xaa can be any naturally occurring amino acid
  misc_feature (131)..(131): Xaa can be any naturally occurring amino acid
  misc_feature (137)..(137): Xaa can be any naturally occurring amino acid
  misc_feature (149)..(149): Xaa can be any naturally occurring amino acid
MAPTVMASSATSVAPFQGLKSTAGLPVSRRSNGASLGSVSNGGWIRCMQVWPIEGIKKFETLSYLPPLSTEALLKQVDYLIRSKWVPCLEFNKVGFIFRXEHNASPGVXYNGRYWTMWKLPMFGCTDATQXINEVEXVKKGVPDAYVRXIGFQKMLKVQWRQLHPSNQPGAKESRQRP

SEQ ID NO: 2389 - protein, 503 aa, Burkholderia cepacia R18194
MLNESLATTDHAPLRRYEHLYIDGAWVKPIDGELAESIDPATGQPWAIAPMGGPQDIDRAVEAARTAFHGTWRSTPGHVRAALLRRLADLFSAAIPELAIIESRDNGNLVREHRASLTAQVQWYQWFASLADKAQGATIPIDDSVHAFTTRVPIGVVGAIIPWNAPLLATCLKVGAALAAGCTVVVKPAEQTPVSALELARLVHEAGFPPGVFNVVPGYGRTAGAHLVKHPDVNKISFTGASQTAKHMVRDGADNLKRFTFELGGKAPHILFADADLDNAINAATASAWRLTGQSCALGSRVLVERPIYDRVVEAFRTRAKAVRVGLPSIDSNHMGPQSHETQLAKTLSYVDAGKQDGAELVTGGRRITTPELAAGYFVEPTVFAGVTNQMRIAREEIFGPIASLIPFDGEDEAIAIANDTPYGLTAGLWTRDVGRAHRVSNRIDAGMVWVNTYSFLRWSTPYGGFKASGWGRENGIDALDPYLETRTTVISTTGQFPNLYED

SEQ ID NO: 2390 - protein, 194 aa, Suillus bovinus
MHNIKCVVVGDGAVGKTCLLISYTTNAFPGEYVPTVFDNYSANVMVDGKTISLGLWDTAGQEDYDRLRPLSYPQTDVFLICFSLVSPPSYENVRTKWWPEISHHAPSTSVVLVGTKLDLREDPATIEKLRDRRMQPIQYTQGVSMARDIGAVKYLECSALSQKGLKTVFDEVIRAVLNPPPKEKKRSGRGCVIV

SEQ ID NO: 2391 - protein, 250 aa, Pimpinella brachycarpa
MGKCYPTVSEEYKVAVEKCRRKLRGFIAEKNCAPLMLRLAWHSAGTYDVKTKTGGPFGTMRQKLEQSHAANNGLDVAVRLLEPFKEQFPIISYGDLYQLAGVVAVEITGGPDVPFHPGRPDKDEPPQEGRLPNATLGNDHLRNVFVKTMGLSDKDIVTLSGGHTLGRAHKERSGFEGPWTSNPLIFDNSYFKELLTGEKEGLLQLPTDKSLLEDPVFRPLVDKYACDEDAFFADYAESHMKLSELGFAEA

SEQ ID NO: 2392 - protein, 175 aa, Triticum aestivum
MAPAVMASSATTVAPFQGLKSTAGLPVSCRSGSTGLSSVSNGGRIRCMQVWPIEGIKKFETLSYLPPLSTEALLKQVDYLIRSKWVPCLEFSKVGFIFREHNASPGYYDGRYWTMWKLPMFGCTDATQVINEVEEVKKEYPDAYVRIIGFDNMRQVQCVSFIAFKPPGCEESGKA

SEQ ID NO: 2393 - protein, 123 aa, Dianthus caryophyllus
MITIHHPWVFAFGLLGNFISFMVFLAPLPTFIRVYKKKSTEGFQSFPYVVAIFSAMLWIYYALLKGNSLLLITVNVTGVIIETIYVIIFITYAPRQARISTMKLLLFMNFGGFCMIVPRPRPR

SEQ ID NO: 2394 - protein, 435 aa, Streptomyces coelicolor A3(2)
MTGRFEFMHQSSHPDRPTTPADDWSGANAAHLAAPARIAAAPASVTDEDVALVRASLTVVTPHVSELAAHFYSILFSRYPQVRDLFPAELDVQRERLVRALLRIVELVDDPDNLVAFCSRLGRGHRKFGTQSGHYPAVGECLLQALSHFAGPAWHPALATAWQRAYTAAADVMVRAAEEDARSRPAVWDAHIVGHVHRGHGIAEITVRPHQPYPFVAGQYVSIETPWAPRQWRQYSPANAPRPNSELTFHVRAVREGKVSNALVHHARPGDPVRLGPPEGDMVLRPTRQRDLLFVAGGTGLAPIRALIEEVAQGSISDAREVSLFIGARTANELYGLDDMLRMSQRYHWLRVRAAVSDERIPGLEGTLPEVLAEFGPWYRHEAYLCGPPQMLSGAVHALRRHGVPPRHIHYDPWDTPVLTAPLGPPPPDEEDDQL

SEQ ID NO: 2395 - protein, 130 aa, Pimpinella brachycarpa
GTRESKVFYLKMKGDYHRYMAEFKVGDERKNAAEDTMNSYKAAQDIALADLAPTHPIRLGLALNFSVFYYEILNSSDKACSMAKQAFEEAIAELDTLGEESYKDSTLIMQLLRDNLTLWTSDSQDQLDEP

SEQ ID NO: 2396 - protein, 106 aa, uncultured Rickettsia sp.
MLKEIGSSENIPKYIAKAKDKDDPFRLMGFGHRVYKNYDPRAAVLKETCSEVLKELGQLENNPLLQIAIELEAIALKDEYFIERKLYPNVDFYSGIIYKAMGIPSQ

SEQ ID NO: 2397 - protein, 149 aa, Rhodospirillum rubrum
MQVSEIYEVEGGSPGGFGGGGYDRGGYSGGFDRGGYNGGFDRGAADRGGYAGATDRGGYAGGAADRGGYAGGADRGGFQGETEIDGVVKFFSADKGFGFVVPDGGGKDVYVGSRTLQDCGVSVLEQGQRVRMSIRMGKKGPMAGSLELI

SEQ ID NO: 2398 - protein, 507 aa, Candida albicans SC5314
MLILLPIAVIAASIYYIAEYWKRESIKRKYDCQPVKQAPLVTWYDIFGIKALVDNSNLTKSGYFYQDIQRKLDNLDTTTMKTTALGKNQIITIEPENFRTMCSSADLNNWTIGTRPIALKPLLGNGIFSSEGESWKHSRIMLRPIFAKEHIKQITAMESYIQSLIKVIKLQQQGEGEFDLQHLFHCFTIDYATDFLFGESCDCLKSILGETSISTMSEEEKSKFAPNFDVMQYHMTKRLVFGYFSFLVNPPEFKNAVKHLHEFVFHFVDRAINFTDEELNDPSKNYVFLYQLAKQTKDRKVILDELLSVLLAGRNTTASLLSFMFFELAQNKPVWNKLKKEITEHFPDVESITFETIHNCEYLRWCIHESLRINPPVPINTRTANRDTVLPKGGGKGNNYPIFVRKGEQVIFPLFSSNRQERFFGPEPEKYIPERWANLPRNGGVAFGPFGTGPRLCLGQQLALVEASYVTIRLLQTFSQLDSNHTECRRSVGATMRLMDGCQVTLK

SEQ ID NO: 2399 - protein, 287 aa, Glycine max
MSQQVLRPLRQWPWFHHHHHRTCVTLSLHHLLTPPPKTSHRFSFATVAASSRPKVRTPKSPVPPPPTADSDLEEKKSRNQLKREARRTVKWGMDLASFSPPQIKRILRVASSDHLLLFEALMLVKRLGPDVREGRRRQFSYIGKLLREVDPELMERLIKATKDSNQKELQALTGLGPDDPEPEDDDDLVESESEEDEEESNWHDNQVARWFDGLISKDIEITNEIYSVQGVEFDRQELRKLVRRVHNTQEMKADNEEEKKKIETATNGAKKALNRFLRGLSKRIPNE

SEQ ID NO: 2400 - protein, 471 aa, Pyrococcus furiosus DSM 3638
MCLITGGINLTKEEIVKMIITGKHRGPDSFGVWSDGLVIKSEDFSEIKEIRGGNVVLAQCRLAMTGSKNYTQPFYNDIVLVHNGEIYNHESLRKWLIERGASFESDVDSEVILRLLEYFIFDKKMKVEEAVKKAMLMLRGDYAVAFALNGKIYLFRDPIGVRPLYYSPRGRFGSEKKVLWSVGEEAIPVNPGELVKLPEEEKMKLLSPWDIKGSGKGYYDGLKNLLQDAVRIRTAKKVGVLFSGGLDSSLIALLASKYSKVVLYTAGTEDSKDVEWARKVSDELRLELREYIFTREEVEREIKNVMFAIEEPNPMNLAIAIPLYFATKLARKDDVKVLLSGQGADELFGGYAKYLENPSLMRKDIEEIAERNLGRDDKVGMLNGVEVRYPYLDLPFVSLALRVPLEEKIREGVRKAILRRIALDFGLPEEVAFREKKAAQYGSNAQKILSKIAKKSLREFAQKLFSEVFST

SEQ ID NO: 2401 - protein, 525 aa, Zea mays
  misc_feature (110)..(110): Xaa can be any naturally occurring amino acid
  misc_feature (241)..(241): Xaa can be any naturally occurring amino acid
  misc_feature (245)..(245): Xaa can be any naturally occurring amino acid
  misc_feature (274)..(274): Xaa can be any naturally occurring amino acid
MKPPSLVHCFKLLVLLALARLTMHVPDEDMLSPLGALRLDGHFSFHDVSAMARDFGNQCSFLPAAVLHPGSVSDIAATVRHVFSLGEGSPLTVAARGHGHSLMGQSQAAXGIVVRMESLRGARLQVHDGGVSPPSVDAPGGELWINVLRETLKHGLAPKSWTDYLHLTVGGTLSNAGVSGQAFRHGPQVSNVNQLEIVTGRGDVVTCSPDDNADLFYAALGGLGQFGIITRARIALEPAPXMVRXWIRVLNRDEESFTEDQEMLIMAENSFDYXEGFVIKNRTGVLNTWRAFFKPQDPVEASHFQSDGRVLYCREPRGRPGSGDTDTMEQEVTVLLSRLRFIQSTLFHTDVTYLEFLDRVHTSELKLRAQGLWEVPHPWLNLLIPRSSIRRFAKEVFGRILKDSNNGPILLYPVNKSKWDNKTSVVIPDEEIFYLVGFLSSAPSLSGHGSIAHAMSLNSQIVEFCEEADIGMKQYLAHYTTQEQWKTHFGARWETFERRKHRYDPLAILAPGQRIFPKASLPLSL

SEQ ID NO: 2402 - protein, 384 aa, Rickettsia sp. Chad
DSEFAELKIRGKIFKLPILKASIGEDVIDISRVSAEADCFTYDPGFMSTASCQSTITYIDGDKGILRHRGYDIKDLAEKSDFLEVAYLLIYGELPSGEQYNNFTKQVAHHSLVNERLHYLFQTFCSSSHPMAIMLAAVGSLSAFYPDLLNFKEADYELTAIRMIAKIPTIAAMSYKYSIGQPFIYPDNSLDFTENFLHMMFATPCTKYTVNPIIKNALNKIFILHADHEQNASTSTVRIAGSSGANPFACISTGIASLWGPAHGGANEAVINMLKEIGSSEYIPKYIAKAKDKNDPFRLMGFGHRVYKNYDPRAAVLKETCKEVLKALGQLDNNPLLQIAIELEAIALKDEYFVERKLYPNVDFYSGIIYKAMGIPSQMFTVLL

SEQ ID NO: 2403 - protein, 177 aa, Magnetospirillum magnetotacticum MS-1
MVPRHRCLWGPAHGGANEAALKMLMEIGHPENVSKYVAKAKDKNDPFRLMGFGHRVYKNYDPRARIMQKTTHEVLNELGLKDDLLEVAVQLEKIALEDEYFIEKKLYPNIDFYSGITLKALGFPTSMFTVLFAVARTVGWIAQWAEMIEDPSQKIGRPRQLYVGPDRRDYVAIGQRS

SEQ ID NO: 2404 - protein, 416 aa, Claviceps purpurea
MTDIPGRRAFKCFNQEFVVDERYTVTKELGQGAYGIVCAAVNNQTKESVAVKKVTNVFSKKILAKRALREIKLLQHFRGHRNITCLYDMDIPRPDVFNETYLYEELMECDLAAIIRSGQPLTDAHFQSFIYQILSGLKYIHSANVLHRDLKPGNLLVNADCELKICDFGLARGFSADPEQNAGYMTEYVATRWYRAPEIMLSFQSYTKAIDVWSVGCILAELLGSRPFFKGRDYVDQLNQILHVLGTPNEETLSRIGSPRAQEYVRNLPVMPKKNFATLFPQANPHALDLLDKMLAFDPSSRISVEQALEHPYLQVWHDPADEPNCPTIFNFDFEVLDDVGEMRKVILDEVIRFRQMVRTASSAEPTTGQAQTAAAGQVPMPQAGGQWKAEDPRPQENTPQGNGLEQDLQAGLDAA

SEQ ID NO: 2405 - protein, 112 aa, Bartonella sp. St2936co
GPAHGGANEACLKMLQEIGSVKRIPEFIARAKDKNDPFRLMGFGHRVYKNYDPRAKIMQQTCHEVLKELNIQDDPLLDIAIELENIALNDEYFVEKRLYPNVDFYSGITLKA

SEQ ID NO: 2406 - protein, 317 aa, Burkholderia fungorum LB400
MEPELKALIEQLSQAGRRPFWQCTVDDARNAPTLVKRLFPDAPSVERTQDIRISSTRGHAFPARLYVPRDRPCGLIVYLHGGGWVVGSVDDYHPLTATITARSGFAVLSVDYRLAPEHAFPIPLEDARAALEWASSGSAAVAIGADVNCLIVMGDSAGANLATVAARLHNEKNIDRRVDGQVLVYPVTGHDFKTASYDEFAEGNLLTRNDMQWFWDHYCPERAARANPLASPLEAEDLSMSPPALVMTAGRDPLRDEGEAYGARLRKAGVDVAVVRCDGLVHGFLAMIHQVPGAARAFDRIVDYITRLGEAVPEARR

SEQ ID NO: 2407 - protein, 124 aa, Glycine max
MSSEAETQQPPAAPPVAPALSAADTKPGTTGSGAGSGGPGGLTSAAPAGGDKKVIATKVLGTVKWFNVRNGYGFINRNDTKEDVFVHQTAIKKNNPRKYLRSVGDGETVEFDVVEGEKGAEAAN

SEQ ID NO: 2408 - protein, 484 aa, Agrobacterium tumefaciens
MIKLKNAALLRDACLVNGRWLKAADGKTIAVENPANSMIIGHVPSLSADEVEAAVESANKAFSEWSRRAAKDRAAILRRWFDLMVANADDLGALMTAEQGKPFAEARGEALYAASFVEWFAEEAKRVYGDTIPSPTTDKRITILKQPIGVCAAITPWNFPAAMITRKAAPALAAGCTMIVKPAEQTPLTALALGVLAEEAGVPAGVFQVVTGAARDIGKVFTESDTVRKISFTGSTEVGRLLMAQSAPTIKKLSLELGGNAPFIVFDDADLDAAVEGAIVSKYRNAGQTCVCSNRIYVQDGVYDAFAEKLVKRVESLSVGEGTEPGVLIGPLIDQDAVAKVEDHVADALGKGAKIVTGGKRHALGGTFYEPTVLTGATQAMKVAREETFGPVAPLFRFGTEDEAVAMANDTEFGLAAYFYTENVRRTWRVAEALEYGMVGHNTGLISNEVAPFGGVKQSGLGREGSHYGIDEYLEIKYLCSAIG

SEQ ID NO: 2409 - protein, 373 aa, Sulfolobus tokodaii str. 7
MEIKKGLEDVYVKETEITYIDGELGRLYYRGYSIYDLAEFSNFEEVSYLILYGKLPNREELNWFQEKLREERYLPDFIIKFLREVRKDAQPMDILRTAVSLLGIEDSKNDERTDIKGIKLISKFPTIVANYARLRKGLDIIEPDPKLSHSENFLYMLYGDRPNEIKSKAMDVTLILHIDHEMNASTFASLVVASTFSDLYSSIVAGISALKGPLHGGANYEALKMFKEIGSPEKVNDYILNRLSNKQRIMGFGHRVYKTYDPRARILKQYAKLLAEKEGGEIYTLYQIAEKVEEIGIKYLGPKGIYPNVDFFSSIVFYSLGFEPDFFPAVFASARVVGWVAHIMEYIKDNKIIRPKAYYKGEIGKKYIPIDSR

SEQ ID NO: 2410 - protein, 312 aa, Triticum aestivum
  misc_feature (80)..(80): Xaa can be any naturally occurring amino acid
ISKDRKATSRRSNPSGRRRGEGASRLACGRVGLSARHAAPMPPPRRAAGDTSAFFVATLVLWAVSVGFEIGARGRRELAXPVAAGCAFFQAANTAAVSRDPLFVNTAVSLLHSSLTSASVIFVLLCQWRTKGLENMFQHEELVGSSWIGAYSALCFSCGYFAYDQLDMLRYRLYSGWIPGILMHHLILLICFTLALYRNVTINYLILTLLCEMHSIFLHVRKLRRMAGFRDFNRKLVKLEWVLNWTTFVTARVICHILITYRLITDAHKFDKGIELPLALSGMAGMNVLNVSLGLDLFKAFARERNQQTHQD

SEQ ID NO: 2411 - protein, 322 aa, Pediococcus pentosaceus ATCC 25745
MKRIGIMTSGGDAPGMNLAIRAVARKALSSGLEAYGINYGFAGLVAGDIHEFKAADLDDMVSQGGTMLYSARYPEFAQEESQLKGIEQLKKFGIDALVVIGGDGSYHGALRLTEHGYNTIGLPGTIDNDIPFTDFTIGFDTALNTAVDAIDKIRDTAKSHQRVFAVQVMGRNAADIALWAGVASGADAVIAPGFDYDVEAIANKLKKNRANGKDYGIIVIAEGDANSDAAPEFIDQLKQYGDFDARATVIGHVQRGGVPSAKDRVLASKMGAYAVELLLEGKGGLAVGILENKVQAHNMLDLFDAKHQADDSLYQLSEDLSF

SEQ ID NO: 2412 - protein, 294 aa, Schizosaccharomyces pombe
MPFIKAVKSSPYFSRYQTKYRRRREGKTDYYARKRLIAQAKNKYNAPKYRLVVRFSNRFVTCQIVSSRVNGDYVLAHAHSSELPRYGIKWGLANWTAAYATGLLVARRALAKVGLADKYEGVTEPEGEFELTEAIEDGPRPFKVFLDVGLKRTSTGSRVFGAMKGASDGGLFIPHSPNRFPGFDIETEELDDETLRKYIYGGHVAEYMEMLIDDDEERYQKQFSGLIADGIESDQLEDIYAEAYAKIREDPSFQKSGKDAAAFKAESLKHTQRKLTAEERKERFNAKVIEAGRA

SEQ ID NO: 2413 - protein, 342 aa, Pyrobaculum aerophilum str. IM2
MRIFKTPGPIKYINCLLTAAMYFPGLEGVVVKETKICHIDLENSKIYYRGYDLEELAQYSTFEEVAYLLWFGKLPAGAELERFKAELMMYRKPPEHVDEAVKIAPKNAEPIDVLRTAVSAMALGEDLSDRSPEAELVRGLKITAAMPYIVASFDRLRRGSQPLHPGEAKSHAEYFLWALRGERPGEREVRALDVMLIIYAEHSMNNSAFTAVTVASTLSDMYAAITAAIASLKGPLHGGANVDAAKMLEEIGDAKRVESWVDQQLSRGRRIPGFGHRLYKKGPDPRLRVLRKLARDLASEKGDFKWVELAERLEEYVTAHLSQKGIYPNTDLYAAVIFKYLG

SEQ ID NO: 2414 - protein, 203 aa, Triticum aestivum
  misc_feature (120)..(120): Xaa can be any naturally occurring amino acid
  misc_feature (153)..(153): Xaa can be any naturally occurring amino acid
MFIKRTSSTRRHTPPHLPPDSGGSSEMSDTDEHHFESKADSGASKTYPQQAGAIRKGGHIVIKARPCKVVEVSTSKTGKHGHAKCHFVAIDIFNGKKLEDIVPSSHNCDVPHVDRQDYQXLIDITDDGYVSLLTESGNTKDDLKLPTDDVLLXKIKTGFADGKDLDPVCGCPPWVKEQICAVEGNGGGKLAAVRGLLPAILGI

SEQ ID NO: 2415 - protein, 386 aa, Aspergillus flavus
MTGLDMEIIFAKIKEEYARTDDVGKRKIQGHIRELQVGFYSDWDVVMRLSSGPLQVALAKVGIDLGIFRSLKKSDTPITLAEFVKKTGASPRLLGRILRTQAAFGLIKETGPQEYTSSAFTDVFANPAAAGAVVQLFDISGPCTQILPDFLAERHYQDITSNKDCVFQKAFDSDLTMFEWMPQHPKHMESLGHLMALERPVSWVDHFPVLEELGDFPAPDKVLMVDIGGGFGQQSKALRAKFPNIPGRVIVQDIPQTLANAQPAAGVEFMEHNFFEPQPIRNAKFYYLRHVFHDWPDEQCVLILKQIIPVMGPESQILIDEMVIPSTGVPWQAAFTDLLMMNSLGGVERTRAEWDDLMKQAGLEIIQSKVYDSKEQTILVAVPRRT

SEQ ID NO: 2416 - protein, 428 aa, Bacillus thuringiensis serovar konkukian str. 97-27
MNYLFKNGRYMNEEGKIVATDLLVQDGKIAKVAENITADNAEVIDVNGKLIAPGLVDVHVHLREPGGEHKETIETGTLAAAKGGFTTICAMPNTRPVPDCREHMEDLQNRIKEKAHVNVLPYGAITVRQAGSEMTDFETLKELGAFAFTDDGVGVQDASMMLAAMKRAAKLNMAVVAHCEENTLINKGCVHEGKFSEKHGLNGIPSVCESVHIARDILLAEAADCHYHVCHVSTKGSVRVIRDAKRAGIKVTAEVTPHHLVLCEDDIPSADPNFKMNPPLRGKEDHAALIEGLLDGTIDMIATDHAPHTAEEKAQGIERAPFGITGFETAFPLLYTNLVKKGIITLEQLIQFLTEKPADTFGLEAGRLKEGRTADITIIDLEQEEEIDPTTFLSKGKNTPFVGWKCQGWPVMTIVGGKIAWQKESALV

SEQ ID NO: 2417 - protein, 506 aa, Ralstonia solanacearum
MRYAHPGTPGAVVSFQSRYGNYIGGRFVPPVKGQYFTNTTPVTGEAIAEFPRSTAEDIDRALDAAHAAADAWGRTSAQDRSLILLKIADRIEQNLERLAVTETWDNGKPIRETLNADIPLAADHFRYFAGCIRAQEGAAAEINEHTVAYHIHEPLGVVGQIIPWNFPLLMAAWKLAPALAAGNCIVLKPAEQTPLGICVLLELIGDLLPPGVLNVVHGFGKEAGEALATSKRIAKIAFTGSTPVGSHILKCAAENIIPSTVELGGKSPNIYFEDIMQAESSFIEKAAEGLVLGFFNQGEVCTCPSRALVQESIYGSFMDAVMAKVAAIKRGDPLDTETMVGAQASEQQFNKIRTYLEIAREEGAECLAGGEAEAMSGKLANGYYIKPTLLKGHNNMRVFQEEIFGPVIAVTTFQDEAQAIQIANDTEYGLGAGVWTRDINRAYRVGRAIKAGRVWTNCYHLYPAHAAFGGYKKSGVGRETHKMMLDHYQQTKNLLVSYDTRPLGFF

SEQ ID NO: 2418 - protein, 319 aa, Burkholderia cepacia R18194
MGGLTVRVAAKREEAVGICSFELVSTDGQPMPAFSAGSHIDVAVPGGPTRQYSLCNAPEEGHRYQISILRDPNSRGGSAGMHDRVQVGDALAISVPKNNFPLAHDATRSLLMAGGIGVTPILCMAERLAAIGAPFEMHYCSRSRARTAFLDRISRATYARHVQFHFDDQPDTPAFDIAARLARPESGTHLYVCGPTGFMDAVLGAARAAGWPEAQLHYEFFAAGERVAADSDRFEVEVASSGQVVTVEEDESIVQALARVGIEIETSCEQGVCRTCETRVLAGEPDHRDVCLTPAERADNDRLMPCCSRSKSARLVLDL

SEQ ID NO: 2419 - protein, 104 aa, uncultured Rickettsia sp.
MLKEIGSSEYIPRYIAKAKDKNDPFRLMGFGHRVYKNYDPRAAVLKETCKEVLKELGQLDNNPLLQIAIELEAIALKDEYFIERKLYPNVDFYSGIIYKAMGIP

SEQ ID NO: 2420 - protein, 459 aa, Mesorhizobium loti MAFF303099
MTYQNYSLKQLQQIDAAHHLHPFTDHKELREAGSRIITHANGPFIYDSEGTELLDGMAGLWCVNIGYGRDELAEAAYAQMKELPYYNSFFKCSTPTPVLLSKKLAEIAPKNVNQVFYGSSGSEANDTALRLVRHYWVIEGKPEKNRVISRKMAYHGSTIAGTSLGGMDAMHKQLNGAVPNIVHVMMPYAYELALPGESDHDFGLRAAKSVEDAILEAGVDKVAAFIGEPVMGAGGVKIPPASYWPEVQRICRKYDVLLMLDEVITGYGRTGEWFAAQTFGIEPDTITTAKALTSGYQPLSALLVGDRITSTLVEKGGEFNHGYTYSGHPVACAVALKNLEIIEQEGLVDRVRNDTGPYFAKALQECIAGHDLVGEVRSIGLMGAIEIVKDKATKERFLPSGSAAVTVRDHAIANGMMLRATGDTMILSPPLIWTRDTIDMACERIGKALDLAQADLRKR

SEQ ID NO: 2421 - protein, 418 aa, Solanum tuberosum subsp. andigena
MVRNRREELYVTVPSLFRCPISMDVMKSPVSLCTGVTYDRSSIQTWLSQGHNTCPATMQILPSTDFIPNLTLRRLINVWIQHQPSSSPGYTTPSSSSVTKSEVVEIVKNLNGEVDRLSSLAKIVEFVKCSGENRRFFVNSSDAIVSVVGVLVDCDVGEVCEAVVAVLDLVVSENGVKEQLNKEILKSDRKFLPKFLLILRKGKLSSRIQTARILEFIALDADSQRKMIEEQGLLYELHVFTSTETNRFAIEAGLSTLIAVSTTRPAKKELVRFGIVQTIGKILSGSETARAVVEKSLKLLETVATCTEGRAAIVKGEECMSAIVTRLMKSSKAATEHGVTVLWSVCCLFRDTAARDVVGKANGLTKVLLVMQSDCSAAVRQMCGELVKALRVVNNKHKNYSKSCLASYDTKTTHIMPY

SEQ ID NO: 2422 - protein, 260 aa, Oryza sativa (japonica cultivar-group)
MTAANLDSEMGLIGEMMVQYPYVTIDVEFAGVVHHPPYTGSRPTPDEIYAALKSNVDEVPAVQIGITLSDAEGNLPTRSSSSPEQEIAWEVVFSDFDAGRDPHVVDSVEFLKNQGIDFDLARQIGVTSTAFGEKLLAILPPPSRRGELTWSAFGGAYDMGYLLKMLTGGQPLPETRQQFMQLVKSRLGGGRIFDSKYLVEHDRQDLRNAGLRHTADVLGVRQQEGVKMLAGHKSVVAAAIFATIRSQGVHLLHGVIDGIL

SEQ ID NO: 2423 - protein, 139 aa, Triticum aestivum
  misc_feature (57)..(57): Xaa can be any naturally occurring amino acid
  misc_feature (70)..(70): Xaa can be any naturally occurring amino acid
  misc_feature (72)..(72): Xaa can be any naturally occurring amino acid
  misc_feature (90)..(90): Xaa can be any naturally occurring amino acid
  misc_feature (92)..(92): Xaa can be any naturally occurring amino acid
  misc_feature (96)..(96): Xaa can be any naturally occurring amino acid
  misc_feature (103)..(103): Xaa can be any naturally occurring amino acid
  misc_feature (107)..(107): Xaa can be any naturally occurring amino acid
  misc_feature (109)..(109): Xaa can be any naturally occurring amino acid
  misc_feature (116)..(116): Xaa can be any naturally occurring amino acid
MAPTVMASSATSVAPFQGLKSTAGLPVSRRSNGASLGSVSNGGRIRCMQVWPIEGIXKFETLSYLPPLSXEXLLKQVDYLIRSKWVPCLXFXKVGXQPSVEQXASPXVXRMARYWXMLGSPNVSGWRNAQHKGSTGDGG

SEQ ID NO: 2424 - protein, 136 aa, Glycine max
  misc_feature (121)..(121): Xaa can be any naturally occurring amino acid
ASSLISSPAATTVNRAGAGLVAPFTGLKSMAGFPTRKTNNDITSIASNGGRVRCMQVWPPIGKKKFETLSYLPYLDDAQLAKEVEYRVKKRLMPYLEFEVKHDCVYREHNRSPRCYNRLYXTMIKLAMFSCTEACQ

SEQ ID NO: 2425 - protein, 112 aa, Brassica napus
SQHHSWTNKKIMDTTRDNRKDMSFRGSAQAPMMSKQEYIRTSSQSSKPRKLVTASYFSLESVVVLVGLTASLLILPLILPPLPPPPFMLLLIPIGDYGSWLMGLGFLWPSFF

SEQ ID NO: 2426 - protein, 506 aa, Bacillus halodurans C-125
MVYKRPNEEGAVVSFKKRYDNYVNGEWTPPVKGQYFENVTPVTGEVFCEVARSTAEDIDLALDAAHAAKEQWGKTSPAERANLLNKIADRMEENLEKLAVAETWENGKPVRETLNADIPLAIDHFRYFAGAIRAQEGTLSQIDNDTVAYHFHEPLGVVGQIIPWNFPILMATWKLAPALAAGNCVILKPAEQTPASIFVLLELIEDLLPKGVVNIVNGFGVEAGKPLASSSRVAKVAFTGETTTGRLIMQYASENLIPVTLELGGKSPNIFFDDVMAKDDAFLNKAIEGFVLFALNQGEVCTCPSRALIQESIYDTFMERALARVQAIKQGNPLDPNTMIGAQASQEQLEKILSYLAIGKEEGAEVLAGGERNHLPGELANGYYVSPTVFKGTNDMRVFQEEIFGPVVSVTTFKDAEEALAIANDTLYGLGAGVWTRDMNKAYRFGREIQAGRVWTNCYHAYPAHAAFGGYKKSGIGRETHLMMLSHYQQTKNLLVSYSEDALGFF

SEQ ID NO: 2427 - protein, 453 aa, Oryza sativa (japonica cultivar-group)
MGGEEGMAAGRKKRVGRYEVGRTIGQGTFAKVKFAVDADTGAAVAMKVLDKDTILNHRMLHQIKREISIMKIVRHPNIVRLNEVLAGKTKIYIILELITGGELFDKIARQGKLRENEARKYFQQLIDAINYCHSKGVYHRDLKPENLLLDSRGNLKVSDFGLSTLAQKGVGLLHTTCGTPNYVAPEVLSNNGYDGSAADVWSCGVILYVLMAGYLPFEEDDLPTLYDKITAGQFSCPYWFSPGATSLIHRILDPNPKTRITIEQIREDTWFKKTYVAIKRGEDENVDLDDVQAVFDNIEDKYVSEQVTHNDGGPLVMNAFEMITLSQGLDLSALFDRQQEFVKRQTRFVSRKPAKTIVATIEVVAETMGLKVHSQNYKLRLEGVSSNRMSPFAVVLQVFEVAPSLFMVDVRKVAGDTLEYHRFYKNLCNKMESIIWRPIEVSAKSALLRTATC

SEQ ID NO: 2428 - protein, 1166 aa, Capsella rubella
MKQKWLFVLILCFFTALGIHGKRLINSDFDETALLMAFKQFSVKSDPNNVLGNWIYESGRGSCSWRGVSCSDDGRIVGLDLRNGGVTGTLNLANLTALPNLQNLYLQGNYFSSSSGGDSSSGSYCYLQVLDLSSNLISDYSLVDYVFSKCSNLVSVNFSNNKLVGKLGFAPSSLKSLTTVDFSYNILSEKIPESFISEFPASLKYLDLTHNNFSGDFSDLSFGMCGNLSFFSLSQNNISGVKFPISLPNCRFLETLNISRNNLAGKIPGGEYWGSFQNLKQLSLAHNRFSGEIPPELSLLCKTLETLDLSGNALSGELPSQFTACVWLQNLNIGNNYLSGDFLSTVVSKITRITYLYVAFNNISGSVPISLTNCTNLRVLDLSSNGFTGNVPSGLCSQQSSPVLEKLLIANNYLSGTVPVELGKCKSLKTIDLSFNELTGPIPKDVWMLPNLSDLVMWANNLTGSIPEGVCVKGGKLETIILNNNLLTGSIPQSISRCTNMIWISLSSNRLTGKIPTGIGNLSKLAILQLGNNSLSGNVPRQLGNCKSLIWLDLNSNNLTGDLPGELASQAGLVMPGSVSGKQFAFVRNEGGTDCRGAGGLVEFEGIRAERLERFPMVHSCPATRIYSGMTMYTFSANGSMIYFDISYNAVSGLIPPGYGNMGYLQVLNLGHNRITGNIPDSLGGLKAIGVLDLSHNDLQGYLPGSLGSLSFLSDLDVSNNNLTGPIPFGGQLTTFPVSRYANNSGLCGVPLRPCGSAPRRPITSSVHAKKQTLATAVIAGIAFSFMCLVMLFMALYRVRKVQKKELKREKYIESLPTSGSCSWKLSSVPEPLSINVATFEKPLRKLTFAHLLEATNGFSAETMVGSGGFGEVYKAQLRDGSVVAIKKLIRITGQGDREFMAEMETIGKIKHRNLVPLLGYCKVGEERLLVYEYMKWGSLETVLHEKSSKKGGIFLNWTARKKIAIGAARGLAFLHHSCIPHIIHRDMKSSNVLLDEDFEARVSDFGMARLVSALDTHLSVSTLAGTPGYVPPEYYQSFRCTAKGDVYSYGVILLELLSGKKPIDPGEFGEDNNLVGWAKQLYREKSGTEILDPELVTEKSGDAELFHYLKIASQCLDDRPFKRPTMIQVMAMFKELKADTEEDESLDEFSLKETPLVEESRDKEP

SEQ ID NO: 2429 - protein, 415 aa, Arabidopsis thaliana
MSPAIKAPLLPNQEPSSSSSENHGSFAGAVFNISTSIVGAGIMAIPAAFKVLAGFLMKSSLAGESTTYAGVMKESFGKSGAVAVTVVTMVVTFGSMIIFSIIIGDVISGNEKDGIIHLGLLQEWFGSHWWNTRFFERLAFSSAISFLLALLFVVISSVLAIIALVQGKTKPPRLFPELNDGGLSFFSLFTASPVIVTAFTFHFNGKKPRTKNFMVIAVHPVAFELKDPLNVLSATRISVILCATIYSATGLFCYLLFGDSTMTDVLMNFDQSTSSSVGSLLNDIVRLSYAIHLMLVFPLLNFSLRANLDELLFPMKLSLVEDNKRFFALTFPLLISCFLGAIAIPDIWYFFQFLGSTSTVSIAFIFPAAIVLRNVNGFSTLREKIVASVMLVLAVATSIIAISTNIYTFTATEET

SEQ ID NO: 2430 - protein, 165 aa, Triticum aestivum
MAQESLRLVCPPVSAHEGRLPRQYTLEGQGAKKDISPPLEWYGVPDGTRSLAVVVQDVDADERVPWTHWVVVNISPEEKGLPEGFSGAGGNANAGGGDGGVQEGVNDWKQPGWRGPVPDSHGHRIQFRLYALDDLLSLGNKVTVDKVMEAIEGHVLGEAEITAVF

SEQ ID NO: 2431 - protein, 322 aa, Ustilago maydis 521
MSKVTASGIISGNISTQRIKLNNGQEIPQVALGVYKAPNDGSTENACKWAFDAGYRHIDSAARYMNEESVGRALAEWTKENNVPRSEIFITSKLWDADHDKAAAAIEDSLKKLNVDYMDMYLMHSPGTMGAEKRLEAWKALEEAVDAGKIKTIGVSNFDVEELDHLLANCRIKPAVNQIESHPFFAHEELREACISRGIHIQAYSPMAQGQALDRPEIKTIASKHGKTPAQILLKWGLTHGNIILPKSLTKHRIESNAQLFDFELDSDDMDVLDNLDEGMKVGKLGPAGTSQPASPGGTRPGSRRSSGSGGLSGNKLQMSSS

SEQ ID NO: 2432 - protein, 487 aa, Oryza sativa (japonica cultivar-group)
MDPNSLKTGGLLLPTIERQCASPPSVIVIGGGISGVAAARALSNASFEVTVLESRDRVGGRVHTDYSFGCPIDMGASWLHGVCNENSLAPLIGYLGLKLYRTSGDNSVLYDHDLESYALFDKAGHQVSKETVAKVEETFERILDETVKVRDEQEHDMPLLQAISLVLERHPHLKLQGIDDQVLQWCVCRLEAWFAADADEISLKNWDQEHVLTGGHGLMVNGYYPIIQALAQGLDIRLNQRVTKIARQFNGVTVTTEDGTSYSADACIITVPLGVLKANIIKFEPELPSWKSSAIADLGVGIENKIAMHFDTVFWPNVEVLGMVGPTPKACGYFLNLHKATGNPVLVYMAAGRFAQEVEKLSDKEAVDLVMSHLKKMLPDATEPTKYLVSRWGSDPNSLGSYSCDLVGKPADVSARFAAPVENLYFAGEAASADHSGSVHGAYSSGIAAADECRKRILMQKGIPDLVQVKAYEEMAGVIAPLQICRT

SEQ ID NO: 2433 - protein, 309 aa, Brassica napus
  misc_feature (253)..(253): Xaa can be any naturally occurring amino acid
  misc_feature (261)..(261): Xaa can be any naturally occurring amino acid
MDLDSMDCASTIDVTDDEEIHQDRHSYASVSKHHSNNSNANAASGLLPTTTSVHELLECPVCTNSMYPPIHQCHNGHTLCSLVKNRVHNRCPTCRQELGDIRCLALEKVAESLELPCKYMSLGCPEIFPYYSKLKHETVCNFRPYNCPYAGSECSVMGDIPFLVAHLRDDHKVDMHSGCTFNHRYVKSNPREVENATWMLTVFHCFGQYFCLHFEAFQLGMAPVYMAFLRFMGDETEAWNYNYSLEAGGFCRXLIWEGTPXSVRDSHRKVRDSHDGLIIQRNMALFFSGGDRKELKLLFTGGIWKELFL

SEQ ID NO: 2434 - protein, 318 aa, Pachysolen tannophilus
MTLQYYTLNNGRKIPAIGMGCWKLENAADMVYAAIKEGYRLFDCACDYGNEKEVGEGINRAIKDGLVKRKDLFITSKLWNNFHAKENVKKALMKSLSDFNLDYFDLYLMHFPISFKFVPFEEKYPPGFYCGDGDKFIYEDVPIIETWRAMENLVDEGLVKSIGVSNVSGGLLEDLIKAARIKPASLQIEHHPYLQQNKLVEYAQLKGIVVTGYSNFGPLSFLELGNETAKKTQPLYENKTITTIAAKHGKTPFQVLLRWVNQRGIAIIPKSTFPNTLAVNLHVDEFDLTKEDFEEIAKLDRHLRFNDPWTWDKIPTFV

SEQ ID NO: 2435 - protein, 337 aa, Bartonella schoenbuchensis
STASCESKITYIDGDEGVLLYHGYSIDQLAENGDFLEVCYLLLYGELPTKQEKDDFDRRIMHHTMVHEQFSRFFHGFRRDSHPMAVMVACLGAMSAFYHDSIDITDAKQRMIASIRLIAKVPTLAAMAYKYSIGQPFVYPRNDLGYAANFLHMCFSVPCEEYKVNPVLARAMDRIFTLHADHEQNASTSTVRLAGSSGANPFACIAAGVACLWGPAHGGANEACLKMLQEIGSIEKIPEFIARAKDKNDPFRLMGFGHRVYKNYDPRAKLMQKTCHEVLKELNIKDDPLLDIAMELEKIALSDEYFIEKKLYPNVDFYSGITLKALGFPTEMFTVLL

SEQ ID NO: 2436 - protein, 280 aa, Streptococcus agalactiae 2603V/R
METYTLSNTLNIPKIGFGTWQLTEGEEAYKAVTHALKVGYTHIDTAQIYGNEHSVGRAIRDSGLARESIFLTTKIWNDKHDYHLAKASIDESLQKLGVDYIDLLLIHWPNPKALRENDAWKAGNAGTWKAMEEAYKEGKVKAIGVSNFMKHHLEALFETAEIKPMVNQIILAPGCAQEDLVRFCKGNDILLEAYSPFGTGAIFENESIKAIAEKYGKSVAQVALRWSLDNGFLPLPKSATPKNIEANLDIFDFQLNEDDIATLIQLDSGIKPKDPDNVSF

SEQ ID NO: 2437 - protein, 295 aa, Oryza sativa (japonica cultivar-group)
MSATQPVSEVLIRRVTADNLAVEMLTIRSHLPYFPYITIHADYPVDNAAARHGRRRRRRRGGGRGNKRESEADERCYRLAKSRVDELDVLQLGITLCDHHGRLPATAIACPGGAAVAVEMAWQVGFSDFDVSQSAVDALRAAGVDLEHLRARGVPAAVFGQALRVFDIVSAANLGRLTWVAFGGLYDFGFLLKMLDGGRPLPETAEGFASRLRGHLGVVYDAKYVAARLPMDGVELRGGLVRVARVLGAPAAAVEEPRQAGEKSLVASQVFIRMTGLFFAYHDVAVHAGKIDGLE

SEQ ID NO: 2438 - protein, 503 aa, Schizosaccharomyces pombe
MSTKLVDHVEITVPTGKTYIQPVGLFINNQHVDSVHGGRVKVYSPSTEKLICEVADADEEDVDIAVKVARAAFQTDAPWRKFSSAQRGRCLSRLADCIEQNLEYLASIETLDNGKSITLARGDVQAAADCFRYYGGWADKDYGQTIETDIKRFAYTRHEPIGVCGQIIPWNFPFLMCAWKIAPAVACGNTIILKTAELTPLSALCLTKFVPECGFPPGVINVLSGDGRRCGNAISSHMDIDKVAFTGSTGVGRMVMRAAASSNLKKVTLELGGKSPNIVFNDADLDSAAVWTNYGIFYNSGQVCCAGSRVYVQEDVYDEFIKRMVAKAKTLKVGDPFAEDTFQGAQVSKQQYERIVSYIESGIAHGAKLEIGGKRHGNLGYFVEPTILSNVTEDMAVGKEEIFGPVLAVIKFKTIEEAIRRGNNSTYGLAAGVHTNNITNAIKVSNALEAGTVWVNCYNLLHHQIPFGGYKESGIGRELGSYGLTNYTQTKAVHINLGMDSPI

SEQ ID NO: 2439 - protein, 368 aa, Malus x domestica
MGKGGQSCNGMVRQAKPVEQENMAAWLVDVNTIKILPFKLPSIGPNDVRIRIKAVGICGSDVHYLKTMKCADFEVKEPMVIGHECAGIVDKVGSEVKHLVPGDRVAVEPGISCARCQQCKGGRYNLCPDMKFFATPPVHGSLANQIVHPADLCFKLPENVSLEEGAMCEPLSVGVHACRRANVGPETTVLIIGAGPIGLVSVLTARAFGAPRIVIVDMDDKRLAMAKSLGADEAVKVSTKMEDLDDEVAEIKKAMISEVDVTFDCVGFNKTMSTGLNATRPGGKVCLVGMGHGVMTVPLTPAAAREVDVVGVFRYQNTWPLCLEFLRSGKIDVKPLITHRFGFTEKEVEEAFATSARGGNAIKVMFKL

SEQ ID NO: 2440 - protein, 305 aa, Streptomyces griseus
MATQALGTALRLGVFDRIGTGELRAEALAGSLGTHPRATLRLLRALAGLQLLSEPEPGAFRTTAAGNVLRADAPGTMVAMARMFTDPVMLRGWDLLDESVRTGETTFDTVFGTDFFGHLREHPELSAAFNEAMSQGTRLTAETVPHHYDFGRFQRLVDIGGGDGTLLASILRAHQEPRGVLFDTAEGLAQAPRRLAREGLDGRVTLETGDFFASAPAGGDLYLLNSIIHDWDDAVRGHLRHIRDVIPDHGSLLIVEPVLPATVPADRPDNVYLSDLNMLVNVGGRERTADDFAALCTAGGFACGA

SEQ ID NO: 2441 - protein, 441 aa, Streptomyces netropsis
MSHSVTLPSTKDIIELERRHRLPGGQSMTDLAGIVVDRAVNAEVWDRDGKRYIDFFTGVGVSNIGHSHPAFLEELTTQLSRCAVGTFYTDVRSRYFALLAAQLPEQLGEIHMFSTGSEAVEAAVKLARAATGKHEIVSFWGGFHGKTQGALSLHGGPRKHRSGPFPPGSHQVPYADCHHCPLQLEHPECGQRCVDLAEQSIENGSVGDLAAVIVEPVQGTNGNIIPPEGYLRTLRQLADRHGALLILDEVITGFGRTGALFAFEHDPGIAPDVVVLGKAMASGVPASAIVSRSGLVEGTSFAVPSAAASTFGGNPLASAASLATLRVLLDERLPERSHELGKSVSDRLSAWREEFPFVGNADNIGLMIGVELVDPATRLPLPKGITRRLFQELMARGVLAMAYDSRIRLYPPLSIPTHHLEEGLAAFEGAFRAMAPAISRL

SEQ ID NO: 2442 - protein, 342 aa, Bartonella schoenbuchensis
DPGFTSTASCESKITYIDGDEGVLLYHGYSIDQLAENGDFLEVCYLLLYGELPTKQEKDDFDRRIMHHTMVHEQFSRFFHGFRRDSHPMAVMVACLGAMSAFYHDSIDITDAKQRMIASIRLIAKVPTLAAMAYKYSIGQPFVYPRNDLSYAANFLHMCFSVPCEEYKVNPVLARAMDRIFTLHADHEQNASTSTVRLAGSSGANPFACIAAGVACLWGPAHGGANEACLKMLQEIGSIEKIPEFIARAKDKNDPFRLMGFGHRVYKNYDPRAKLMQKTCHEVLKELNIKDDPLLDIAMELEKIALSDEYFIEKKLYPNVDFYSGITLKALGFPTEMFTVLL

SEQ ID NO: 2443 - protein, 502 aa, Burkholderia cepacia R18194
MLVDELHSRKNEVIDPSALRARLRDGALLETRAWLASGWQEGTDGRSFPVTNPATGDILARVASLGAAEVEQAIESSALAQQGWQKRTSHERAKLLRAWFDLILANADDLALIMTSEQGKPLAEARGEITYAASFVEWFAEEAKRVYGDVMPHPQGDKRILVIRQPIGVCAAITPWNFPAAMITRKVAPALAAGCSIIVRPADLTPLTALALAVLAERAGIPAGVLQVVCGPSREIGAVLTASPVVRKLSFTGSTEVGRVLMSQSSGTIKRLSLELGGNAPFIVFDDADLDAAIEGAMASKYRNSGQTCVCANRFLVQAGIHDRFVEALTRRVQALKVGNGIEPGVQQGPLIQKSACDHLNQLIDDAVSKGARIVTGGKGHPLGGTFFEPTVIADATPAMRLAREELFGPVGPVFRFDDEAEAIAMANDTEYGLAAYLYTRDNSRIWRVGEALEYGMVGLNTGVISNEVAPFGGVKQSGLGREGSRYGIEEYLEIKYMCSQV

SEQ ID NO: 2444 - protein, 341 aa, Bartonella schoenbuchensis
DPGFTSTASCESKITYIDGDEGVLLYHGYSIDQLAENGDFLEVCYLLLYGELPTKQEKDDFDRRIMHHTMVHEQFSRFFHGFRRDSHPMAVMVACLGAMSAFYHDSIDITDAKQRMIASIRLIAKVPTLAAMAYKYSIGQPFVYPRNDLSYAANFLHMCFSVPCEEYKVNPVLARAMDRIFTLHADHEQNASTSTVRLAGSSGANPFACIAAGVACLWGPAHGGANEACLKMLQEIGSIEKIPEFIARAKDKNDPFRLMGFGHRVYKNYDPRAKLMQKTCHEVLKELNIKDDPLLDIAMELEKIALSDEYFIEKKLYPNVDFYSGITLKALGFPTEMFTVL

SEQ ID NO: 2445 - protein, 324 aa, Burkholderia cepacia R18194
MHWLPLTEVADDARDAVRAFRELGGRHYGSFSVDQSRVNFVRACELNGLTGDEAVVHEDIDVPVAGGSIRVRLYRPPAGASADGNPLVVFIHGGGWVIGSVDTHDGICRHLARHGGCAVASVEYRLSPEHRWPVPLEDCEQALDYLTANAAALSINASRVILAGDSAGGNMATLIANAASVAGPAIIGQVLFYPVTDLTASLPSYRRIQGGFPLVAESMLWFREHYVPDGTPFDLPRLSPLLHAEGRRQPPMFMATVGLDPLCDEGIAYASCAARAGSQVEHHHLPGHHHGIVTAARAIPAARYLLDRAASFVRRLAEKDGCDA

SEQ ID NO: 2446 - protein, 181 aa, Crocosphaera watsonii WH 8501
MEQRGVTVWFTGLSGAGKTTITQALEKKLREAGYPLEILDGDIVRTNLTKGLGFSKEDRDTNIRRIGFVSQLLTRHGVIVLVSAISPYREIREEVKGKIGDFVEVFVNAPLNVCEDRDVKGLYQRARAGEIKSFTGIDDPYEPPLNPEVECRTDLETLEESVNKVWQKLEEMGYLAKPVAV

SEQ ID NO: 2447 - protein, 145 aa, uncultured Rickettsia sp.
ANEAVINMLKEIGSSENIPKYIAKAKDKNDPFRLIGFGHRVYKNYDPRAAVLKETCKEVLKELGQLENNPLLQIAIELEAIALKDEYFIERKLYPNVDFYSGIIYKAMGIPSQMFTVLFAIARTIGWMAQWKEMHEDPEQKISRP

SEQ ID NO: 2448 - protein, 283 aa, Burkholderia cepacia R18194
MQHLARAVRAPEAVVDVHGVEDLTVPGATGSLRARLYRPTQERNLPTVVYLHGGGFVIGDLDTHDNICRELARGANAVVVSVDYRLAPEHPYPAAADDAIAATKWVIANAGELGGSDVVAVAGDSAGGNLAAVVTQQLHADGISLSAQFLIYPAVAQDRAGFPSFKENGEGYFLDLETIAWFERHYVLDGTDREDPRLAPIRAKDLAGLPPAVILTAEFDPLRDEGEAYGRLLHASGVKVDTIRCDGMIHGFFDMGAISPGAQAWIEKGIASFRKVLGGAQHH

SEQ ID NO: 2449 - protein, 75 aa, Zea mays
  misc_feature (24)..(24): Xaa can be any naturally occurring amino acid
DVHYLREMRISHLVVKEPMVIGHXCAGLVEEVGAGVTHLFDGDRLALEPGVSCWRCRHCQGGRYNLCEDMIFFST

SEQ ID NO: 2450 - protein, 136 aa, uncultured Rickettsia sp.
ANEAVINMLKEIGSSENIPKYIAKAKDKNDPFRLIGFGHRVYKNYDPRAAVLKETCKEVLKELGQLENNPLLQIAIELEAIALKDEYFIERKLYPNVDFYSGIIYKAMGIPSQMFTVLFAIARTIGWMAQWKEMHE

SEQ ID NO: 2451 - protein, 134 aa, uncultured Rickettsia sp.
ANEAVINMLKEIGSSENIPKYIAKAKDKDDPFRLMGFGHRVYKNYDPRAAVLKETCKEVLKELGQLENNPLLQIAIELEASALKDEYFIERKLYPNVDFYSGIIYKAMGIPSQMFTVLFAIARTVGWMAQWKEM

SEQ ID NO: 2452 - protein, 125 aa, Betula pendula
LKQEPGTSEETEQFACTRYKAEYPIFQKIRCNGPDTAPLYKFLKASKTGFLGSRIKWNFSKVAFPCNQFLKQEPGTSEETEQFACTRYKAEYPIFQKIRCNGPDTAPLYKFLKASKTGFLGSRIK

SEQ ID NO: 2453 - protein, 297 aa, Glycine max
MVSSNCYYLALVCCCVLLLLNPTVGEQDEQNLVLQYHKGALLKGRITVNLLWYGSFTPIQRSTIVDFIKSLSSSPGAPLPSVAWWWKTTEKYNGGSTTLVVGKQILQQTYSLGKYLNGTQLLYLSSRFNDLNAINVVLTSNDVGVDGFCRSRCGTHGSINGKARIPYMWVGNSEAQCPGQCAWPFHQPAYGPQTPPLVAPNADVGVDGMVINIATLLAGTVTNPFNEGFYQGPPTAPLEAVSACTGIFGSGAYPGYPGRVLLDKTTGASYNAYGGNGRKYLLPAMWDPQTSACKTQV

SEQ ID NO: 2454 - protein, 53 aa, Brassica napus
MSALFNFHSFLTVVLLVICTCTYLKMQFPAILEQMTGFRGFFWKAARIGERLS

SEQ ID NO: 2455 - protein, 202 aa, Brassica napus
  misc_feature (186)..(186): Xaa can be any naturally occurring amino acid
MDNYDGTNLAEMRPKRRAGRKVFNETRHPVFRGIRRRNGDKWVCEVREPTHQQRIWLGTYPTADMAARAHDVAALALRGRSACLNFADSAWRLPVPESNHPDVIRRVAAEAAEMFRPTEYGSEITVLPSYGSEVYMGSGSGSEERNVYGYVEEEEEVSTTMMRLATEPLMSPPRSYMEGVTPNGYXKEEMSYEDMSLWSYRY

SEQ ID NO: 2456 - protein, 162 aa, Brassica napus
GHWNVTDVCNGLLGGFAAITGGCSVVEPWAAIICGFVAALVLLGCNKLAEKLKYDDPLEAAQLHGGCGAWGLIFTALFAREKYLNQIYGEKPGRPHGLFMGGGGKLLGAQLIQILVITGWVSATMGTLFFILKKMKLLRISAEDEMAGMDTTRHGGSAYMYY

SEQ ID NO: 2457 - protein, 355 aa, Gibberella fujikuroi
MSRSNPPNAAGSRKISFNVSEQYDIQDVVGEGAYGVVCSAIHKPSGQKVAIKKITPFDHSMFCLRTLREMKLLRYFNHENIISILDIQKPRNYESFNEVYLIQELMETDMHRVIRTQDLSDDHCQYFIYQTLRALKAMHSANVLHRDLKPSNLLLNANCDLKVCDFGLARSAASQEDNSGFMTEYVATRWYRAPEIMLTFKEYTKAIDVWSVGCILAEMLSGKPLFPGKDYHHQLTLILDVLGTPTMEDYYGIKSRRAREYIRSLPFKKKVPFRTLFPQDLGSALDLLEKLLAFNPVKRITVEEALKHPYLEPYHDPEDEPTAPPIPEEFFDFDKHKDNLSKEQLKQLIYQEIMR

SEQ ID NO: 2458 - protein, 83 aa, Triticum aestivum
RRAAIPFVPACVAVRGTRSNPCRCKVVGPTLGFVAFVVTGVVEWPLGAAVYLFRRRKGRRIMGHPARVVYPRVTTAIPISSSS

SEQ ID NO: 2459 - protein, 428 aa, Gibberella zeae PH-1
MAPVATGETAPAHLPVGSPKPLSISASVLHGPRDLRMETRIIEAPAAGELQIAVKATGICGSDVSYYKKFANGDLCACHPLSLGHESSGEVVAIGPQVNGFKLGDRVALEVGVACGNCGTCRKGRYNLCKKLRFRSSAKTYPHYQGTLQERINHPAVWCHKLPDNVSYEAAALLEPLSVAIHAVNRARPEPGSTAIVIGAGTVGLLTAAMARQSGCTSVTITDIDAGRVNYAVSQGFATHGFVTPISRLNSSNYSSGISTPATGALTPASTFSTASRFDGAKSLAADILASSNSPGSFILEEDEDGVDVTFECTGKEVCMHTSLYTTKAGGKVIMVGMGTPIQTLPLSVAHLREIDILGVFRYSNTYPTGIRLLCSQAANPSGCGLPSLDGMVTHRFKGLDKAQAAFELATRTSDDEGNLVLKIVIEA

SEQ ID NO: 2460 - protein, 240 aa, Medicago sativa
RGKIQIKRIENTTNRQVIFSKRRNGLLKKAKELAILCDAEVGVMIFSSTAKLYDFASTSLRSVIGRYNKSKEEHNQLGSTASEIKFGQREAAVLRQQLHNLQESHRQIMGEELSGLTVKELQGLENQLEISLRGVRMKKEQLFMDEIQELNRKGDIIHQENVELYRKVYGTKDKNGTNRVLSLTNGVGIGDDSNRTCESPAQPATETRTTTALMHSLEISVLTCKQGKWTQILISYMNGI

SEQ ID NO: 2461 - protein, 200 aa, Vicia faba
MATIGHNNLNAKLVLLGDMGAGKSSLVLRFVKGQFLEFQESTIGAAFFSQTLAVNDATVKFEIWDTAGQERYHSLAPMYYRGAAAAIIVYDITSSDSFTRAKKWVQELQKQGNPNMVMALTGNKSDLEDKRKVTAEEARVYAEENGLFFMETSAKSAANVNDVFYEIAKRLPRAQPAQNPAGMVLVDRPTEGSRAASCCS

SEQ ID NO: 2462 - protein, 173 aa, Methanococcoides burtonii DSM 6242
MATGPRYKVAFRRRREGRTDYHQRLRLLLSREDRVVVRKSARHMQIQLVAPDANGDVTLSSAISKELAKYGYEGSTGNTTAAYLTGLLFGYKTLAEGYESGVLDIGIQASSAGSRVYAALKGVVDSGLDVPHNSSVFPSDERIRGEHVAEYMEGSNLPEVFDAVKEKILAEFS

SEQ ID NO: 2463 - protein, 492 aa, Oryza sativa (japonica cultivar-group)
MDQPSNGFAAGGLFLRHIDGQNASPPSVIVIGGGISGIAAARALSNASFKVTLLESRDRLGGRVHTDYSFGCPIDMGASWLHGVCNENSLAPLIRLLGLRLYRTSGDNSVLYDHDLESYALFDKDGRQVPQEIVTKVGETFEKILKETVKVRAEHEDDMPLIQAISIVLDRNPHLKLDGLQYEVLQWCICRLEAWFATDVDNISLKNWDQEHVLTGGHGLMVHGYDPVIKALAQDLDIHLNHRVTKIIQRYNKTIVCVEDGTSFVADAAIITVPLGVLKANIIKFEPELPDWKLSSISDLGIGIENKIALRFNSVFWPNVEVLGRVAPTSNACGYFLNLHKATGHPVLVCMVAGRFAYEFEKLSDEESVNFVMSQLKKMLPGATEPVQYLVSRWGTDPNSLGSYSCDLVGKPADLYERFCAPVGNLFFAGEAACIDHSGSVHGAYSSGIVAAEDCRRHLSTQLGISDLFQVGKIIMREEMTEVMVPFQISRL

SEQ ID NO: 2464 - protein, 181 aa, Rumex obtusifolius
MASSIMSSATVARPSAAQATVIAPFTGLKNIATFPTTRKSSDLSFPSNGGKVRCMQVWPPEGKIKFETLSYLPPLSEADLLAQINYLLINGWVPCLEFDVGPGAVYREHHHSPGYYDGRYWTMWKLPMFGCTDATQVVAELEEAKKAYPHAFVRIIGFDNVRQVQCVSFIAYKPPRAEGTY

SEQ ID NO: 2465 - protein, 198 aa, Triticum aestivum
TGGPFGTMKNPGEQSHAANAGLDIAVRLLDPIKDQLPILSYADFYQLAGVVAVEVTGGPEVPFHPGRQDKPEPPPEGRLPDATQGSDHLRQVFSAQMGLSDKDIVALSGGHTLGRCHKERSGFEGAWTSNPLIFDNSYFTELVSGEKEGLLQLPSDKALMADPAFRPLVEKYAADEDAFFADYAEAHLKLSELGFAEA

SEQ ID NO: 2466 - protein, 144 aa, Thinopyrum elongatum
MANSVSGVAVNEECVKVFQELRAERKHRFVVYKMDDDEDAQQVVVDKVGALDATFDDLAAAMPADDCRYAVYDLDFVSEDSAGDTPRSKIFFIHWSPEAADARSKMVYASSTEGLKKELDGVQIDVQATDASELTLDILKDYTT

SEQ ID NO: 2467 - protein, 122 aa, Atropa belladonna
MIQPQTHLNVADNSGARELMCIRIIGASNRRYAHIGDVIVAVIKEAVPNMPLERSEIVRAVIVRTCKELKRDNGMIIRYDDNAAVVIDQEGNPKGTRIFGAIARELRELNFTKIVSLAPEVL

SEQ ID NO: 2468 - protein, 344 aa, Bartonella schoenbuchensis
DPGFTSTASCESKITYIDGDKGVLLYHGYSIDQLAENGDFLEVCYLLLYGELPTQQEKADFDRRIMHHTMVHEQFSRFFHGFRRDSHPMAVMVACLGAMSAFYHDSIDITDAKQRMIASIRLIAKVPTLAAMAYKYSIGQPFVYPRNDLGYAANFLHMCFSVPCEEYKVNPVLARAMDRIFTLHADHEQNASTSTVRLAGSSGANPFACIAAGVACLWGPAHGGANEACLKMLQEIGSIEKIPEFIARAKDKNDPFRLMGFGHRVYKNYDPRAKLMQKTCHEVLKELNIKDDPLLDIAMELEKIALSDEYFIEKKLYPNVDFYSGITLKALGFPTEMFTVLFHL

SEQ ID NO: 2469 - protein, 359 aa, Hortaea werneckii
MAEFVRAQIFGTTFEITSRYTDLQPVGMGAFGLVCSAKDQLTSQAVAVKKIMKPFSTPVLSKRTYRELKLLKHLRHENIICLSDIFISPLEDMYVVTELLGTDLHRLLTSRPLEKQFIQYFLYQILRGLKYVHSAGVVHRDLKPSNILINENCDLKICDFGLARIQDPQMTGYVSTRYYRAPEIMLTWQKYDVEVDIWSAGCIFAEMLEGKPLFPGKDHVNQFSIITELLGTPPDDVIATICSENTLRFVQSLPKRERQPLKNKFKNADPQAIELLERMLVFDPRKRVKAGEALADPYLAPYHDPTDEPEAQEKFDWSFNDADLPVDTWKIMMYSEILDFHNVDANAEQAAHNNDTVAG

SEQ ID NO: 2470 - protein, 128 aa, uncultured bacterium
MPQLGLGVWKASNEEVISAIHKALEVGYRSIDTAAAYKNEEGVGKALRDSGLPREALFITTKLWNDDQKRPREALLESMEKLQLDYLDLYLMHWPVPAIDHYVEAWENMIDLQKQGLIKSIGVCNFQI

SEQ ID NO: 2471 - protein, 466 aa, Escherichia coli O157:H7 EDL933
MDQKLLTDFRSELLDSRFGAKAISTIAESKRFPLHEMRDDVAFQIINDELYLDGNARQNLATFCQTWDDENVHKLMDLSINKNWIDKEEYPQSAAIDLRCVNMVADLWHAPAPKNGQAVGTNTIGSSEACMLGGMAMKWRWRKRMEAAGKPTDKPNLVCGPVQICWHKFARYWDVELREIPMRPGQLFMDPKRMIEACDENTIGVVPTFGVTYTGNYEFPQPLHDALDKFQADTGIDIDMHIDAASGGFLAPFVAPDIVWDFRLPRVKSISASGHKFGLAPLGCGWVIWRDEEALPQELVFNVDYLGGQIGTFAINFSRPAGQVIAQYYEFLRLGREGYTKVQNASYQVAAYLADEIAKLGPYEFICTGRPDEGIPAVCFKLKEGEDPGYTLYDLSERLRLRGWQVPAFTLGGEATDIVVMRIMCRRGFEMDFAELLLEDYKASLKYLSDHPKLQGIAQQNSFKHT

SEQ ID NO: 2472 - protein, 506 aa, Vibrio vulnificus YJ016
MIYAQPGSDNAVVNFKSHYDNYIGGEWVKPVSGEYFDNISPVNGQAYCKVARSSAADINLALDAAHSVRYQWAKTSVTERANILLKIADRIEAHLEELAVAETWENGKPVRETLAADLPLVVDHFRYFAGCIRAQEGSAAELDANTASYHFPEPIGVVGQIIPWNFPMLMAAWKLAPALAAGCCVVLKPAEQTPTSILVLMEKIGDLIPAGVVNVVNGFGAEAGQALATSNRIAKLAFTGSTEVGNHILKCAAESLIPSTVELGGKSPNIYFPDVFDHEDAYLDKCIEGTLLAFFNQGEVCTCPSRVLVHESIYDQFIAKVAERAKSIKQGNPLDTDTQVGAQASQEQFDKILSYLEIGRQEGAKVVFGGEIAKQEDDLATGYYIQPTLLQGHNKMRVFQEEIFGPVIAVTTFKDEAEALAIANDTEYGLGAGVWTRDQNLAYRMGRNIEAGRIWINCYHAYPAHAAFGGYKKSGIGRETHKMMLNHYQNTKNLLISYDVNPLGFF

SEQ ID NO: 2473 - protein, 75 aa, Triticum aestivum
VIRRVYQLTGIADERYVTVVAQSGYNKDVLKLSTEDVLPGQIKQGFADGKDVILSGMSSKGEEHICGKMEIAGGK

SEQ ID NO: 2474 - protein, 284 aa, Malus x domestica
ILPFKLPAIGPNDVQIRIKAVGICGSDVHYLKTMKCADFEVKEPMVIGHECAGIVDKVGSEVKHLVPGDRVAVEPGISCAHCQQCKGGRYNLCPDMKFFATPPVHGALANQIVHPADLCFKLPENVSLEEGAMCEPLSVGVHACRRANVGPETTVLIIGAGPIGLVSVLAARAFGAPRIVIVDMDDKRLAMAKSLGADDTVKVSTKMEDLDDEVAEIKKAMISEVDVTFDCVGFNKTMATGLNATRPGGKVCLVGMGHGLMTVPLTPAAAREVDVVGVFRYKNT

SEQ ID NO: 2475 - protein, 246 aa, Triticum aestivum
MARGREGEVRNLVLGKYELGRMLGQGSFAKVYYGRDLRDGQSVAIKVIDKAHLRQTDGMVEQLRREISIMRMVRHPNVVGIREVLASRQRVFVVMEYARGGELFAKVARGRLTEDAARKYFQQLVAAVAFCHSRGVAHRDLKPENLLLDEEGRLKVTDFGLAALPEQLRHDGLLHTQCGTPAYVAPEVLRKRGYDGARADMWSCGVVLYVLLCGFLPFQHDNYVKMYQKIFKGEYQMPPWVSGEAR

SEQ ID NO: 2476 - protein, 314 aa, Aspergillus nomius
METPFAAPWQQFVEDLGQTPCLPGKDLKSVLTGWGQLAGTLATRYGFPPPDESVTTEDVQLDGLWLRCYTPPNATGQGPVGLYFHGGGWVMGGVKEEDGFCRIISRQCQMRLVSVEYRKAPETRYPGALNDGVRAALWALSRYGNHPLVLMGTSAGGNLAFGTALRLIDQDMAGKVGGVVALAPITVHPDAVPDHLKEQYTAYEENAELTVNSRAAMQVFFDCYNAPVDDVYTSCLLHPRLLALPKVYIAELGLDTLRDDARLMKGALDTAKVPVMYDAYPGYPHCSFMFPFQSLGEHQKAFLEAVAKAVRWMS

SEQ ID NO: 2477 - protein, 357 aa, Triticum aestivum
  misc_feature (19)..(19): Xaa can be any naturally occurring amino acid
  misc_feature (52)..(52): Xaa can be any naturally occurring amino acid
MKTLLILTILAMAITISTXANMQVDPSGQVQWPQQQLVPQPQQPLSQQPQQXLPQPQQTFPHQPQQQVPQPQQPQQPFLQPQQAFPQQPQQPFPQTQQPQQPFPQQPQQPFPQTQQPQQPFPQQPQQPFPQQSQQPFPQTQQQPQPFPQQPQQPFPQTQQPQQPFPQFQQPHQPFPQPQQQFPQPQQPQQSFPQQQRPFIQPSLQQRLNPCKNILLQQCKPASLVSSLWSIIWPQSDCQVMQQQCCQELAQIPQQLQCAAIHSVVHSIIVQQQQQQQQQQQQQGMHILLPLSQQQQLGQGTLVQGQGIIQPQQLAQLEAIRSLVLQTLPTMCNVYVPPECSIIRAPFASIVAGIGGQ

SEQ ID NO: 2478 - protein, 239 aa, Triticum aestivum
RAGLFINNEFVKAVDGKTFEVINPSTEEVICNVAEATEKDVDIAVAAARKAFNGPWRKETPENRGKLLVKLADLFEKNADLLASVEALDNGKAFSMARNVDIPAAAGCLRYYGGWADKIEGKVVDTAPDSFNYIRKEPIGVCGQIIPWNFPILMWSWKIGPAIATGNTVVIKTAEQTPLSAYVACKLIQEAGFPPGVINVITGFGKVAGAAISAHMDVDKVAFTGSTVVGRQIMKAAAG

SEQ ID NO: 2479 - protein, 204 aa, Xylella fastidiosa Dixon
MHLISNDFKNGQPIPVECAAGQTDGFAPNRNPHLAWDDVPENTRSFALLCIDPDVPSIPETIGRTDMEIPVTQPRIDFVHWVMTDISTNLRMIAHGSCSDGFVVGGKTMPPGPAGTHQGLNDYTKFFANTPEMAGDYYGYDGPYPPFNDLRIHRYLFRLFALDLEHLPLPKRFDGPTLLRTIQGHVLTEATLYGTYTLNPKAQE

SEQ ID NO: 2480 - protein, 106 aa, uncultured Rickettsia sp.
MLKETGSSENIPKYIAKAKDKNDPFRLIGFGHRVYKNYDPRAAVLKETCKEVLKELGQLENNPLLQIAIELEAIALKDEYFIERKLYPNVDFYSGIIYKAMGIPSQ

SEQ ID NO: 2481 - protein, 174 aa, Schizosaccharomyces pombe
MGQSQSQIFEDLISNSSFSNEEIERIRKRFIKIDANQSGSIDRNEFLSIPSVASNPLASRLFSVVDEDGGGDVDFQEFINSLSVFSVHGNKEEKLKFAFKIYDIDRDGYISNGELYLVLKMMVGTNLREDQLQQIVDKTIMEVDKDRDGKISFEEFKDIVSGSNVTSSMTLDSF

SEQ ID NO: 2482 - protein, 486 aa, Burkholderia cepacia R18194
MPIFEAEHLRKAFIGGRWVAPANGGVEHDIINPATGEVSGVLLFSDEADVNLAAEAARDAFAAFSNTPLVERLKLLERVIGAYTERLQDMADAITLEMGAPMDAISRPLQAALGLWHLHTTLEVAKQYPFERTQGTSRIVKEPVGVCGLITPWNWPMNQVMCKVAPALVAGCTIVLKPSQNAPYSAIVLAEILEKAGVPPGVFNLVQGAGQRLGRAIASSPLFDMVSLTGSTSAGVEVAQAAATTIKRVTLELGGKSANIILDSENFQQGVTHGVLQMMANSGQTCTAPSRMLVPAHRLEEAEQIAVAACGQVVVGDPRDPGTTMGPMANQRQHQKVQEMIRVGIDEGAMLLSGGLGNPSGLERGYYVKPTVFSRVNNRMKIATEEIFGPVLVIIPYRDESDAVTIANDSPYGLSGYVYGDSIEQAERVARKLRTGMVHLNGAAVDIAAPFGGYKQSGNGREWGYAGIEEFLETKSMFGATPGAVS

SEQ ID NO: 2483 - protein, 341 aa, Thermobifida fusca
MRVGVLTGGGDCPGLNAVIRAVVRKGIKEYGYEFVGFRDGWRGPLEGDTMPLDIEAVRGILPRGGTILGSSRTNLMKIEGGVERVKDNMAALGVDALVAIGGEDTLGVARQLHDHGVNVVGVPKTIDNDLNATDYTFGFDTAVNIATEAIDRLHTTAESHHRALVVEVMGRHAGWIALHAGMAAGANVILIPERPFDIDEVVAYIESRFKTNYAPIIVVAEGAHPKEGQLTLASAERDSFGHVRLGGIGQRLAEEIEARTGKEARSVVLGHVQRGGTPSAFDRVLATRLGLHAITAVHDKDFGKMVALRGTEIVRVDLSEATDQLKTVPVERYEEAEVFFG

SEQ ID NO: 2484 - protein, 106 aa, uncultured Rickettsia sp.
MLKEIGSSENIPKYIAKAKDKNDPFRLMGFGHRVYKNYDPRAAVLKETCKEVLKELEQLENNPLLQIAIELEAIALKDEYFIERKLYPNVDFYSGIIYQAMGIPSQ

SEQ ID NO: 2485 - protein, 500 aa, Arabidopsis thaliana
MVLSKTASKSDDSIHSTFASRYVRNSISRFEIPKNSIPKEAAYQIINDELKFDGNPRLNLASFVTTWMEPECDKLMMESINKNNVEMDQYPVTTDLQNRCVNMIARLFNAPLGDGEAAIGVGTVGSSEAVMLAGLAFKRQWQNKRKALGLPYDRPNIVTGANIQVCLEKFARYFEVELKEVKLREGYYVMDPDKAVEMVDENTICVVAILGSTLTGEFEDVKLLNDLLVEKNKKTGWDTPIHVDAASGGFIAPFLYPDLEWDFRLPLVKSINVSGHKYGLVYAGIGWVVWRTKTDLPDELIFHINYLGADQPTFTLNFSKGSSQVIAQYYQLIRLGFEGYRNVMDNCRENMMVLRQGLEKTGRFNIVSKENGVPLVAFSLKDSSRHNEFEVAEMLRRFGWIVPAYTMPADAQHVTVLRVVIREDFSRTLAERLVADFEKVLHELDTLPARVHAKMASGKVNGVKKTPEETQREVTAYWKKFVDTKTDKNGVPLVASITNQ

SEQ ID NO: 2486 - protein, 386 aa, Aspergillus nomius
MTGLDMESIFAKIKEEYARTDDVGKRQIQGHIRELQVGFYSDWDVVMRLSSGPLQVALAKVGIDLGIFRDLKESKTPITLAEFVKKTGASPRLLGRILRTQAAFGLIKETGPQEYTSSAFTDVFAKVDAAGAVAQLFDISGPCTQILPDFLAERDYRDITSNKDCVFQKAFNSDLTMFEWMPQHPKHMESLGHLMALERPVSWVDHFPVLEKLGDFPGPDKVLMVDIGGGFGQQSKALRAKFPNLPGRVIVQDIPQTLANAQPAAGVEFMEHSFFEPQPIQNAKFYYLRHVFHDWPDEQCVQILKQIIPAMGPDSQILIDEMVIPSTGVPWQAAFTDLLMMNSLGGVERTRAEWDNLLEQAGLEIIQSKVYDSKDQSILVAVPKRP

SEQ ID NO: 2487 - protein, 133 aa, uncultured Rickettsia sp.
ANEAVINMLKEIGSSENIPKYIAKAKDKNDPFRLMGFGHRVYKNYDPRAAVLKETCKEVLKELEQLENNPLLQIAIELEAIALKDEYFIERKLYPNVDFYSGIIYKAMGIPSQMFTVLFAIARTVGWMAQWKE

SEQ ID NO: 2488 - protein, 476 aa, Pseudomonas putida KT2440
MTTSHYIAGHWVEGQGSDCISVNDPALGQPFAELMAASVSQVDQAVAAARSALPAWKSTCASERAAFLRGFAEQLGQRREALVTVQMRNNGKPRHEAEIDLDDAIATFGYYAELAEQLPSKNRTVPLAAPGFTARTRLEPVGVVGLIVPWNFPLVTSAWKLAPALAAGCTVVLKPSEVTPLIEQAYGQIADALGLPAGVLNIVNGKAETGAALSNHNGLDKLSFTGSNSVGSQVMRSASAQCRPVTLELGGKSAIVVFDDCDVDQAVEWIVAGISWNAGQMCSATSRLLVQDGIADALLPRLQAALENLRVGNPLTEEVDMGPLTSQAQWLKVASYFATAREEGLQCLAGGHALDREGWFVSPTLYTDVPKDSRLWTEEIFGPVLCARRFATEEQAIAEANDSRFGLVATVCSADLERAERVADALEVGHVWINSVQAVFVETSWGGTKGSGIGRELGPWGLSAYQSIKHVTRCLG

SEQ ID NO: 2489 - protein, 69 aa, Zea mays
MCGILAVLGCAYEAKGSSNRSRVLDLSRWMEHRGCDCIGIRHVSNCYISHHRLPIIDATSGDILVYNED

SEQ ID NO: 2490 - protein, 282 aa, Rhodobacter sphaeroides 2.4.1
MHLGCPHHWRFGAEGESEAEFCARLLREAEETILAEGPETVAAFIGEPVMGAGGVIVPPDGYWSGIEALCRKYDILLVSDEVINGFGRTGARWGCEKFGFTPDILVTSKQLTSSYMPLAAVLMTDKVYQTIADHTETLGTLGHGFTGSGHPVATAVGLENLTVIEERDLMGNAARLERPFQDGLRAFRDNPLVGEVRGTGLIAAIEMVADRATKRSFEPLGKVGARAAAFAAEEGLLCRALGDTLALCPPLIVTEADVGRILERMGRALDRTADWARAEGLI

SEQ ID NO: 2491 - protein, 355 aa, Phaseolus vulgaris
FTVYGEHWRTMRTIMNLPFFTKKGVHNYSTMWEEEMELVVRDLKVNEHVRSEGIVIRKRLQLMLYNIMYRMMFDAKFESQEDPLFIQATRFNSERSRLAQSFEYNYGDFIPLLRPFLRGYLNKCKDLQSRRLAFFNTHYVQKRRQIMAANGEKHKISCAIDHIIDAQMKGEISEENVIYIVENINVAAIETTLWSMEWAIAELVNHPSVQSKIRDEISEVLKGEPVTESNLHELPYLQATVKETLRLHTPILLLVPHMNLEEAKLGGYTVPKESKVVVNAWWLANNPSWWKNPEEFRPERFLEEECATDAVAGGKVDFRFVPFGVGRRSCPGIILALPILGLVIAKMVSNFELSA

SEQ ID NO: 2492 - protein, 692 aa, Glycine max
MPALACCVDAAAPPGYAFAGDISFPAPVALTGVPPATTDDSNNNRWSPSLSAALYNVDGWGGPYFAVNTAGNISVRPHGSDTLSHQEIDLLKIVKKASDPKSLGGLSLQLPLIARFPDVLKNRLESLQFGCSIMQIQSGGYESHYQGVYPVKCNQDRFVVEDIVKFGSPFRFGLEAGSKPELLLAMSCLCKGNPDALLICNGFKDAEYISLALVANKLALNTVIVVEQEEEVDLIVELSKKLCIKPVIGLRAKLRTKHSGHFGGTSGEKGKFGLTTAQILRVVKNLDLAGMLDCLQLLHFHIGSQIPSTALLADGVGEAAQIYCELVRLGANMRVIDIGGGLGIDYDGSKSCDSDISVEYSLEDYAVAVVHAVQCVCDRRSVKHPVICSESGRAIVSHHSVLIFEAVGTSSTTGGGASPALSAQYLAEELSEDYRNLSELAFRGEYETCLVYTEEMKERCVEQFKQGTVCMEQLAAVEGLCELARKAVGAGESVRRYHVNLSVFTSVPDAWGIEQVFPIIPIHRLDEKPSVRGILSDLTCDSDGKIDKFINGESSLPLHEMEGGRTYYLGMFLGGAYEEALGGVHNLFGGPSVVRVSQSDGPHSFAVTRAVPGPSCGDVLRVMQHQPELMFETLKHRAQEYVSHDNAAALLAAGLARTFDRMPYLLSLSSFVADDVAAAVPAAQDLGEQWSY

SEQ ID NO: 2493 - protein, 353 aa, Photorhabdus luminescens subsp. laumondii TTO1
MKALKFNRVWDVQIQDVEPLRCAEPDDVVVDIAVCGVCGTDVGIITGSYPVAIPGTTLGHETTGVITQIGKSVTRFNVGDRVVINPTYSCGHCRMCQTGSPNHCEKKLGTEAGVSYDGAFAEQYLAKESSLIKLDDHVSMEEASLTEPLSCTLTGVDKLGITHTNIRAAVAGAGPMGMLYIWALHARGVKAFMVEKNESRIQFAKENLPPECELYTDFDEALIQKYGDKSALIDLCVDTTGQLTEYVFEHLAPGGKLLNVALKDKHANLDILKIADKSLSVIGSIDSLNNSFERAYTMIRDGVIPAGRLVSQVFDFNDYLQAFLTVGCDIANKSQKPLFTPNCKVLIRISDLK

SEQ ID NO: 2494 - protein, 142 aa, Gloeobacter violaceus PCC 7421
MLMEVTAMALQVKLLEQSFEGVKPNAHAFAASFYDNLFSDFPQTQALFAHSDMQAQQQKLLASLVLVVENLRQPQVLSTALQDLGNRHAGYGIVPEHYPMVGTSLLKTFETYLGDAWTPEVKQAWVDAYGAITGLMLTGAES

SEQ ID NO: 2495 - protein, 78 aa, Triticum aestivum
MKEGTANCVDILIAIILPPLGVFLKFGCKVESGLPLAHFLAYLPGIIYAIYAITKGLARSSWGASAGPPLFSTVKYYY

SEQ ID NO: 2496 - protein, 259 aa, Euphorbia esula
MDSSKDRETFVYLAKLAEQAERYDEMVESMKKVANLDVELTVEERNLLSVGYKNVVGSRRASWRILSSIEQKEESKGNEINAKRIKEYRNKVESELSTICSDIMTVIDEHLIPSCNAGESTVFYYKMKGDYYRYLAEFKAGNDKKEAADQSLKAYQTASTTAETDLPPTHPIRLGLALNFSVFYYEIMNSPERACHLAKQAFDEAISELDTLSEESYKDSTLIMQLLRDNLTLWTSDIPEDGDQKMETSGKASGGEDAE

SEQ ID NO: 2497 - protein, 314 aa, Triticum aestivum
  misc_feature (166)..(166): Xaa can be any naturally occurring amino acid
MGAGEKTAAGMPRIGMGTAVQGPKPDPIRRAVLRAIEIGYRHFDTAAHYETEAPIGEAAAEAVRSGAVASRDELFITSKLWCSDAHRDRVVPALRQSLRNLQMEYVDLYLVHWPVSMKPGRFKAPFTAEDFVPFDMRAVWEAMEECHRLGLAKAISVANFSCKKLXTLLSFATIPPTVNQVEVNPVWQQRKLREFCRGKGIQLCAYSPLGAKGTHWGSDAVMDAGVLQEIAASRGKSVAQVCLRWVYEQGDCLIVKSFDEARMRENLDVDGWELTEEERRRIAEIPQRKINLGKRYVSEHGPYKSLEELWDGEI

SEQ ID NO: 2498 - protein, 461 aa, Azoarcus sp. EbN1
MDRLQKAEVEDFKAHFQGEVLLPDDAAYDEVRQIWNAMMDRRPGLIARCVSPEDVVQAVRLARKHNLLVSIRGGGHNIAGNAVCDDGLMIDLSLMKKVQVDGNAHRASVEPGCTLADFDAVAQAHGLATPLGINSTTGVAGLTLGGGFGWLSRKHGMTVDNLLSADVVTADGNQVHASETENEDLFWGLRGGGGNFGIVTSFEFQLHPVGPDVLSGLIVFPFDQAKSVLTQFARFTETISDDLTVWMVTRKAPPLPFLPEDVHGKEIVVLALCYAGDPVEGEKLIEPLRGFGTMLGEHIGVQPYTAWQQAFDPLLARGARNYWKSHNFSQLSAGAIDAIIEYAGRLPSPQCEIFIGTIGGQTARVAPDAMAYSARDANYVMNVHARWESAAEDERCIAWARDFFASSQPFASGGAYINFLTQDETDRIAFAYGATYDRLVELKKKYDPTNLFRMNQNIKPV

SEQ ID NO: 2499 - protein, 108 aa, Glycine max
MHTLCVSRDFFLNSGSSDSRPRRSLFFPSLKMGFWTLLEGFLLFANALAILNEDRFLARRGWTLAEMTGPQRNSLKGQVIGLIYACQFLRLPLILFNVITIIVKLFSG

SEQ ID NO: 2500 - protein, 153 aa, Triticum aestivum
  misc_feature (116)..(116): Xaa can be any naturally occurring amino acid
PSRQHSNQNNPANSSHEHLQRQYTLEGQAAKKDISPPLEWYGVPDGTRSLAVVVQDVDADERVPWTHWVVVNISPEEKGLPEGFSGAGGNANAGGGDGGVQEGVNDWKQPGWRGPXLYALDDLLSLGNKVTVDKVMEAIEGHVLGEAEITAVF

SEQ ID NO: 2501 - protein, 491 aa, Listeria monocytogenes str. 1/2a F6854
MVFLSIKETALPKVQTKLFINGKWTDGDNKETKDIVNPANGDVIAKIAQAGPSETKKAIKAAKDAFPDWAKMELADRVKLLHKIADLMEEKADTLAKIMTLEQGKPLKESKGEVLTGVENFRFAAEEARRLYGETIPAPNNHAFIVKKQPIGVVAAITPWNFPGGMVTRKLAPALATGNTIVLKPSGDTPLSALAIFEIFEEAGLPKGVANIVMGSSKEIGETLTDSDDVRKLTFTGSTKVGQTLFKQSADTLKKISLELGGHAPFIVFDDANLDAAVNDLVAAKFRNNGQVCVSPNRIFVAKEIKEKFTKALVAKVEQLKVGNGLDNVNVGPLIREDAIDKIDKQLKNATDKGAKVLTGGGRLTGSDYDNGNFYKPTVLDNVTREMDIFYEETFGPVIPLITFETEDEAIEMANDSEFGLASYFYTKDLARVEKVGAALEYGMVGANEIAISNPETPFGGVKHSGFGRENGHYGMEEYIQVKFINLKYRD

SEQ ID NO: 2502 - protein, 249 aa, Zea mays
MFGYQKGLDVEAGTSGAAATGGARQLYPGMQESPELRWALIRKIYVILSLQLLLTAVVAAVVVKVRAIPHFFTTTSAGLGLYIFLIILPFIVLCPLYFYHEKHPVNLILLGLFTVAISFAVGMTCAFTSGKVILESAILTTVVVLSLTAYTFWAVNRGKDFSFLGPFLFAAIIVLLVFALIQILFPLGKLSQMIYGGLASLIFSGYIVYDTNNIIRRYTYDQYVWAAVSLYLDVINLFLSLMTLFRAAD

SEQ ID NO: 2503 - protein, 176 aa, Brassica napus
  misc_feature (26)..(26): Xaa can be any naturally occurring amino acid
  misc_feature (37)..(37): Xaa can be any naturally occurring amino acid
AAVSSCSFHQFITFGFACTPLYFVWXKVIGMHDTKSXCLRALARCPVGRGGWFLAIIFPFFGPINSAVGALLVSFTVYIIPSLAHMLTYRSASARQNAAEKPPFFLPSWTAMYVLNAFVVIWVLIVGFGFGGWASVTNFVRQVDTFGLFAKCYQCKPPVPAAAAAHAPVAALHHRL

SEQ ID NO: 2504 - protein, 225 aa, Oryza sativa (japonica cultivar-group)
MDSLYDISCFAAGLAGNIFALALFLSPVTTFKRILKAKSTERFDGLPYLFSLLNCLICLWYGLPWVADGRLLVATVNGIGAVFQLAYICLFIFYADSRKTRMKIIGLLVLVVCGFALVSHASVFFFDQPLRQQFVGAVSMASLISMFASPLAVMGVVIRSESVEFMPFYLSLSTFLMSASFAFSLMGLDLSWEQCSWRSTLTTAENGEARIHLHRCCSHDQNRSE

SEQ ID NO: 2505 - protein, 74 aa, Brassica napus
MASNMEVFCEILIAILLPPLGVCLKRGCCTVEFLICLVLTILGYIPGIIYALYVIVFQNREGETPDYSTPLNSA

SEQ ID NO: 2506 - protein, 163 aa, Candida albicans SC5314
MSEEKVRVQETEEERQERLAKQEEIDGRSVYVGNVDYQSTPEQLEEFFHGVGVIERVTILFDRFSGLPKGYAYIEFEQTESVQKAIDELHGKEFRGRELRVTAKRTNLPGFRRGRGRGGFRARGRGRGGFRGRGRGRGGFNSRGTRNGDSEQADGDAENEETD

SEQ ID NO: 2507 - protein, 423 aa, Pseudomonas syringae pv. tomato str. DC3000
MKLSILGARVIDPVSGLDQTTDLHIEAGKLVAIGAAPAGFEPTQVIDATGLVAAPGLVDLNVSLREPGYSRKGSIASETRAAVAGGVTSLCCPPQTKPVLDTSAVAELILDRAREAGFSKVFPVGALSKGLEGEQLAELIALRDAGCVAFGNGLSSFSNTRTLCRALEYAATFDLTVIFNSQDRDLAEGGLAHDGPTAAFLGLAGIPETAETVALARDLLLVEQSGVRAHFSQLTSARGAALIAQAQARGLPVTADVALYQLILTDEALIDFSSLYHVQPPLRTRADRDGLREAVRSGVIQAISSHHQPHERDAKLAPFGATEPGISSVELLLPLAMTLVDDGLLDLPTLLARLSSGPADALRLPAGKLSAGAPADIVLFDPTASTVAGETWLSKGDNCPFIGHCLPGSVRYTLVDGRISYSR

SEQ ID NO: 2508 - protein, 393 aa, Pseudomonas aeruginosa PAO1
MLSNAQRALIKATVPLLETGGEALITHFYRTMLGEYPEVRPLFNQAHQASGDQPRALANGVLMYARHIDQLQELGPLVAKVVNKHVSLQVLPEHYPIVGTCLLRAIREVLGEQIATDEVLEAWGAAYQQLADLLIEAEESVYAASAQADGGWRGVRRFRVARKQAESEEITSFYLEPVDGQPLLAFQPGQYIGLRLDIDGEEVRRNYSLSAASNGREYRISVKREAGGRVSNYLHDRVAEGDELDLFPPAGDFVLRDSDKPLVLITAGVGITPALAMLQEALPQARPIRFIHCARHGGVHAFRDWIEDVSAQHEQVEHFFCYSEPRAGDSADAEGLLSREKLADWLPQERDLDAYFLGPRPFMAQVKRHLADLGVPSQQCHYEFFGPAAALDA

SEQ ID NO: 2509 - protein, 139 aa, Helianthus annuus
MANAASGMAVHDECKLKFMDLKAKRTHRFIIYKIEEKQKQVMVEKVGEPAQTYDEFAACLPENECRYAVFDYDFLTPEGVQKSRIFFIAWSPDTARVRNKMIYASSKDRFKRELDGIQVELQATDASEMGLDVIQSRAN

SEQ ID NO: 2510 - protein, 422 aa, Aspergillus nomius
MALPDKAALVGLANALSEQVKRYLAIPDETELPKGDKHCIEGVKSSSSAEHAQAWEIVRTCDRIGSLIHGPVPWLLSNALSHLDSACLAAATQLNLQDVIVDGASSTSLDTIVAATGVSKDLLRRILRGCAQRFIFEEVAPDQYAHTDASKMLRVKGIHALVGFSCDEVMRSGACFSDFLQQTKGNPPSWNVPSPFSLAFDPAKGLFDYYSTVDEVRGRRFDLGMGGTEATKPLVEEMFDFSSLSEGSTIVDVGGGRGHLSRRVSQKHPHLKFIVQDLPAVIHGVEDTEKVTMMEHDIRHPNPVRGADVYLLRSILHDYPDAACVEILSNIVSAMDPTKSRILLDEMIVPDLLAQDSQRFMNQIDMTVVLTLNGKERSVKEWDSLITTVDGKLETEKTWWRKGEEGSHWGVQQLRLHGSSAD

SEQ ID NO: 2511 - protein, 588 aa, Triticum aestivum
  misc_feature (159)..(159): Xaa can be any naturally occurring amino acid
  misc_feature (214)..(214): Xaa can be any naturally occurring amino acid
  misc_feature (227)..(227): Xaa can be any naturally occurring amino acid
MTFHAAQRSLQLRYATTPPASSLRAILKKAKGSGELRLRARSRSVAGRDQLLRAHGPNEGLRRWGVGLGAGHRRGLLAQAVMALDRREATPTHDLPSYPVPPHRFLAMMHLQESTARLFPNLLIEDVEEGLPVVYPPVVGEACQKHGSIYRPPAGALHXSLKDTGSVLGVPSSWPEPRLRVSGVTDGVPGVGLEDVDCQGRATEVRLLTPWSFXSQVATKFCGKLRXDVGTNNEKLLNDEYYIGLRQRRATGEEYHELLQEFMNAVKQNYGEKVLVQFEDFANHNAFDLLAKYSKSHLVFNDDIQGTASVVLAGLLAALKMIGGGLVDQTYLFLGAGEAGTGIAELIALEMSKHTELPVDDCRKKIWLVDSKGLLVESRKESLQHFKKPFAHEHEELKTLLEAVQSIKPTVLIGTSGVGKTFTQEVIEAMASFNEKPVIFSLSNPTSHSECTAEEAYTWSKGTAVFASGSPFDPVEYEGKTYVPGQSNNAYVFPGFGLGVVISGAIRVHDDMLLAASEALAEEATQENFDKGLIFPPFTNIRKISASIAAKVAAKAYDLGLASRLPRPDDLVKYAESCMYTPLYRSYR

SEQ ID NO: 2512 - protein, 291 aa, Oryza sativa (japonica cultivar-group)
MAASSSSSMASSQPRMMEQSLFYTQPPARAVHTRKVTAVNLHREMSLIRSLMPTFPFVAVDTQFPGVVHPHPRGAGVTADDRYAAVRANADELCLLQLGITLSAADGRLPVDGALVEFMWDFDFAGFDARYHRHAPESVQFLRAQGFDFEAARLAGVPALAFAAELAASGILGLRGVTWVAFGGMYDVAFLLRLATGGAPLPATRLGFLAQVGAVFGTQVFDAKHMASLLHMHGGLAAVGGMLRLPPQLPRRHMAGQNSVMAIQLFMELRRRFNDLGGSLHSCSLKIEGLT

SEQ ID NO: 2513 - protein, 346 aa, Zea mays
  misc_feature (265)..(265): Xaa can be any naturally occurring amino acid
  misc_feature (268)..(268): Xaa can be any naturally occurring amino acid
  misc_feature (270)..(270): Xaa can be any naturally occurring amino acid
  misc_feature (272)..(274): Xaa can be any naturally occurring amino acid
  misc_feature (276)..(276): Xaa can be any naturally occurring amino acid
  misc_feature (281)..(281): Xaa can be any naturally occurring amino acid
  misc_feature (284)..(284): Xaa can be any naturally occurring amino acid
  misc_feature (305)..(305): Xaa can be any naturally occurring amino acid
  misc_feature (324)..(324): Xaa can be any naturally occurring amino acid
QTGRGEIVECSPSKEADLFNAVLGGLGQFGIITRARILLQEAPEKVTWVRAFYDDLGAFTRDQELLVSIPDSVDYVEGFMVLNERSLHSSSIAFPASVDFSPDFGTRSSPRIYYCVEFAVHHHHGYQQQSQAAVEAISRRMSHMASQLYSVEVSYLDFLNRVRMEEVSLRSAGMWEEVHHPWLNMFVPKAGVAGFRDLLMDNVSPDSFQGLILIYPLLRDKWDTNTSVVIPDSGPTADDPVMYVVGILRSANPGPEEDGDGCSHXCLXEXLXXXRXIADAXEAXLGAKQYLPHHPTPARWQQHLXRRWERFADRKARFDPLRIXGPGQGIFPRTAQDAAAAAAYGS

SEQ ID NO: 2514 - protein, 133 aa, uncultured Rickettsia sp.
ANEAVINMLKEIGSSENIPKYIAKAKDKNDPFRLIGFGHRVYKNYDPRAAVLKETCKEVLKELGQLENNPLLQIAIELEAIALKDEYFIERKLYPNVDFYSGIIYKAMGIPSQMFTVLFAIARTIGWRAQWKE

SEQ ID NO: 2515 - protein, 274 aa, Thermotoga maritima MSB8
MLYKELGRTGEEIPALGLGTWGIGGFETPDYSRDEEMVELLKTAIKMGYTHIDTAEYYGGGHTEELIGKAIKDFRREDLFIVSKVWPTHLRRDDLLRSLENTLKRLDTDYVDLYLIHWPNPEIPLEETLSAMAEGVRQGLIRYIGVSNFDRRLLEEAISKSQEPIVCDQVKYNIEDRDPERDGLLEFCQKNGVTLVAYSPLRRTLLSEKTKRTLEEIAKNHGATIYQIMLAWLLAKPNVVAIPKAGRVEHLRENLKATEIKLSEEEMKLLDSLG

SEQ ID NO: 2516 - protein, 509 aa, Rhodococcus ruber
MTGTLSRDSGTTNQVDERLGAAAREFLGRPHQLFIDGQWVDAADGRTFGTYDPATGAEITQVAHGGPEDVDRAVAAARRAFDDGDWATMKPNKREQILWRIGDLLDARGEMLGQIEALDNGKSAAIATAVDVTFAADVFRYYAGWCTKIEGTTVDVSMPFAGDKQFHAYTQRVPVGVCGQIIPWNFPLLMAAWKLAPALATGNTLVLKPAEQTPLTALLLGEIMAEAGVPDGVVNIITGFGDAGAAISAHDDVDKVAFTGSTEVGKLIVDAAKGNLKKVSLELGGKSANIVFADCDFDAAVAGSVAAWMFNHGQACTAGTRLYVEDSIYEKFTQAVADAAAQATIGHGLDPATELGPLVDQDQFDKVSYYLRAGIEDGGRALTGGGRHGDTGYFIQPTVFVDVEPDHRVVTDEIFGPVVAALRFSDMDDAVRQANDSIYGLAAGVWTKDISKAHKVASRLHAGSVWVNQYNGFDTAMPFGGFKQSGWGRELGKGALDLYTQTRSVNIQL

SEQ ID NO: 2517 - protein, 371 aa, Listeria monocytogenes str. 4b H7858
MEYKKALAFIKSNSILEQEEGTEVIFKQAQETVRGNLDPFLLKDLKQHLGGTNDAIKEAPQEIQMPDFSNLEIATAAALQMRATMGSPNIDLSNGVTTEYRVVEGDYGDIPVRIYRHEEATKPVPAFIFYHGGGFVGGTPAVVENFCKGIAEKLPAVVINVDYHLAPEFPAPAAPKDCYRALEWVVEQSDELGIDASKIGVSGDSAGGTLAAAVSYMDYEAETNYVGFQALLYPALTLVDEDNDKYQWDISKFGASEETLPLVAPGIIGMNSSGELLRTAYVRDENPASPIYSPLSAVDKSIYPPTLIASAEFDALRAFADIFAKELRASGVQTKVIVYQGMCHAFIDKYGIFPQAEDVADEIVQMMKEIF

SEQ ID NO: 2518 - protein, 439 aa, Pyrococcus furiosus DSM 3638
MIKIYTLGGYEEVGKNMTAVEYEGEIVIIDMGIRLDRVLIHEDVEFQKMSSKELRKLGAIPDDRPIRDKKVVAIALSHGHLDHIGAVGKLAPHYPDVPIYGTPYTIRLAKSEIKGEEYFEVTNPLYETNYGEIVQVSENLAIEFVQITHSIPHSSIVVIHTPEGAVVYACDYKFDNNHPYGEKPDYKRLKELGKEGVKVLIAESTRVAEETKTPSEAVAKMLLEDFFLYEGMEADGLIATTFASHITRLQALIEIANKMGRQAVFIGRSLAKYTGIAKQLGLIKMKGSRVLRSPNAISKVLKEVSQARENYLLVVTGHQGEPGAILTRMANGELYDIGPRDTVVFSAGVIPNPLNIAQRYALETKLRMKGVRMIKNLHVSGHASKEDHRYLIRMLNPENIVPAHGEFRMLTHYAELAEEEGYMIGKDVFISRNGHAITI

SEQ ID NO: 2519 - protein, 131 aa, Chlorella vulgaris
MSTKTNEILDILKSITLLEAAELVSQIEETFGVDASAPVGGGFMAAPGGAGTAAAEIVEEKTTFDVIIEDVASDKRVPVLKVVRNLTSLDLKEAKEAITSLPKVIQQGVSKDDAEASKKQLEDAGAKVKIS

SEQ ID NO: 2520 - protein, 168 aa, Zea mays
MAAASSATSVHDFTVKDSSGKDVDLSVYRGKVLLIVNVASQCGLTNSNYTQQAQLYDKYKNQGFEILAFPCNQFGGQEPGTNEEIAQFACTRFKAEYPIFDKVDVNGNNAAPIYKFLKSSKGGLFGDSIKWNFSKFLVDKEGRVVDRYAPTTSPLSIEKDIKKLLGSS

SEQ ID NO: 2521 - protein, 138 aa, uncultured Rickettsia sp.
ANEAVINMLKEIGSSENIPKYIAKAKDKNDPFRLMGFGHRVYKNYDPRAAVLKETCKEVLKELEQLENNPLLQIAIELEAIALKDEYFIERKLYPNVDFYSGIIYKAMGIPSQMFTVLFAIARTVGWMAQWKEMHEDP

SEQ ID NO: 2522 - protein, 662 aa, Zea mays
MISARTAAASPASLWKQGGRSEGGGSCDGCRTYRNTLRRAAAAKVRALPSRAVEAVKMGSAAEMEQEEAEVAAAAAGVVVEDHYGEDSATEELPILPWAFSVARYVSFSWLKKYAEESYFYISGYTLLRDPHHNKGLAFMEKERDAHHLRGLLPPAVVPQELQIKKIMHNLRQYQVPLQRYMAMMDLQERNERLFYKLLIDNVEELLPVVYTPTVGEACQKYGSIFRQPQGLYVSLRDKGKVLEVLRNWPHRNIQVICVTDGEAILGLGDLGSQGMGIPVGKLALYTALGGVRPSACLPITIDVGTNNEKLLNDEFYIGLRQKRATGEEYHELMEEFMAAVKQIYGEKVLIQFEDFANHNAFNLLAKYSKSHLVFNDDIQGTASVVLAGLLAALKVVGRTLAEHTYLFLGAGEAGTGIAELIALEISKQTSAPIEECRKKIWLVDSKGLIVDSRKNSVQSFKKPWAHEHEPLTTLYDAVQSIKPTVLIGTSGVGRTFTKEVVEAMASFNERPIIFSLSNPTSHSECTAEEAYNWTQVVIFASGSPFDPVEYDGKVFVPGQSNNAYIFPGFGLGLVISGAIRVHEDMLLAASEALAAQATQENFDKGSIFPPFTNIRKISARIARAVAAKAYELGLATRLPPPRDLVKYAQSCMYTPVYRNYR

SEQ ID NO: 2523 - protein, 345 aa, Pyrococcus horikoshii
MYKVAVIKGDGIGPEVIDAAIRVVKSVTDKIKFYEFEGGLSVFKKYGVPIREEDLEEIRKMDAILFGATTTPFDVPRYKSLIITLRKELDLYANLRIIPNFKLRKEIIIVRENSEGLYSGEGAYDSNKVVDFRIITRKGAERIAKFAVKLAKDRSTFLTFVHKANILESDRFFRKIVLDIARKEDVKVREEIVDSFTIKLVKDPWNLGIILSENMFGDILSDLATIHAGSIGIVPSGNYGEDIALFEPIHGSAPDIAGKGIANPIGAILSAAMMLDYLGLDGSIIWKAVGRYVRRGNLTPDMEGRATTLEVTNGIISEIYRLDEYEIDEVWRDEVRLGRILLEIS

SEQ ID NO: 2524 - protein, 192 aa, Methanothermobacter thermautotrophicus str. Delta H
MAHGPRYKLAFRRRREGKTDYRARYKMVETGKSRLVVRITTYHVIAQIINVGMNGDETLVSAHSKQLQKMGWLGGTSNTAAAYLTGYLCGKRALKEGIEEAVLDIGLRPAIRGSKVFAALKGAVDAGLNVPHGESVLPDESRIRGEHIMEYAESLDEEELRKRFSKYLERGLSPVDLPEHFDEIKKRIDEEV

SEQ ID NO: 2525 - protein, 335 aa, Streptococcus pneumoniae R6
MKRIAVLTSGGDAPGMNAAIRAVVRQAISEGMEVFGIYDGYAGMVAGEIHPLDAASVGDIISRGGTFLHSARYPEFAQLEGQLKGIEQLKKHGIEGVVVIGGDGSYHGAMRLTEHGFPAIGLPGTIDNDIVGTDFTIGFDTAVTTAMDAIDKIRDTSSSHRRTFVIEVMGRNAGDIALWAGIATGADEIIIPEAGFKMEDIVASIKAGYECGKKHNIIVLAEGVMSAAEFGQKLKEAGDISDLRVTELGHIQRGGSPTPRDRVLASRMGAHAVKLLKEGIGGVAVGIRNEKMVENPILGTAEEGALFSLTAEGKIVVNNPHEADIELSSLNKSLS

SEQ ID NO: 2526 - protein, 156 aa, Euphorbia esula
HEDHFESKADAGASKTYPQQAGTIRKNGYIVIKNRPCKVVEVSTSKTGKHGHAKCHFVGIDIFNGKKLEDIVPSSHNCDVPHVTRTDYQLIDISEDGFVSLLTENGNTKDDLRLPTDESLLSQIKDGFGDGKDLVVTVMSSMGEEQICALKDIGPK

SEQ ID NO: 2527 - protein, 234 aa, Zea mays
  misc_feature (81)..(81): Xaa can be any naturally occurring amino acid
SDSDHCHSARYYLKDAVLDGGIPFNKAYGMTAFEYHGTDPRFNRVFNEGMKNHSVIITKKLLDFYTGFEGVSTLVDVGGGXVGATLHAITSRHPHISGVNFDLPHVISEAPPFPGVRHVGGDMFASVPAGDAILMKWILHEWSDAHCATLLKNCYDALPENGKVIVVECVLPVNTEATPKAQGVFHVDMIMLAHNPGGKERYEREFRELAKGAGFSGFKATYIYANAWAIEFIK

SEQ ID NO: 2528 - protein, 475 aa, Rickettsia rickettsii
MNLLKNITGKNYINGEFIEFGKQISVINPATLKEIATVPNLGLSEINSAINNTVTSFALWSQSSFEARIAILRRWYNLVIENIEELSHILTLEQGKVLAESKKEILYGASFIDWYTYAIHNIHSTIKPGNSNTHKIVTQYEPVGPSAAITPWNFPNAMIARKVVPAIAAGCSVILKPSSLTPLSALVLAKFASDAGLPSGVFNVITGSSDIIGKAFCEDFRLRKLSFTGATNVGKILYQNAANTLKRLSLELGGNAPFIITADNNLEKVVSDLVIAKTRNSGQSCTSPNRIFIEESIYEKFIEILKAKFTKLKAGDGFDKESDVGPLINSAAIEKIQKLLADAQSKGAKLICGGKTVDNFIEPTIIIDCLDNMDIFRIEIFGPVVACYKFKDLDEVIEHANNTEYGLQGYVYSNNISVAQMIASKLDFGMVSINDPLPANAKAPFAGRKASGFGVEGSFEGIFEYLNTKYINLQN

SEQ ID NO: 2529 - protein, 489 aa, Halomonas elongata
MTAQSAQPLYIGGRPVDATSGETFTVTNPYDGSLLATIGQASQADVDSAVQAAQRGQREWAAMTGMERSRILLRAVALLRERNDELAELETRNTGKPISETASVDIVTGADALEYYAGLAPAIEGSQIPLRDTRLVYTRREPLGVIGAIGAWNYPIQIACWKAAPALAAGNAIVFKPSEVTPLTALKLAEIFTEAGLPDGVFNVVQGDGRVGAMLTEHEGIAKVSFTGEVGTGKKVMAAAGGSTLKDVTMELGGKSPLIVFADADLDRAADAAMMANFYSSGQICTNGTRVFVERSAKEAFEAKLVERVARIKAGDPMDPSVNFGPLVSFEHQEKVLSYIALGKEQGARVLAGGDAWNSGEWAKGAWAAPTVFTDCTDEMRVVKEEIFGPVMSVLAFDDEEEVIRRANNTKYGLAAGVFSESLNRAHRVIHQLEAGICWINTWGESPSEMPVGGYKESGIGRENGVETLNHYTQTKSVQIEMGPFESVF

SEQ ID NO: 2530 - protein, 51 aa, Phaseolus vulgaris
MKQFRVLTCQTVADMIKGKTPEEIRKTFNIKNDFTPEEEEEVRRENQWAFE

SEQ ID NO: 2531 - protein, 171 aa, Zea mays
  misc_feature (37)..(37): Xaa can be any naturally occurring amino acid
MAATAMMASSDTAGAAFQGLKCTVSLPIVRRSFRSLXGNVSNGGRIRCMQVWPAYGNKKFETLSYLPPLSTDDLLKQVDYLLRNGWIPCLEFSKVGFVYRENSTSPCYYDGRYWTMWKLPMFGCNDATQVYKELQEAIKSYPDAFHRVIGFDNIKQTQCVSFIAYKPPGSD

SEQ ID NO: 2532 - protein, 182 aa, Betula pendula
MACSMISSATVAAVSRASPAQSSMVAPFTCLKSTSAFPVTQKTNNDITSIASNGGRVQCMQVWPPLGLKKFETLSYLPPLSSEQLAKEVDYLLRKNLIPCLEFELEHGFVYREHNRSPGYYDGRYWTMWKLPMFGCNDSSQVLKELEECKKAYPSAFIRIIGFDNKRQVQIISFIAYKPPGV

SEQ ID NO: 2533 - protein, 434 aa, Salmonella enterica subsp. enterica serovar Typhi Ty2
MKTRTQQIEELQKEWTQPRWEGITRPYSAEEVVKLRGSVNPECTLAQLGAAKMWRLLHGEAKKGYINSLGALTGGQALQQAKAGIEAIYLSGWQVVADANLASSMYPDQSLYPANSVPAVVDRINNTFRRADQIQWASGIEPNDPRYVDYFLPIVADAEAGFGGVLNAFELMKSMIEAGAAAVHFEDQLASVKKCGHMGGKVLVPTQEAIQKLVAARLAADVMGVPTLVIARTDADAADLITSDCDPYDSGFITGERTSEGFYRTHAGIEQAISRGLAYAPYADLVWCETSTPDLELARRFADAIHAKYPGKLLAYNCSPSFNWQKNLDDKTIASFQQQLSDMGYKYQFITLAGIHSMWFNMFDLAHAYAQGEGMKHYVEKVQQPEFAAAKDGYTFVSHQQEVGTGYFDKVTTIIQGGASSVTALTGSTEESQF

SEQ ID NO: 2534 - protein, 187 aa, Triticum aestivum
  misc_feature (19)..(19): Xaa can be any naturally occurring amino acid
  misc_feature (30)..(30): Xaa can be any naturally occurring amino acid
  misc_feature (68)..(68): Xaa can be any naturally occurring amino acid
  misc_feature (104)..(104): Xaa can be any naturally occurring amino acid
  misc_feature (139)..(139): Xaa can be any naturally occurring amino acid
  misc_feature (148)..(148): Xaa can be any naturally occurring amino acid
  misc_feature (156)..(156): Xaa can be any naturally occurring amino acid
  misc_feature (184)..(184): Xaa can be any naturally occurring amino acid
MKTLLILTILAMAITIGTXANIQVDPSGQXVNWLQQQLVPQLQQPLSQQPQQTFPQPQQTFPHQPQQXQVPQPQQPQQPFLQPQQPFPQQPQQPFPQTQQPQAXPFPMQPQQPFPQTQQPQQPFPQQPQQPFPQTQQPXQPFPQLQQXQNLFPSPXQQLPAAQQPEQSFPQQQRSFIQPSLQQXVEP

SEQ ID NO: 2535 - protein, 414 aa, Escherichia coli
SKVVVPAQGKKITLQNGKLNVPENPIIPYIEGDGIGVDVTPAMLKVVDAAVEKAYKGERKISWMEIYTGEKSTQVYGQDVWLPAETLDLIREYRVAIKGPLTTPVGGGIRSLNVALRQELDLYICLRPVRYYQGTPSPVKHPELTDMVIFRENSEDIYAGIEWKADSADAEKVIKFLREEMGVKKIRFPEHCGIGIKPCSEEGTKRLVRAAIEYAIANDRDSVTLVHKGNIMKFTEGAFKDWGYQLAREEFGGELIDGGPWLKVKNPNTGKEIVIKDVIADAFLQQILLRPAEYDVIACMNLNGDYISDALAAQVGGIGIAPGANIGDECALFEATHGTAPKYAGQDKVNPGSIILSAEMMLRHMGWTEAADLIVKGMEGAINAKTVTYDFERLMDGAKLLKCSEFGDAIIENM

SEQ ID NO: 2536 - protein, 116 aa, Glycine max
  misc_feature (19)..(19): Xaa can be any naturally occurring amino acid
FELADVAPISTYVDSGERXYFVADERGYDHWLCITADEFLFTSKGRILDNRLKLITVVRDSQYSKSGVTAKTNDGCINHTNPVMLPASIAVLQSDLLALHPPSPVRPFFFVQLSLA

SEQ ID NO: 2537 - protein, 331 aa, Methylobacillus flagellatus KT
MNILDPIMHTLMPETDQYSGMEPKTRAFLEELAASDSKPVEALSPEEARKVLSDLQAGVDVELGGVTVEEREIAIEGHSIHLFIVKPADIAISPPVVMFFHGGGWVLGDFPTHQRLVHDLCVASNCAVVFVDYSRSPEVKYPTAIIECYLATKWVAQNGAEIGVDPARLAVAGNSAGGNMAAVVCMMAKEKREPFIKHQTLFWPVTDARFNTDSYQQFDEGYFLTRNMMKWFWDNYLENKDARKEIYASPLNASLEHLADLPPALIQTAEFDVLRDEGEAYAHLLMDAGVSVTCTRYLGAIHDFGLLNPLAKTPQAYASIMQAAGEIRKHI

SEQ ID NO: 2538 - protein, 192 aa, Ralstonia solanacearum
MTPAPSTLWLTGLSAAGKTTLAHALAEALTAAGAACQVLDGDVVRQALSRDLGFSRADRSQNIRRVADRCRQLNDAGSWAIAAVISPYRADREQARRTVGEPRFFEIHLATPLTVCERRDPKGLYRRARAGEIAHFTGISDAYEVPQHPDLRFDTATRSVAECVDATMALLAAVSGNVMTLSSESVSNAGSI

SEQ ID NO: 2539 - protein, 251 aa, Fucus vesiculosus
MASRDDLVYMAKLAEQAERFDEMVDHMKAVAQQPKELSVEERNLLSVAYKNVIGSRRASWRVISSIEGKDTVSDQLPLIRDYKSKIETELTDICADILKIIEAELIPNSTSEEGKVFYYKMKGDYHRYLAEFQSADERKTSASDALDAYQLASDHANQDLPPTHPIRLGLALNFSVFYYEILNSPDRACGLAKAAFDDAIAELDTLSEESYKDSTLIIMQLLRDNLTLWTSDQGEAEEAPGNADGTVVEDL

SEQ ID NO: 2540 - protein, 151 aa, Brassica napus
  misc_feature (9)..(9): Xaa can be any naturally occurring amino acid
  misc_feature (11)..(11): Xaa can be any naturally occurring amino acid
  misc_feature (18)..(18): Xaa can be any naturally occurring amino acid
  misc_feature (21)..(21): Xaa can be any naturally occurring amino acid
  misc_feature (29)..(29): Xaa can be any naturally occurring amino acid
  misc_feature (34)..(35): Xaa can be any naturally occurring amino acid
  misc_feature (38)..(40): Xaa can be any naturally occurring amino acid
  misc_feature (47)..(49): Xaa can be any naturally occurring amino acid
  misc_feature (53)..(53): Xaa can be any naturally occurring amino acid
  misc_feature (57)..(59): Xaa can be any naturally occurring amino acid
  misc_feature (67)..(68): Xaa can be any naturally occurring amino acid
  misc_feature (79)..(79): Xaa can be any naturally occurring amino acid
  misc_feature (82)..(82): Xaa can be any naturally occurring amino acid
  misc_feature (91)..(91): Xaa can be any naturally occurring amino acid
  misc_feature (96)..(96): Xaa can be any naturally occurring amino acid
  misc_feature (99)..(99): Xaa can be any naturally occurring amino acid
  misc_feature (101)..(101): Xaa can be any naturally occurring amino acid
  misc_feature (103)..(103): Xaa can be any naturally occurring amino acid
  misc_feature (105)..(106): Xaa can be any naturally occurring amino acid
  misc_feature (119)..(119): Xaa can be any naturally occurring amino acid
  misc_feature (121)..(121): Xaa can be any naturally occurring amino acid
  misc_feature (123)..(123): Xaa can be any naturally occurring amino acid
  misc_feature (127)..(127): Xaa can be any naturally occurring amino acid
  misc_feature (135)..(135): Xaa can be any naturally occurring amino acid
  misc_feature (142)..(142): Xaa can be any naturally occurring amino acid
  misc_feature (144)..(144): Xaa can be any naturally occurring amino acid
MASSMLSSXAXVTSPAQXTMXAPFTGLKXSAAFXXTRXXXNDITSFXXXGGRXSCMXXXPPVGKKKXXTLSYLPDLTEXELXKEVDYLLRXKWIPXVEXEXEXGXXYREHGSTPGYYDXRXWXMGKXPLFGCTDXAQVLKEXQXCKTEYPN

SEQ ID NO: 2541 - protein, 314 aa, Aspergillus flavus
MGTPFAAPWHQFVEDLGQTPCLPGKDLDSILAGWGQLAGTLATRYGFPPPDESVTTEDVQLDGLWLRCYTPPNATGQEPVGLYFHGGGWVMGGVNEEDGFCRVISRQCQMRLVSVEYRKAPETRYPGALNDGVSAALWALSRYENQPLILMGTSAGGNLAFGTALRLIDQDMADKVSGVVALAPITVHPDAVPEHLKEQYTAYEENAELTVNSRAAMQVFFDCYKAPVDDVYTSCLLHPRLLALPKVYIAELGLDTLRDDARLMKGALDTAKVPVMYDAYPGYPHCSFMFPFKSLGEHQRTFFGGVAKAVRWMS

SEQ ID NO: 2542 - protein, 429 aa, Mycobacterium tuberculosis
MASVVGTPKSAEQIQQEWDTNPRWKDVTRTYSAEDVVALQGSVVEEHTLARRGAEVLWEQLHDLEWVNALGALTGNMAVQQVRAGLKAIYLSGWQVAGDANLSGHTYPDQSLYPANSVPQVVRRINNALQRADQIAKIEGDTSVENWLAPIVADGEAGFGGALNVYELQKALIAAGVAGSHWEDQLASEKKSGHLGGKVLIPTQQHIRTLTSARLAADVADVPTVVIARTDAEAATLITSDVDERDQPFITGERTREGFYRTKNGIEPCIARAKAYAPFADLIWMETGTPDLEAARQFSEAVKAEYPDQMLAYNCSPSFNWKKHLDDATIAKFQKELAAMGFKFQFITLAGFHALNYSMFDLAYGYAQNQMSAYVELQEREFAAEERGYTATKHQREVGAGYFDRIATTVDPNSSTTALTGSTEEGQFH

SEQ ID NO: 2543 - protein, 386 aa, Aspergillus flavus
MTGLDMETIFAKIKEEYARTDDVGKRKIQGHIRELQVGFYSDWDVVMRLSSGPLQVALAKVGIDLGIFRSLKESDTPIALAEFVKKTGASPRLLGRILRTQAAFGLIKETGPQEYTSSAFTDVFANPAAAGAVVQLFDISGPCTQILPDFLAERHYQDITSNKDCVFQKAFDSDLTMFEWMPQHPKHMESLGHLMALERPVSWVDHFPVLEELGDFPAPDKVLMVDIGGGFGQQSKALRAKFPNIPGRVIVQDIPQTLANAQPAAGVEFMEHNFFESQPIRNAKFYYLRHVFHDWPDEQCVLILKQIIPVMGPESEILIDEMVIPSTGVPWQAAFTDLLMMNSLGGVERTRAEWDDLMKQAGLEIIQSKVYDSKEQTILVAVPRRT

SEQ ID NO: 2544 - protein, 285 aa, Triticum aestivum
MKTLFILTILAMATTIATANMQVDPSGQVQWPQQQPFRQPQQPFYQQPQQTFPQPQQAFPHQPQQQFPQPQQPPQQFPQPQQPQQPFPQPQQAQLPFPQQPQQPFPQPQQPQQPFPQSQQPQQPFPQPQQPQQSFPQQQQPLIQPYLQQQMNPCKNYLLQQCNPVSLVSSLVSMILPRSDCQVMQQQCCQQLAQIPRQLQCAAIHSVVHSIVMQQEQQQGIQILRPLFQLVQGQGIIQPQQPAQYEVIRSLVLRTLPNMCNVYVRPDCSTINAPFASIVAGISGQ

SEQ ID NO: 2545 - protein, 301 aa, Hordeum vulgare
MATKARKVEVRDASRAEGKGDAADVHVLREAMRADGKGDHDTAGGANRADGHGDAGGRVGDSRGVDGKDSLKMVALQAPVTVERPVRGDLEEHVPKPYLARALAAPDMYHPEGTTTDDHQHHNMSVLQQHVAFFDRDNNGIIYPWETYDGCRAVGFNVFMSAFIAFLVNLVMSYPTLPGWLPNPLFPIYVHNIHKSKHGSDSGTYDKEGRFMPVNFENIFSKYARTYPDRLSYREMWRMTEGCREVFDFFGWVAMKLEWSILYALARDDEGYLSREAIRRMYDGSLFEYMERQRMEHVKMS

SEQ ID NO: 2546 - protein, 134 aa, uncultured Rickettsia sp.
ANEAVINMLKEIGSSENIPKYIAKAKDKNDPFRLIGFGHRVYKNYDPRAAVLKETCKEVLKELGQLENNPLLQIAIELEAIALKDEYFIERKLYPNVDFYSGIIYKAMGIPSQMFTVLFAIARTIGWMAQWKEM

SEQ ID NO: 2547 - protein, 145 aa, Triticum aestivum
  misc_feature (134)..(134): Xaa can be any naturally occurring amino acid
YAAAVVAAVGRVCDRKGVQHPVICSESGRALVSHHSVLIFEAFSATAPASNMMDPATAYLLDELTDDCRSDYRNLMASAVRGDFDTCGLYADQLKRRCAEQFKEGVLGLEHLAAVDGLCEIVARGMGAAEGPRXVHINLSVFTSL

SEQ ID NO: 2548 - protein, 429 aa, Mycobacterium tuberculosis
MASVVGTPKSAEQIQQEWDTNPRWKDVTRTYSAEDVVALQGSVVEEHTLARRGAEVLWEQLHDLEWVNALGALTGNMAVQQVRAGLKAIYLSGWQVAGDANLSGHTYPDQSLYPANSVPQVVRRINNALQRADQIAKIEGDTSVENWLAPIVADGEAGFGGALNVYELQKALIAAGVAGSHWEDQLASEKKCGHLGGKVLIPTQQHIRTLTSARLAADVADVPTVVIARTDAEAATLITSDVDERDQPFITGERTREGFYRTKNGIEPCIARAKAYAPFADLIWMETGTPDLEAARQFSEAVKAEYPDQMLAYNCSPSFNWKKHLDDATIAKFQKELAAMGFKFQFITLAGFHALNYSMFDLAYGYAQNQMSAYVELQEREFAAEERGYTATKHQREVGAGYFDRIATTVDPNSSTTALTGSTEEGQFH

SEQ ID NO: 2549 - protein, 398 aa, Methanosarcina mazei Go1
MNEQGLSEREIFSYLENAKSEDTDYYRVFSSMCTRPHKIAIEANRLFIEANLGDLGLFAGAHKLEQEVVRMLGNLLHASSIDVPSGGLCQSSVCGYLTTGGTESNIQAVRGMKNLVTAGKKEFKGTPNIVIPASAHFSFDKVADMMGIEVRRASLDSEFRVDMASVEKLINENTIGLVGIAGNTEFGQIDPIDKLSEVALENELFLHVDAAFGGFVIPFLEKPQPFDFKVPGVTSIAIDPHKMGLSTIPSGALLFRSPSFLDSLKVSTPYLTTKSQFTLTGTRSGASAAATCAVMKYLGYEGYRKNVQYCMELTSKIVEEARKLGFEPLIEPVMNVVALKVPNPDLVRERLLKKFGWNVSITRTPRALRLVLMPHNSPEDIELFLEDLKKVTAEIKSP

SEQ ID NO: 2550 - protein, 227 aa, Eucalyptus grandis
MAREKIQIKKITNATARQVTFSKRRRGLFKKAEELSVLCDADVALIVFSSSGKLFEYCSSSMKEILERHHSHSENLGKLDQPSLKLQLVENGDYSRLSKEVAEKGHQLRQMRGEELQGLNIDELQQLEKSLEAGLNRVIEKKGEKIMKEITDLQQKGAKLMEETKRLKQQVTEISGRKTTATDSETIINEEGLSSESITNVCSSSSGPPQEDDSSDISLKLGLPYNG

SEQ ID NO: 2551 - protein, 246 aa, Hordeum vulgare
MAGEDATRAATEEELSSVAEAAPVTAQRPVRSDLEKYIPKPYLARALVAPDVYHPQGSKERGHEHRHRSVLQQHVAFFDMDGDGVIYPWETYQGLRALGFNMIVSFVIVIIIHATLSYTTLPSWVPSLLFPFYIDNIHRAKHGSDTATYDTEGRYMPVNFENIFSKNARSSPDKLTFREIWTMTDDQRQANDPFGWVASKAEWILLYMLAKDEEGNLPREAIRRCFDGSLFEFIADERRQAHGKQY

SEQ ID NO: 2552 - protein, 285 aa, Thermosynechococcus elongatus BP-1
MSPIIQWYPGHIAKAERALKEQLKQVDVIFEVRDARIPLASCHPQIRQWASGKQRLLVLNGMDRISDRDRQQWLTWFETQGETVFFTNAQRGEGIRRLEQAAVRAGAAINQRRQQRGMQVRAVRAVVLGFPNVGKSALINRLLQQRVVESAARPGVTRQLRWVRLSPVLELLDAPGVLPMNFKNQEAAVKLAICDDIGQAAYDPCRVAPMLVEIMQQLGYAERLRDRYGLALTDTGETYLYDLAARRYHGDLERAARQLLQDYRRGYLGAIALEHPPQSRNSTIP

SEQ ID NO: 2553 - protein, 294 aa, Arabidopsis thaliana
MGEVWRWNKEVEMDSIRDCLKHFSSIAIDTEFPGCLKETPMDASEEIRYRDMKFNVDNTHLIQLGFTLFDRRGITKTWEINLSDFNEHKCFKNDKSIAFLKSNGLNLDKIGEEGIGIEEFFRDFSQILKEKDGKITWVNFQGSYDNAYLVKGLTGGKPLPETKEEFHETVEQLLGKFVFDVKKIAESCSGLSSRFGLQRIADVLQMKRVGKAHHAGSDSELTARVFTKLTFDLLNSRKQCVRRVDHQQYQLEQQQLMMTRCYIPIPIPIPRPRSVMFAAHHPNPYFGGGYFGMP

SEQ ID NO: 2554 - protein, 264 aa, Oryza sativa (japonica cultivar-group)
MDAAAAAGGEMSRQKATASAPPPPELDMVARAVQRLVARNDAVEALSGGGEAAAGLGAGMAAFEAARGAPAPRIGVAQYLERVHRYAGLEPECYVVAYAYVDMAAHRRPAAAVASRNVHRLLLACLLVASKVLDDFHHNNAFFARVGGVSNAEMNRLELELLAVLDFEVMLSHRVYELYREHLEKEARRDGGGGDMLAGASAAAAAKAGRMAAVSPSKLLERAAVNGAAQHDDWRSLGTAAAAEAANGVRRHRSSSSSRYSFDC

SEQ ID NO: 2555 - protein, 143 aa, Triticum aestivum
  misc_feature (38)..(38): Xaa can be any naturally occurring amino acid
  misc_feature (97)..(97): Xaa can be any naturally occurring amino acid
  misc_feature (102)..(102): Xaa can be any naturally occurring amino acid
  misc_feature (113)..(113): Xaa can be any naturally occurring amino acid
  misc_feature (121)..(122): Xaa can be any naturally occurring amino acid
  misc_feature (140)..(140): Xaa can be any naturally occurring amino acid
MSDTDEHHFESKADSGASKTYPQQAGAIRKGGHIVIKXRPCKVVEVSTSKDWGSMGHAKVSLWLPFDIFKWEKKLEDIVPSSHNCDSPMFDRQDYQXLIDIXDDGMSTFSLEXGNTKGDLXXPLDDVLLGQVQDGFADGXDCL

SEQ ID NO: 2556 - protein, 389 aa, Gloeobacter violaceus PCC 7421
MTGSLLDQLRQMTIVVADTGDIQAIEQFTPRDATTNPSLITAAAQMPQYQQIVDDTLKQARAELGPEAKAAAVATLAFDRLAVAFGLKILAIVPGRVSTEVDARLSYDTEATIEKGRSLIAQYEAAGISRERVLIKIASTWEGIRAAEILEDEGIHCNLTLLFGVHQAIACAEAGVTLISPFVGRILDWYKKETGRDYEPHEDPGVVSVTTIYNYYKKFGYQTQVMGASFRNIGEIVELAGCDLLTISPKLLEQLQATDAELVRKLDPDQAAGLEIEKIDMDQATFEKRHAEDRMASEKLDEGIKGFTNALVALEKLLADRLARLEGEVALNQAFESIFRTFDLDGDGFITREEWMGTDAVFDAIDLNHDGKITAEELGAGIGAVSKLA

SEQ ID NO: 2557 - protein, 116 aa, Brassica napus
STHASVHGVYDLAYLLKVLIIQDLPEKPKGFDELIRLYFPRFCDIKHLMKFCIGLSGGLNKLAELLGVERLGISHQAGSDSLLTSRIFMILQDSFFNGSVEKYSGVLFGFSVENDH

SEQ ID NO: 2558 - protein, 363 aa, Aspergillus niger
MPAYNIVVFAGDHWGPEVTAEAIKVLRVIEKSRDDITLNLQDHLLGGASIDATANPLTDEALAAAKNADAVLLGAIGGPKWGTGAVRPEQGLLNVRKEMGTFGNLRPCNFAAPSLVEHSPLKASVCEGVDFNIIRELTGGIYFGDRKKMTAAATMDTEPYSRAEIERITPRAHLALQHNPPLPVWSLDKANVLATSRLWRKTVTEIMAKEFPQLKIEHQLIDSAAMIMVKNPRQLNGIIVTSNLFGDIISDEASVIPGSLGLLPSASLSGIPDGKGRVNGIYEPIHGSAPDIAGKGIVNPVAAILSVAMMMQYSFGRFDEARAIEAAVRNVLESGVRTGDIGGKATTSEVGDAVAAELEKLLK

SEQ ID NO: 2559 - protein, 155 aa, Brassica napus
MTSASELFSTRRSRPGRSDPDLESDPSLYRHHHHRRHGLHHHNHRHDSDGCDSPRPRLQRFCHHLGLPERRPARDVQGTPQYLESESYSLGILNGSERLPGSVLLARARLVQRLRGVSLSTNRSVQMESSFQVSYECNKKPHGLTQGAIDGLHRA

SEQ ID NO: 2560 - protein, 371 aa, Aspergillus niger
MSGTRAYNILVLPGDGIGPEVMAEAIKVLRTFNSSSMQFHLQEELIGGISIDTHGHSVTQPVKDAAVAADAVLFAAVGGSKVDHIRRGLDGPEGGLLQVRKAMDIYANLRPCSVDVPSREIARDFSPFRQEVIEGVDFVVVRENCGGAYFGKKVEEENYAMDEWGYSTTEIQRIARLAAELALRHDPPWPVISLDKANVLASSRLWRRVVENTISVEYPQVKLVHQLADSASLIMATDPRVLNGVILADNTFGDMLSDQAGSLIGTLGVLPSASLDGLPHPGKQEKVRGLYEPTHGSAPTIAGKNIANPTAMILCVSLMFRYSFNMENEARQIEDAVRAVLDRGLRTPDLGGNSSTQEFGDAVVAALQGKY

SEQ ID NO: 2561 - protein, 401 aa, Vibrio vulnificus YJ016
MKPSDDKRSAREQSQTEKEFKMPSSLTKKGELGGAGLRGQSAGSTALCTVGKTGTGLTYRGYDITDLANHAQFEEVAHLLLRGHLPTQQELDAYKTRLIGLRGLPAELKQALELIPASAHPMDVMRTGCSVLGNLEQETDFSQQLDATERMLALFPAIICYWYRFSHDGVRINTQDQSQDCIGGYFLKMLTGKEPSELHKQVMHCSLILYAEHEFNASTFAARVCASTLSDIHSCVTAAIGTLRGPLHGGANEAAMEMIENWQTPEEAESNILRMLANKEKIMGFGHAIYRESDPRNALIKRWSKALSEAVGDTHLYAVSERVEAVMKREKDLFCNADFFHASAYHFMDIPTKLFTPIFVMSRLTGWTAHVFEQRANNRIIRPSADYIGPDHQDWVPIEQR

SEQ ID NO: 2562 - protein, 233 aa, Musa acuminata
RIENKINRQVTFSKRRNGLLKKAYELSVLCDAEVALIIFSSRGKLYEFGSVRMSKTLERYQHWCYASQDPNVVNRDNAQNWCQEMSKLKAKFESLQRSQRHLLGEDLGPLSVKELQQLERQLESALSQARQRKSQLILEQMEELRKKERHLGEINKQLRDQIEVEGATLKAFQGSWCSDAMIGSNAFAAQPSHSAGMDREPMLRIGYHQFVPADAAIPRNPIGENNFMLEWVP

SEQ ID NO: 2563 - protein, 433 aa, Oryza sativa (japonica cultivar-group)
MCCVSPSPSASATSSRRGQIIAPDSPPSLRSYSDDSPPSTRAPAVHPEVEFEAKPAKRARVVPGGGGGGGGADAAAGDGRDRISDLPDAVLLSILSFLPFRDAGRTAVLSRRWRKLFDESLLDFNACQPFPPEEGRGCEWVIRSITDILAARPDVRIRSFRFVMYGQGFADHLADVDRWFRTLAHRGVRQLDVDMLYTVPAPLLPGSILEFSSLEILRVFNCNFLDLSLPVLRLPVLRTLDLSNVSMSQGFLQAMMSNCPSLECTKLKNITGLDKICVRSRNLVRLFGDFSYLKELVVEDAPNLEELVGIGLPLAAAKVKIVFAPKLRPDSRSICRPVDVEEWDTITSVQCIEHSMNKLVFEDFGGEDCQWRFLTFLLGMARALKDIDFHCSESKDWASLKLCETESSSIVQSSTKNKWRCSFVDCGLIRSVV

SEQ ID NO: 2564 - protein, 396 aa, Shigella flexneri 2a str. 301
MLDAQTIATVKATIPLLVETGPKLTAHFYDRMFTHNPELKEIFNMSNQRNGDQREALFNAIAAYASNIENLPALLPAVEKIAQKHTSFQIKPEQYNIVGEHLLATLDEMFSPGQEVLDAWGKAYGVLANVFINREAEIYNENASKAGGWEGTRDFRIVAKTPRSALITSFELEPVDGGAVAEYRPGQYLGVWLKPEGFPHQEIRQYSLTRKPDGKGYRIAVKREEGGQVSNWLHNHANVGDVVKLVAPAGDFFMAVADDTPVTLISTGVGQTPMLAMLDTLAKAGHTAQVNWFHAAENGEVHAFADEVKELGQSLPRFTAHTWYRQPSEADRAKGQFDSEGLMDLSKLEGAFSDPTMQFYLCGPVGFMQFTAKQLVDLGVKQENIHYECFGPHKVL

SEQ ID NO: 2565 - protein, 426 aa, Mycoplasma penetrans HF-2
MLLKNCSILKNNKLIKSDILIKNNRIIKIAKKIENKNNEEEIDIKSNLVIPGLIDVHVHFREPGFIHKETIKTGSMSAAKGGFTTVMTMPNLNPVPHNLENLNVQLDLIKRHSVIRCIPYGSISVDENGEQLSDVENLSKYVFGFSDDGKGIQNNNLMYQAMLLAKKHNKPICAHCEDNSLANKGVINEGVASEKLNLKGINPLAETIQIARDLVLAKATKCHYHVCHVSTKESLELIKEAKKKKINVTCEVTPHHLLSIDQDILNDNGKWKMNPPLRSIQDQKALIKAVKNKLIDIIATDHAPHSKQEKNCSFNDAAFGIIGSEFAFSLLYTKFVKTKVFSLQLLVDLFTKNVAKIFKLPYGVLEENKIADLAVFDLNKSFEIKEDEILSKSKNTPYLNQKVYGVSLLTISNGKIVYLNEKELSV

SEQ ID NO: 2566 - protein, 488 aa, Bacillus halodurans
MAHTVSEQRIHEVGSMKRDHYRMVINGERVDSDETFETFNPAKGEILATVAKASREHAEKAVQAARHAFDHGKWRKYPVGKRARVLNQIAAIMRERFQELVEIEVLNSGKAISAAQPQINQAIEDFEFYAGAIVGHRGTVNNVPNGFLNYTQKEPVGVCAQIIPWNYPLMMAAWKVAPALAAGCSVVVKPASLTPITAILLNEICHEAGVPEGVVNTVAGAGSVVGDYLVGHEDVNKVAFTGSTPIGKDIMEKASHTLKRVTLELGGKSPNLVFADADMEAAVAGSLFGIYFNTGQSCEARSRLFVHEEIYDEFIEEFITRAKKLQLGDPFDKGTHVGSIISRDQLEIIDSYVRSAEEEGATIALGGKERRVEGFENGHWYEPTVITNVTPDMKAVQEEIFGPVVVVETFQDEREVIKRANDTKFGLGSAIWTKDQGRATRVAHQLEAGIVMVNCPFSAFPGTPFGGYKESGFGRELCVETLDLYIGR

SEQ ID NO: 2567 - protein, 368 aa, Nostoc sp. GSV224
MPLAAVMTAPNQPVEVQQLPDPILEKGGIILETLYSEVCGTDVHLLHGRLEGVPYPIIPGHFSVGRVVETGGAVSDVNGKLIQPGAIATFLDVHETCYNCWYCLVAKASTRCPQRKVYGVTYSAKDGLLGGWSELIYLKPGVKVLTLPEEVSPKQFIAGGCALPTALHAIDRAQIQIGDVVVVQGCGPVGLSAAILALLSGAGKVIVIDKFESRLVVAKSFGVDETLAIKADDPRQHIERVLELTNGHGADVTIEATGIPIAVKEGLNMTRNGGRYVIVGHYTNTGEILINPHLEINLKHIDIRGTWGIDFSHFYRMIELLKRHSDSSKNIAWSSIISRSYTLKEINQALADVEQGSVLKAVIQPNLS

SEQ ID NO: 2568 - protein, 235 aa, Musa acuminata
RIENKINRQVTFAKRRNGLLKKAYELSVLCDAEVALIVFSNRGKLYEFCSSSSMLRTLERYQKCNYGAPETNIISRETQSSQQEYLKLKARVDGLQRSQRNLLGEDLGPLNIKELEQLERQLDASLRQIRSTRTQYMLDQLGDLQRLGTNAMWSLIKPWKIRLEESSEADQQQLWDPNTHAVAYGRQQPQPQGDGFFQFIDCEPTLQIGYHPDQMAIAAAAAAAPGPSYMPGWLA

SEQ ID NO: 2569 - protein, 440 aa, Triticum aestivum
  misc_feature (128)..(128): Xaa can be any naturally occurring amino acid
  misc_feature (200)..(200): Xaa can be any naturally occurring amino acid
  misc_feature (311)..(311): Xaa can be any naturally occurring amino acid
MSNYHDDHVEDMEDDYDMDDPAEDMVDAHHERGLRDSDSEDDEYAHSNDKIPDTSAADARKGKDIQGIPWERLAITRENYRQTRLEQYKNYENIPNSGEAAAKECKPTVKGGMYYEFRQNTRSVKSTXILHFQLRNLVWATSKHDVYLMSHYSVLHWSALSGVDTELMNVQGHVAPREKHPGSLLEGFSQTQVSTLAVKXDNLLVAGGFQGELICKHLDREGISFCCRTTYDDNAITNAVEIFNTASGAVHFMASNNDSGVRDYDMERFQLCKHFQFDWPVNHTSLSPDGKLVVIVGDDPNDLLIDANSGXKTLHSMKGHHDFSFASAWSPDGRTFATGTNDKTGRIWEARNLSKAVHVLKGNLGAISSFRFTSDGQFLSMAEPVDFVERLQEKANSNTSSERYFVGASARTYMSPSSDGRIEDMWDRTYGSLLQFGRPV

SEQ ID NO: 2570 - protein, 390 aa, Nostoc punctiforme PCC 73102
MSKQLGQKIAPTPISNDINVVDLIDQYFTAYNSARLREICQLLSRDVLTEGVTVGVSLSGAMTPAGFGVSALAPLIRNGFIDWMISTGANLYHDMHYGLGFELFAGNPFLDDVKLRQEGTIRIYDIIFGYDVLLETDAFIRKILQGEAFQKRMGTAEFHYLLGKYVREVEKQLGVQHSCLLATAYEYGVPIYTSSPGDSSIGMNVAALALEGSQLVLDPSIDVNETAAIAYNARESGGKSAAVILGGGSPKNFLLQTQPQLHEVLGLEERGHDYFVQFTDARPDTGGLSGATPSEAVSWGKIDPEELPNTIVCYTDSTIALPLVTAYVLNKCQPRPLKRIYDKREAILDKLQKDYLAAKTQPSDQVPAAVAESAQKQTATYPCGRLIPNT

SEQ ID NO: 2571 - protein, 238 aa, Oryza sativa
MCGIKQEMSGESSGSPCSSASAERQHQTVWTAPPKRPAGRTKFRETRHPVFRGVRRRGNAGRWVCEVRVPGRRGCRLWLGTFDTAEGAARAHDAAMLAINAGGGGGGGACCLNFADSAWLLAVPRSYRTLADVRHAVAEAVEDFFRRRLADDALSATSSSSTTPSTPRTDDEEESAATDGDESSSPASDLAFELDVLSDMGWDLYYASLAQGMLMEPPSAALGDDGDAILADVPLWSY

SEQ ID NO: 2572 - protein, 99 aa, Glycine max
  misc_feature (51)..(51): Xaa can be any naturally occurring amino acid
ASSMISSPAVTTVNLAGAGMVAPFTGLKSLAGLPTKKTYYDITSLAYTGGXLHCMHVWPPVGRKKFDTLFYLPDLDYAQLAYVLKYLLANGWIPCYEFE

SEQ ID NO: 2573 - protein, 378 aa, Aspergillus nidulans FGSC A4
MPSSQPASSHITTAPPKAVKPLASKSKPLEPKAPESKPSDSNVPEPVEPEAKAPETKSFKEALVNGAGDGDKQTDSSNSTSPSSFQSDSIRDSSPNTSRSNSSSSSQPTKEETDKDTEKNIKERNKQEQEKDTTTIPIVSKHCAVTSKRLPATNVSIEKSGVARCNVVDGATSDTSIKDFHEYTPMQQHILFWDRDRDGQIYPYDTYRGFRDLGFNILFSFLAVLIINLNFSYPTRLAHSFLPDPRFRVYVDSIYKAKHGSDSGSFDAEGRFIPQHFEDMFAKYDGDQDGALTFGELFNMMHGNRCAADPFGWGAAFFEWVTTWLLIQKDGKVYKDDLLGVYDGSLFWKIAKARKSPQGWSQGFGLGGDGFLGGVKVI

SEQ ID NO: 2574 - protein, 348 aa, Tropheryma whipplei str. Twist
MEDLYGILGVDHNASVDEIRRAYRRLARELHPDINPDSADRFKAVTHAYNILSDPEQRQRYDRHVSGGFSSDFNLSDLFQSFFDTSAEFQRGSDLLVNIDIDLKTAIYGGSQVVKIDSLVVCDVCNGTRSEPGYKAEVCFDCNGSGVVRGEVRTTLGNLITQNTCSKCRGNGERIDHPCRRCYGNGSRSAPRDITINIPPGVETGMRIKIPNMGNAGGAMPGDLYVDCKVKEHPYFLRDGQDLYCRLDISLVDALLGTKVKIDSLDGELAVVIPALSQNRDVIRIANKGAVTLRGGKGDLCIVLNVLLMQKLDPEHRALLKKIMPNPPKPKLAKRTSGFFSWLKNKFT

SEQ ID NO: 2575 - protein, 114 aa, Triticum aestivum
MERRAARGTSDHRRRMQMPPAPVGQKQQQPQRRGGPKSCQRTPPPPGCFTIQLLMVFLWVAASLAFLPLVLPPLPPPPLSLLLVPVCLLAVLAALAFVPLDAHNNVVVGGSSCL

SEQ ID NO: 2576 - protein, 315 aa, Actinobacillus pleuropneumoniae serovar 1 str. 4074
MLGNEKEPAAARRYTARGNLVAVISNGTAVLGLGNIGALASKPVMEGKGVLFKKFAGVDVFDIEINEHDPDKLVDIIASLEPTFGGINLEDIKAPECFYIEKKLRERMGIPVFHDDQHGTAIIVGAAAVNGLQIVGKDIGEVRLVVNGAGASAIACTNLLRSLGFKKENITMCDSKGVIYQGRGDNMDETKQFYAIEDNGWRTLADAVAGADVFLGCSKAGALTQDMIKTMAKDPLILALANPVPETTPHEAKAVRADAIVCTGRSDYPNQVNNVLCFPYLFRGALDVGATTINEEMKMAAAHAIADLAKEPVPF

SEQ ID NO: 2577 - protein, 102 aa, Glycine max
  misc_feature (98)..(98): Xaa can be any naturally occurring amino acid
QVGGEIFDLKKLVLPPLAANGKKEESIGAPIDTYPAFPGWYADVSWPGEAHPFKLEKILFHGKSEFQELLVFESSKQGKVAILDGHIQLTENDEFAYXEMLT

SEQ ID NO: 2578 - protein, 469 aa, Nicotiana tabacum
MVFYRGVSLLSKLRSRAVQQTNLSNSVRWLQVQTSSGLDLRSELQELIPEQQDRLKKLKSEHGKVQLGNITVDMVLGGMRGMTGLLWETSLLDPDEGIRFRGLSIYECQKVLPAAKPGGEPLPEGLLWLLLTGKVPSKEQVDSLSQELRSRATVPDHVYKTIDALPVTAHPMTQFATGVMALQVQSEFQKAYEKGIHKSKLWEPTYEDSMSLIAQVPLVAAYVYRRMYKNGNTIPKDDSLDYGANFAHMLGFSSSDMHELMKLYVTIHSDHEGGNVSAHTGHLVASALSDPYLSFAAALNGLAGPLHGLANQEVLLWIKSVVEECGENISKEQLKDYAWKTLKSGKVVPGFGHGVLRKTDPRYTCQREFALKHLPEDPLFQLVAKLYEVFLQFLQNLAKLNPWPNVDAHSGVLLNYYGLTEARYYTVLFGVSRALGICSQLIWDRALGLPLERPKSVTMEWLENHCKKA

SEQ ID NO: 2579 - protein, 171 aa, Glycine max
MADGPASPGGGSHESGDHSPRSNVREQDRYLPIANISRIMKKALPANGKIAKDAKETVQECVSEFISFITSEASDKCQREKRKTINGDDLLWAMATLGFEDYMDPLKIYLTRYREMEGDTKGSAKGGDSSAKRDVQPSPNAQLAHQGSFSQNVTYPNSQGRHMMVPMQGPE

SEQ ID NO: 2580 - protein, 371 aa, Malus x domestica
MGKGGMSDGDHADRCCGEAINGDVQQENMAAWLLGVKNLKIQPYKLPNLGPHDVRVRLKAVGICGSDVHHFKNMRCVDFIVKEPMVIGHECAGIIEEVGSEVEDLVPGDRVALEPGISCKRCNLCKQGRYNLCRKMKFFGSPPNNGCLANQVVHPGDLCFKLPDNVSLEEGAMCEPLSVGIHACRRANVCQETNVLVVGAGPIGLVTLLAARAFGAPRIVIADVNDERLLIAKSLGADAVVKVSTNIEDVAEEVAKIQKVLENGVDVTFDCAGFNKTITTALSATRPGGKVCLVGMGQREMTLPLATREIDVIGIFRYQNTWPLCLEFLRSGKIDVKPLITHRFGFSQKEVEEAFETSARGGNAIKVMFNL

SEQ ID NO: 2581 - protein, 480 aa, Pseudomonas putida KT2440
MHLTWLRSDLRIDDNTALSASTERGPTIALWLVSPGQWQAHDDADCKVDFWLRNLHDLRQSLEKLNIPLLIRTIDTWDQAPQAVLDICRQHQVQSVHWNEEYGINEQRRDDATRAMLEKSAIQAHSHLDQLFFRPGTVLTRSGDYFQVFSQFKKTCLEHLHRSLPALARRVKRQAPLNIGSDPIPQHVEGFGKTTPALRDHWPAGEAEAQSRLSRFLDETIDDYHHLRDLPAKPGTSQLSPYLAAGVISPRQCLHGALAGNRGEFDSGSTGVQTWINELLWREFYKHILSGYPQVSRHRAFRAQTEALPWRDAPADLAAWEQGRTGFPIIDAAMRQLLHTGWMHNRLRMVVAMFLSKNLLIDWRKGERHFMRHLIDGDLAANNGGWQWSASTGTDAVPYFRIFNPVSQSQRFDPQGRFIRHWVPELQELDEKAIHQPIKSTDLFGNTSYLSPIVDLSSSRQRALEAFKGLPRRQNQGITS

SEQ ID NO: 2582 - protein, 356 aa, Gibberella zeae PH-1
MSFRTLRIGLIPGDGIGKEVIPAGRRILEALPSSLGLKFDFVNLKAGFETFEQTGAALPDKTVEVLKNECDGALFGAVSSPTQAVKGYSSPIVALRKRLDLYANVRPVKTVMTAAKPIDMVIVRENTEDLYVKQEKTYDTPEGKVAEAIKRISEKASFRIAAMAGDIALRRQKIRDAGASSIHKSPLVTITHKSNVLSQTDGLFRATSKRALADPKFSSVAVEEQIVDSMVYKLFRQPEDYDVIVAPNLYGDILSDGAAALVGSLGLVPSANVGEGFAIGEPCHGSAPDIQGQNIANPIATLRSTALMLEFLNEEEAAAKIYAAVDGNLEDGKLLSPDLGGKATTEEVVADILRRL

SEQ ID NO: 2583 - protein, 368 aa, Malus x domestica
MGKGGQSCNGMVRQAKPVEQENMAAWLVDVNTIKILPFKLPSIGPNDVRIRIKAVGICGSDVHYLKTMKCADFEVKEPMVIGHECAGIVDKVGSEVKHLVPGDRVAVEPGISCARCQQCKGGRYNLCPDMKFFATPPVHGSLANQIVHPADLCFKLPENVSLEEGAMCEPLSVGVHACRRANVGPETTVLIIGAGPIGLVSVLAARAFGAPRIVIVDMDDKRLAMAKSLGADEAVKVSTKMEDLDDEVAEIKEAMISEVDVTFDCVGFNKTMSTGLNATRPGGKVCLVGMGHGVMTVPLTPAAAREVDVVGVFRYQNTWPLCLEFLRSGKIDVKPLITHRFGFTEKEVEEAFATSARGGNAIKVMFKL

SEQ ID NO: 2584 - protein, 396 aa, Gibberella zeae PH-1
MCSLAASQPLTNSSNSTTQEHKINNFLDHAQTLQAPLPNPSLQVTADHNLKRVDAPVYAPQAGEVLLHIKATGICGSDVHFWKTGRIGSLVFEGDCIIGHEAAGVVIQVGEDVDNFKPGDRVAVEPGVPCGHCFLCKDGRYNLCEDVQFSGVYPYAGTLQRYKVHPSKWLHKLPDNVSFAEGALLEPLSVVLHGINSAPITLGTPVVICGAGPIGLLALASARASGAHPLVITDVEPKRLAFAKEMVPTVKTYQVDTTKSNEENGKNVRRLFGETEYVQPRVVFECTGIESSVCSAAFMVRRGGVLMVVGVGRSIMNNLPFMHLSLAEIQIRFINRYKDTWPAGIACLEGGLVDAKKLVTHVFPLEQALEGLTLSSDPKNGCIKVQIVDDTETTFF

SEQ ID NO: 2585 - protein, 170 aa, Triticum aestivum
  misc_feature (140)..(140): Xaa can be any naturally occurring amino acid
AARDPIGITSFYQGRSSTLPGAIFFASELKCLSSVCDEIIAFPPGHVYDSKTNETTRYFKPSWWDPHRQPAAPVDYRLLRTTLEKSVKKRLMAEVPFGVLLSGGLDSSLIASIAQRETLRLKAASLEQSSKLFDSKGTVXKQCRGKGKQLVGIDEDNNLSTLANYSAKPF

SEQ ID NO: 2586 - protein, 493 aa, Aquifex aeolicus VF5
MSVSTALKLCIFFTGFAGIVAEYSLATLATYLLGNAVLQWSVVISIFLLSMGLGSHASRYIPDDKTPLAFVLAELFLSLLVPFSVPIAYHFANNFLHLQTVIYGLSFVIGSLIGLEIPLAVRINNMYEELKVNISSVLEKDYLGSVPAGLLYAYLFLPKLGLPLTAILAGFFNLISAFLLVKVLKPKKFLKFLAIFTFFLLATYAVGHKRITLYEEQKFYGEEIIHFEQTPYQKIVLTRFGKHYSLYLDGHLQFSTLDEKRYHETLVHVPASFLKRYEKALILGGGDGLALRELRKYPFGEIHLVDLDPKMIEFSKKNLVMRKINENSFYDTRLKVFSEDAFNFVKKTKEKYDFVIVDLIDPRTPSSARVYSLEFYMSLKNKLKEDGIFITQAGDTFYKREVFCSILKTIKKAGFYAYPLVVYIPTFGEWGMVIGSKEPLNFENFELKEKTEFLNRERALAFYTLGKSLECPNVEVNTLLKPVLIYYYYKIQN

SEQ ID NO: 2587 - protein, 161 aa, Zea mays
  misc_feature (73)..(73): Xaa can be any naturally occurring amino acid
  misc_feature (76)..(76): Xaa can be any naturally occurring amino acid
  misc_feature (115)..(115): Xaa can be any naturally occurring amino acid
  misc_feature (134)..(134): Xaa can be any naturally occurring amino acid
  misc_feature (154)..(154): Xaa can be any naturally occurring amino acid
MTMMINPDVDLIDRGGSVVVREVWAYNLVSEFHLISAVVEDFPYISMDTEFPGVIFKAEPAILRRGNPGYLYXLLXIHVDVLSLIQVGITLSPTRRNPPDLGGGVDGSRFIWEFXFRDFDVDRDAHAGESIELXRRHGIDFERPAARGEIGEVXKLMMSSG

SEQ ID NO: 2588 - protein, 394 aa, Zea mays
CSLEKPLLSHLRFFPWVVDEVHFKVWRQGRTGYPLVDAGMRELWATGWVHDRIRVVVSSFFVKVLQLPWRWGMKYFWDTLLDADLESDALGWQYISGSLPDGRELDRIDNPQFEGYKFDPHGEYVRRWLPELARLPTEWIHHPWDAPESVLQAAGVELGSNYPRPIVELDAANSRLQGALSEMWELEAASCAAIENGMEEGLGDSTDEPPIDFPQELRMEVDRQPAQPAIIHTPVVAGWRREDQRVPSMTSSLIRAETELTADFGNTSEDSRPEVPSNIHLQARAEREETVDGATGNTVRVNGNQQQQNLQNNMHRVLGIAPSISEASSSWTGREGGLVPVWSPPAASVHSDPYTADEADISSRSYLDRHQQSNTMMNWSQLSQSLTTGWEVDN

SEQ ID NO: 2589 - protein, 357 aa, Phanerochaete chrysosporium
AVCPDGTRVSHAACCAFIPLAQDLQETIFQNECGEDAHEVIRLTFHDAIAISRSQGPKAGGGADGSMLLFPTVEPNFSANNGIDDSVNNLIPFMQKHNTISAADLVQFAGAVALSNCPGAPRLEFLAGRPNKTIAAVDGLIPEPQDSVTKILQRFEDAGGFTPFEVVSLLASHSVARADKVDQTIDAAPFDSTPFTFDTQVFLEVLLKGVGFPGSANNTGEVASPLPLGSGSDTGEMRLQSDFALAHDPRTACIWQGFVNEQAFMAASFRAAMSKLAVLGHNRNSLIDCSDVVPVPKPATGQPAMFPASTGPQDLELSCPSERFPTLTTQPGASQSLIAHCPDGSMSCPGVQFNGPA

SEQ ID NO: 2590 - protein, 218 aa, Glycine max
QSIPLSPPTKYSLQHFKKPWAHEHEPVRNLVDAVNKIKPTVLIGTSGQGRTFTKEVIEAMASINERPIILSLSNPTSQSECTAEEAYKWSQGRAIFASGSPFPPVEYEGKVFVPGQANNAYIFPGFGLGLIMSGTIRVHDDLLLAASEALAAQVSQENFDKGLIYPPFTNIRKISAHIAANVAAKAYELGLATRLPQPKDLVKFAESCMYTPSYRSYR

SEQ ID NO: 2591 - protein, 214 aa, Zea mays
MAATRASPVLLLLLTVQLSLLFRLPDSPSTLALALAAEPEQQNAKQHRQPALLVQSTCNSTSFYDLCIAALAADPASSTADVPGLGAIAVSAAANNASGTAAFLGNASDAAATPQADRALLRACAGKYAAARDALVQARASLAEQAYDYAFVHVSAAGEYPAVCRTLFRRRQQQQRGASRSAYPAELAKREEALRRLCTIALDIISLLQNQETY

SEQ ID NO: 2592 - protein, 266 aa, Mycoplasma penetrans HF-2
MKKRIGYGSFEVNDVPTLKKCIKQAVLSGYDFVDTAYYYQNEEAIGKAIKELREEGFDKPILVQTKIWPEHYGNVRDAVLLSCQKLQTNKLDMCLLHRRHFNLNMDLSAWEQLIECQKEGLVGEIGVSNFDRDALEIMRQRTGVYPLSNQIELSVNNLREDRVVYNHSKGIEVQAWSPLGDLENNLKNPVLIEMAKKYNTDVAGVLIAYVGSLNCSIIVKTSNPDRVVSNYKAFQIILEESDVEKLKKLNTYKIKYSESFIYDIDN

SEQ ID NO: 2593 - protein, 228 aa, Haloarcula marismortui ATCC 43049
MKQGGSDAAKQAAGESAAEAVEDATVVGLGTGSTAAYAIRAIGQAVDAGLDVVGVPTSFQSRQLARDCGIPLADLDDVSVDLAIDGADEVASGNLIKGGGAAHAREKIVDASADRFLVVADPTKEAAVLSYPVPVEVLPMARSTVVTAVEELGGDPTLRRAERKDGPVVTDNGNLVLDCDFNSIHDPAALASDLAALPGVVEHGLFVGMADEIHVGTADGVTVRTLSK

SEQ ID NO: 2594 - protein, 125 aa, Synechococcus sp. PCC 7002
MAGSEVKADYWINEYITPWDIYSHGITKILAYKQTQFQEMAIVESGAYGKALVLDGKWQSCTGDEFLYHEPLVHPAMIAHGAPKKVLILGAGEGATVREVLRWQSVEKVMMVDIDGEVVEACKEF

SEQ ID NO: 2595 - protein, 339 aa, Pisum sativum
MVQEKKLVDEVSGWLRIYDDGSVDRTWTGPPEVNFMIEPVAPHEEFIDGVATRDVTMSTTTNDNFIHRARLYLPEKTPTENEKLPILIHFHGGGFCITEPDCFMYYKVYTRFVKSTRSICVSPFLRRAPEHRLPAAIEDGFATLRWLQSVAKGDAHDPWLEKHGDFNRVFLIGDSSGGNLVHEVSARASSTDLRPVRLAGAIPIHPGYVRSERSRSENEMPQSPFLTLDMLDKFLSLSLPIGSNKDHPITCPMGEAAPPLAGFKLPPFLLCVAEKDLLRDPQMEYYEAMKKDNKEVDLFVSKNMTHSFYLNKIAVDMDPTVSAELNALMARVKDFIEKH

SEQ ID NO: 2596 - protein, 331 aa, Listeria monocytogenes str. 4b H7858
MMTISQVKQTAKESLRGNWGIAIGIFVLAWLIETVGGGLIGWIPVIGWIAIFLLTGPLYTGVAWVYLAISRREQPDVAYMFSGFKQFGRTVLAYLLISIFTFLWSLLLIVPGIIKTYSYSQTFFILRDNPNISALDAITESRHMMNGHKGRLFGLSLTFLLWYLIPLAVAIAGTVIVAGGMATTSYTADPAEVLSALAAGATFGGLVLILASWLITLGISLYVYPYLITSIAVFYDDLYAATEGTFTEETVIVEEEVNPFGTTEADPFAEDTHPEGFGPEATKEPETPVVPEAPEAPETPETPEVPETPEAPETPEAPETPEAPKDNNEPK

SEQ ID NO: 2597 - protein, 492 aa, Pseudomonas putida
MKQYKNFINGRFVESDKRFAGINPATGVRFADVHEATREMVDEAVSAGHRAVRGWGSASVSDRADMLYRIADEIDRRADDFLTAEVSDTGKPVSLASKLDIPRGAANFRIFADILKTAPLDTFRTDLPGGSHAINYAVRKPLGVVGIISPWNLPLLLFSWKVAPALACGNAVVAKPSEETPGTATLLAEVMQTVGLPAGAFNLVHGFGPNSAGEFITTHPGINAITFTGESKTGTAIMHAAAEGVKPVSFELGGKNAAIIFADCDFDKTVAGMTRAAFLNSGQVCLCSERIFVERPIYDRFVKALAERAKQIKLGDPTDEATCMGPVISAAHRDKVLSYYALAREEGAEFITGGGTPSFGNQLDGGFWVEPTLLAGLPDDARCVTEEIFGPIGHVTPFDSEAEVIQRANATPYGLAATIWTSNVNKAHRVAQSMNVGVAWVNAWFLRDLRTPFGGSGLSGIGREGGLHSLNFYSELTNVCIHVDAPDGSHDR

SEQ ID NO: 2598 - protein, 123 aa, Glycine max
  misc_feature (23)..(23): Xaa can be any naturally occurring amino acid
  misc_feature (45)..(45): Xaa can be any naturally occurring amino acid
  misc_feature (48)..(48): Xaa can be any naturally occurring amino acid
  misc_feature (67)..(67): Xaa can be any naturally occurring amino acid
  misc_feature (81)..(81): Xaa can be any naturally occurring amino acid
  misc_feature (87)..(87): Xaa can be any naturally occurring amino acid
  misc_feature (100)..(100): Xaa can be any naturally occurring amino acid
EARVSLLGTEFIKVATNIDPDCXMIINEKGRNAKCAMRKAFVDEXKSXLPKHILYKEHQQITDRDGXVETDSLKAHAEKPXPDRMIXNAANIFPFNTPTXRETYHYTMIIDRFFPQKSPRLTV

SEQ ID NO: 2599 - protein, 371 aa, Triticum aestivum
DAWANGSQVPQEFVEKIGKVFEAILERSGKLREEMKEDISIAKAIAIVLERNPHLRQEGIAHDVLQWYLCRMEGWFATDADAISLQCWDQEVLLPGGHGLMVRGYRPVINTLAKGLDIRLGHRVVEIVRHWNRVEVTVSNGKTFVADAAVITVPLGVLKSNTIKFEPRLPEWKEEAIRELSVGVENKIVLHFSEVFWPNVEFLGVVSSTTYGCSYFLNLHKATGHAVLVYMPAGRLACDIEKMSDEAAAQFAFSQLKKILPNAAEPLNYLVSHWGSDENTLGSYTFDGVGKPRDLYEKLRIPVDNLFFAGEATSVQYTGTVHGAFSTGEMAAEECRMRVLEKFRELDMLEMCHPMAEQTATVSVPLLISRL

SEQ ID NO: 2600 - protein, 402 aa, Bacillus thuringiensis serovar konkukian str. 97-27
MLSEKTIEIVKSTVPLLQEKGVEITTRFYEILFSEHPELLNIFNHTNQKKGRQQQALANAVYAAATYIDNLEAIIPVVKQIGHKHRSLGIKAEHYPIVGTCLLRAIKEVAGAPDEVLNAWGEAYGVIADAFISIEAEMYEEAAHKEGGWKDFRNFVVVKKVKESDVITSFYLKPEDGGKVSSFIPGQYVTVQINIEGETYTHNRQYSLSDAPGKEYYRISVKKEKGVDTPDGKVSNYLHDHVKEGDMLPVSAPAGDFVLNMDSTLPVVLISGGVGITPMMSMLNTLIEQDSKRNVCFVHAAINSNTHAMKEHVEAVDNEYEQVKAYTCYSAPTEKDLEMKNFDKEGFVEREWLQTIIPTTEAEFYFCGPVPFMKHINAVLTDLGVKQEHIHYEFFGPAASLQ

SEQ ID NO: 2601 - protein, 311 aa, uncultured bacterium
MQLDPQMKAILDQAAAAGAQPFHTMTPAQARAAIDTMFQAFRGQPKEVAQSEDRKVPGPAGDIPIRIYTPAGSGPFGALVYFHGGGWVIGNIETHDVTCRDLAHGTPCVTVSVDYRLAPEHKFPAGPEDCYAATKWVSDNARSLNVDPNRIAVGGDSAGGNLAAAIALMARDRGGPKLAYQLLIYPAIDSADETPSHREFTKDGYILSRADMEWFWGHYLADKDRANPYACPSRAKSLAGLPPAFVLTAEFDPLRDEGEAYGQELRKAGVAVTAKRYDGVCHGFVSMASLLDAGKRAVAECCKELRGAIGR

SEQ ID NO: 2602 - protein, 498 aa, Magnaporthe grisea 70-15
MSTMALHRTASTKSDTTMACPNGLVKNLPLGGNTKCSACGSHRAEKRRASSTSSVSTTPTSPSFSEADWSPLHNSSQEPQPEYTKVANSLMRAITDYVGHLQNENLPMPSLEPAADAHGVLKHPEGVAARNAVVELAQRIVAMTMDPDMNLLISSLQFHFCSSLKVAIDLKVHEHVPRRGSITSSELAAKVGADESILVRIMRALILKHVFCSPTPGTYAHTAMSWCMMKSPDAIDLLGHRLDESFRASSRQADALALVNYREPDEADVKGFSMAFGTTENFWEVLGHEGEEERAQRFNRAMRAVSLNTLDVIPRMYPFDRIRGDGLLVDVGGGLGQVARAIMGAHRGAGLRSCIVQDAHAGDDAKKQPDVMEANRKLGVELQKHNFFDPQPVKGASVYFLRHIFHDWPDRACVKILKQTVEAMGKDSTLLICDQVVDDEASPQATLYDIDMWSLFGGKERNRSEWEALFRSADERLYIKKVWTTAEAPTTMLEVCLS

SEQ ID NO: 2603 - protein, 376 aa, Candida albicans SC5314
MLAARSSIRRCFSTSSTTLKSLKIGLIPGDGIGREVIPAGKAVLENLPAKHDLQFEFVNLDAGFELFKKTGTALPDETVDVLKKECDGALFGAVSSPTTKVAGYSSPIVALRKKLGLYANVRPVKSVEGIGRPVDMVIVRENTEDLYIKEERVYKKEDGTKVAEAIKRITETASTRIAKMAYEIALQREAVRKGTSGKQLHEKPSVTVTHKSNVLSQSDGLFRETCRAVYDANANEYGGIEYKEQIVDSMVYRMFREPEIFDVVVAPNLYGDILSDGAAALVGSLGVVPSANVGDNFAIGEPCHGSAPDIEGKGISNPVATIRSTALMLEFMGYPEAAATIYQAVDANLAEDKIKTPDLGGNSTTQEVIDDIIRRF

SEQ ID NO: 2604 - protein, 309 aa, Triticum aestivum
PRVRTPLSALYVASLLHEAGLPDGVLNVVPGPRPPAGAALCSHMGVDKLAFTGSTGTGKIILELAARSNLKPVTLELGGKSPFIVMDDADVDQAVELAHRALFFNQGQCCCAGSRTFVHESVYDEFVEKSKARAQRRVVGDPFKKGVEQGPQIDGQQFKKILGYVKSGVDSGATLVTGGDRVGSSGFYIQPTVFADVEDEMKIAQEEIFGPIQSILKFREVGEVVMRANATHYGLAAGVFTRSLDTANAVARALRAGTVWVNCYDVFDAAIPFGGYKMNGVGREKGAYSLGNYLQTKAVVAPLRDPAWL

SEQ ID NO: 2605 - protein, 450 aa, Methanothermobacter thermautotrophicus str. Delta H
MSVEVIAIGGYEEVGKNMSAVKVGDDVVIFDMGIHLDRVHIHEDTDIARMHSLDLIERGVIPDDTLMKDVDGKVRAIVFTHGHLDHIGAVAKLAHRYQAPIIATPYTIALIERTIKAERKFNVLNTLQVLNAGEKCQISPGITLEFIQSTHSIPQSVIAALHTPEGIIVYALDFKFDDHQKISPPPDYHRLRELGRKGVLAMIVETTRANEKQEVKTHSEKVARIVLEDIMKNPLEEKTGMIVTTFSSHMERIQAISDIASKSDRQMLLLGRSMERYCGLAEAMGILKLPENASIYGSPKAVNRALARAEAKREDYLLITTGHQGEPDALLPRIANAKTQFRIQRGDNVVISAPVIPNPMNVANRNLMERRLASSGARIYTNAHVSGHAGREDHRDFIRMLNPMHIIPAHGDLSMLSAYAEIAEEEGYKLGNDIHILRNGQAQVFNGGIR

SEQ ID NO: 2606 - protein, 145 aa, Zea mays
  misc_feature (84)..(84): Xaa can be any naturally occurring amino acid
AGSGPYPPPPAFRLQTEDLRYHHQLSRHIAQLGRIEAMASRLLAAASSSSASSSPLARLISSRRMAGAADHHGSTKVNMWQEPXNPGNWKEEHFVLASLAMWGAIIYGGLKAFGGKKEVKTRGRASGSTGTLNCIQALFSYRNLF

SEQ ID NO: 2607 - protein, 445 aa, Arabidopsis thaliana
MEEERRVLFGKYEMGRLLGKGTFAKVYYGKEIIGGECVAIKVINKDQVMKRPGMMEQIKREISIMKLVRHPNIVELKEVMATKTKIFFVMEFVKGGELFCKISKGKLHEDAARRYFQQLISAVDYCHSRGVSHRDLKPENLLLDENGDLKISDFGLSALPEQILQDGLLHTQCGTPAYVAPEVLKKKGYDGAKADIWSCGVVLYVLLAGCLPFQDENLMNMYRKIFRADFEFPPWFSPEARRLISKLLVVDPDRRISIPAIMRTPWLRKNFTPPLAFKIDEPICSQSSKNNEEEEEDGDCENQTEPISPKFFNAFEFISSMSSGFDLSSLFESKRKVQSVFTSRSSATEVMEKIETVTKEMNMKVKRTKDFKVKMEGKTEGRKGRLSMTAEVFEVAPEISVVEFCKSAGDTLEYDRLYEEEVRPALNDIVWSWHGDNNNTSSEDC

SEQ ID NO: 2608 - protein, 222 aa, Vibrio parahaemolyticus RIMD 2210633
MNSPMFTRSTSVPNTLETNKVLKNTYFLLSMTLMTSAIAAVATMAMQISPIMAIVMQLAAIGILFFVMPKAINSSSGIVWTFVFTTLMGGALGPMLNYYASIPNGPTIIAQALGLTGMVFLGLSAYTISSKKDFSFMRNFLMAGLIIVIVAALINIFVGSTMAHLVISSVSALVFSGFILFDTSRIVRGEETNYISATISMYLNILNLFTSLLSILGIMNDD

SEQ ID NO: 2609 - protein, 471 aa, Novosphingobium aromaticivorans DSM 12444
MERAAMNALSPTLTNRSLVDIDRDHLIHSVTSFRGHEQHGAIVLESGDGMWLTDAEGNRILDAFAGLWCVNVGYGQESIVEAAAAQMRKLPYATGYFHFASEPAIRLAGELTAAAPSGLDHVFFTQGGSDAVDSAIRYIVHYWNAAGKPSKKHFIALEWGYHGSSSLGAGLTALGNFHRNFDLPRPWQHHIASPYPYRHPQGDDDAAVIASTVAALEAKVAELGADNVAAFCCEPIQGSGGVIVPPRGWLKALREACTRLGILMLVDEVITGFGRTGPLFACEEEGVSPDFMTTAKGLTAGYIPMGAMFMADHVYQTIADAAPAALPIGHGQTYSGHPVAAAVGLEVLRLYREGGLLENGRKTGERFAWHMERIRAHPLVGDVRYRGLLGAIELTPDKATKAIFDASLDIGGRLSKLTYANGVIVRCFGNAVLGFAPALCCTLEEMDMIFERVERSLDQLLDQPDIRALVV

SEQ ID NO: 2610 - protein, 426 aa, Helicobacter pylori J99
MSVTLINNENNARYEFETIECTRGPKAVDFSKLFETTGFFSYDPGYSSTAGCQSKISYINGKKGELYYRGHRIEDLVAKYKYVDVCRLLLTGELPKNQDESLEFELELRHRSFVHESLLNMFSAFPSNAHPMAKLSSGVSILSTLYSTHQNMHTEEDYQTMARRIVAKIPTLAAICYRNEVGAPIIYPDIARSYVENILFMLRGYPYSRLKHTTQGEVGITPLEVEAFDKILTLHADHGQNASSTTVRNVASTGVHPYAAISAGISALWGHLHGGANEKVLLQLEEIGDVKNVDKYIARVKDKNDNFKLMGFGHRVYKSYDPRAKILKGLKDELHQKGVKMDERLSEIAAKVEEIALKDEYFIERNLYPNVDFYSGTILRALKIPVRFFTPVFVIGRTVGWCAQLLEHVKSPQARITRPRQVYVGD

SEQ ID NO: 2611 - protein, 57 aa, Triticum aestivum
  misc_feature (32)..(32): Xaa can be any naturally occurring amino acid
  misc_feature (41)..(41): Xaa can be any naturally occurring amino acid
  misc_feature (43)..(44): Xaa can be any naturally occurring amino acid
MADEGTANCIDIILAIILPPLGVFFKFACGSXFWICLLLTXSXXLPGIIYAVWVITK

SEQ ID NO: 2612 - protein, 425 aa, Helicobacter pylori J99
MAYNPKILQKPKEGEEITIKDGKLHVPNYPIIPFIEGDGIGSDITPAMIKVVDSAVQKAYKGEKKIAWYEVFVGEKCYQKFKDHKELSPEEQWLLPDTIEAINHYKVSIKGPLTTPIGEGFRSLNVALRQKMDLYVCLRPVRWYGSPSPVKEPQKVDMVIFRENSEDIYAGIEWQEGSAEAKKLIHFLQNELKVEKIRFPESSGVGIKPISKEGTERLVRKAIEYAIDNDKPSVTFVHKGNIMKYTEGAFMKWGYALAQKEFNAQVIDKGPWCSLKNPKTGKEIIIKDMIADAFLQQILLRPSEYSVIATMNLNGDYISDALAAMVGGIGIAPGANLNDTVGMFEATHGTAPKYAGLDKVNPGSIILSAEMMLRHMGWVEAADLIVSAMEKAIKSKKVTYDFARLMDGAKEVKCSEFASVMIENM

SEQ ID NO: 2613 - protein, 490 aa, Novosphingobium aromaticivorans DSM 12444
MTAFDPDSIRPALAANFIGGEAVVGRGRSFEVLRPSDGQLLGELRAADEQQLCAAVENAAMAQKASGWGAMEPRGRMKLLRRWADLIEADAETLVPLEAVGSSRTLAEVRAWDLPYTAECIRFFAEFADKHGGEIAATTPDKLGFTLTEPYGVIGAIAPWNLPLVMAAWKLGPALAAGNAVVLKPSELTPFSVVRLAELAVAAGIPAGVFNVVQGGGGDIGDALVRHERIAKVSFTGSTRTGQAIMAACAMTGPKPSTLELGGKSPQIVFADADLAKASALVARAITLNSGQVCVAGSRLLVHEKARDEVVERLTTAFEAHRLGTTWDAATTMGPIISEGQLATIDGIVQRARAAGAEAVTGGARAVSPQSGSYYQPTLLAGMSDDNEAVQGEIFGPVLTVQSFADEDEAFALANGTRYGLAAGVHTTDISRALRAVRALEAGTVWVNRYGRSDDFILPTGGFKQSGVGKDLGREAYLGSCKVKTALIQI

SEQ ID NO: 2614 - protein, 257 aa, Vicia faba
MASSKETFVYTAKLAEQAERYEEMVEAMKNVAKLDVELTVEERNLLSVAYKNVVGGRRASWRILSSIEQREETKGNEVNVNRIKEYRKKVESELSDICTDIMAVIDEHLIPNSSGESNVFYYKMKGDYYRYLAEFKSGDDRKEAADQSLKAYQEASTAAETELPPTHPVRLGLALNFSVFYYEILNSPERACHLAKQAFDVAIAELDSLNEESYKDSTLIMQLLRDNLTLWTSDIPEEGVEEQKAESARAPVGDNAE

SEQ ID NO: 2615 - protein, 319 aa, Geobacillus stearothermophilus
MKRIGVLTSGGDSPGMNAAIRSVVRKAIYHGVEVYGVYHGYAGLIAGNIKKLEVGDVGDIIHRGGTILYTARCPEFKTEEGQKKGIEQLKKHGIQGLVVIGGDGSYQGAKKLTEHGFPCVGVPGTIDNDIPGTDFTIGFDTALNTVIDAIDKIRDTATSHERTYVIEVMGRHAGDIALWSGLAGGAETILIPEADYDMNDVIARLKRGHERGKKHSIIIVAEGVGSGVDFGRQIQEATGFETRVTVLGHVQRGGSPTAFDRVLASRLGARAVELLLEGKGGRCVGIQNNQLVDHDIAEALANKHTIDQRMYALSKELSI

SEQ ID NO: 2616 - protein, 504 aa, Glycine max
  misc_feature (343)..(343): Xaa can be any naturally occurring amino acid
MSALSNSSSSHGNSFLKMPAIKFTKLFINGDFVDSISGRTFETIDPRKEEVIARVSEGDKEDIDIAVKAARQAFDSGPWPRLPGSERAKIMMKWADLVDENIEELAALDTIDAGKLYYINKVAEIPSATNALRYYAGAADKIHGDVLKMNGDFHAYTLLEPIGVVGHIIPWNAPSLSFFIKVSPSLAAGCTMVLKPAEQTPLSALFYAHLAKLAGIPDGVLNIVPVFGPTAGAAISSHMDIDAVSFTGSIEVGREVLQAAAWSNLKPVSLELGGKSPLIIFNDADIDKASELALFGIMSNKGEICVAGSRVFVQEEIYDEFEKKLVEKAKSWVVGDPFDPKSXQGPQADRNQLEKILSYIEHGKREGATLLTGGNTVGNKGYYIEPTIFSNVKEDMLIARDEIFGPVLALMKFKTMEEAIKSANNTKYGLAAGIVTKNLDTANTMSRSIRAGIVWINCYFTVGSDVPFGGYKMSGFGRDLGLQALHKYLQVKSVVTPIHNSPWL

SEQ ID NO: 2617 - protein, 112 aa, Bartonella quintana
ANEACLKMLQKIGSVERIPEFIARAKDKNDPFRLMGFGHRVYKNYDPRAKIMQQTCHEVLKELNIQDDPLLDIAIALENTALNDEYFIEKKLYPNVDFYSGITLKALGFPTE

SEQ ID NO: 2618 - protein, 222 aa, Vibrio vulnificus YJ016
MNSPMFTRTSSMESTLQTNKVLKNTYFLLSMTLVTSAIAAVATMAIGISPMMALVMQVAAIGILFFALPRSINSSMGIVWTFVFTTLMGGALGPMLTYYASIPSGPTIIAQALGLTGMVFLGLSAYTITSKKDFSFMRNFLMAGLIIVIVAAIINIFVGSTLGQLVISSVSALVFSGFILFDTSRIVRGEETNYVSATISMYLNILNLFTSLLSILGIMNDD

SEQ ID NO: 2619 - protein, 364 aa, Zea mays
MGSTAGDVAAVVDEEACMYAMQLASSSILPMTLKNAIELGLLEVLQKEAGGGKAALAPEEVVARMPAAPGDPAAAAAMVDRMLRLLASYDVVRCQMEDRDGRYERRYSAAPVCKWLTPNEDGVSMAALALMNQDKVLMESWYYLKDAVLDGGIPFNKAYGMTAFEYHGTDSRFNRVFNEGMKNHSVIITKKLLDFYTGFEGVSTLVDVGGGVGATLHAITSRHPHISGVNFDLPHVISEAPPFPGVRHVGGDMFASVPAGDAILMKWILHDWSDAHCATLLKNCYDALPENGKVIVVECVLPVNTEATPKAQGVFHVDMIMLAHNPGGKERYEREFRELAKGAGFSGFKATYIYANAWAIEFIK

SEQ ID NO: 2620 - protein, 105 aa, Hordeum vulgare
QPQQSYPVQPQQPFPQPQPVPQQRPQQASPLQPQQPFPQGSEQIIPQQPFPLQPQPFPQQPQQPLPQPQQPFRQQAELIIPQQPQQPLPLQPHQPYTQQTIWSMV

SEQ ID NO: 2621 - protein, 456 aa, Zea mays
  misc_feature (116)..(116): Xaa can be any naturally occurring amino acid
MNLELHHLTRSRSHPRVLARSSCGGEMRRQIPPVSCLVLLAVAFALLAEASAASPAHSSVAVNVTGVLSAFPDLSDFTRLLASSPVLAELAGRSSLTLLAVPNGNLPQSPSAFAAXSGADLADVLRYHVLLEYLSHADLRRLPASGKLVTTLFQTTGRATADLGAVNVTTAGASRLTVIRSPAPFPGSNATVLGAITAVPYNLSVLAVSGLIAPSGFDLAASESQPPAAVNITRVLADARAFNVAASMLEASGVAAEFEDDERGAGITVFAPTDDAFAGLPAGDRLQSLPADRKAVVLRFHVLHSYYPLGSLESIVNPVQPTLATEFSNAGRFTLNITRANGSVAIDTGVVQATITRTVFDQNPVAVFAVSKVLLPKEMFTRTAAASIVATTASASSPPPAATAPEASESARTPPTKLSSPPALRGGGQDYATAPAPARGIEWWCIALVYLLPHLV

SEQ ID NO: 2622 - protein, 453 aa, Arabidopsis thaliana
MSGSRRKATPASRTRVGNYEMGRTLGEGSFAKVKYAKNTVTGDQAAIKILDREKVFRHKMVEQLKREISTMKLIKHPNVVEIIEVMASKTKIYIVLELVNGGELFDKIAQQGRLKEDEARRYFQQLINAVDYCHSRGVYHRDLKPENLILDANGVLKVSDFGLSAFSRQVREDGLLHTACGTPNYVAPEVLSDKGYDGAAADVWSCGVILFVLMAGYLPFDEPNLMTLYKRVRICKAEFSCPPWFSQGAKRVIKRILEPNPITRISIAELLEDEWFKKGYKPPSFDQDDEDITIDDVDAAFSNSKECLVTEKKEKPVSMNAFELISSSSEFSLENLFEKQAQLVKKETRFTSQRSASEIMSKMEETAKPLGFNVRKDNYKIKMKGDKSGRKGQLSVATEVFEVAPSLHVVELRKTGGDTLEFHKVCDSFYKNFSSGLKDVVWNTDAAAEEQKQ

SEQ ID NO: 2623 - protein, 257 aa, Zea mays
  misc_feature (251)..(251): Xaa can be any naturally occurring amino acid
MDRAGALAVVDGRTGKRHEVKVSEDGTVRATDFKKITTGKDDKGLKIYDPGYLNTAPVRSSICYIDGDEGILRYRGYPIEELAESSSFVEVAYLLMYGNLPTQSQLAGWEFAISQHSAVPQGLLDIIQSMPHDAHPMGVLASAMSTLSVFHPDANPALQGQDLYKSKQVRDKQIVRVLGKAPTIAAAAYLRLAGRPPVLPLNTLSYSENFLYMLDSLGDRTYKPNPRLARALDILFILHAEHEMNCSTAAXRHLASR

SEQ ID NO: 2624 - protein, 246 aa, Zea mays
  misc_feature (235)..(235): Xaa can be any naturally occurring amino acid
MCGILAVLGCADDTQGKRVRVLELSRRLKHRGPDWSGMHQVGDCYLSHQRLAIIDPASGDQPLYNEDKSIVVTVNGEIYNHEQLRAQLSSHTFRTGSDCEVIAHLYEEHGENFIDMLDGVFSFVLLDTRDNSFIAARDAIGVTPLYIGWGIDGSVWISSEMKGLNDDCEHFEIFPPGHLYSSKQGGFKRWYNPPWFSEVIPSVPYDPLALRKAFEKAVIKRLMTDVPFGGLLSGXLDSSLGAAVTV

SEQ ID NO: 2625 - protein, 156 aa, Glycine max
MEPMDIVGKAKEDASLPKATMTKIIKEMLPPDVRVARDAQDLLIECCVEFINLVSSESNEVCNKEERRTIAPEHVLKALGVLGFGEYIEEVYAAYEQHKLETMQDSLKGAKWSNRAEMTEEEALAEQQRMFAEARARMNGGAIQSKEPEADQSLES

SEQ ID NO: 2626 - protein, 337 aa, Oryza sativa (japonica cultivar-group)
MAASDVHHGGATPAAAATAVPCVTLNSGHAMPVLGFGTGSSTPPADLAATIAHAVRLGYRHLDTAAVYGTEGAVGAAVAEAVRCGAVASRGELFVTTKLSMADAHPPRVVAALRESLSRLGLDYVDLFLIHWPVAIGKKDAAGELTWDDLSRGLVPFDMEGVWRGMEECHRLGLARSIGVSNFSAAKMSRLLALAAVPPAVNQVEMNVGWRQEKVREVCGEGGVVVAAYSPLGAHGAHWGSDAVMNSGVLHDVAAARCKTIAQVALRWLYEQGVCMVARSFNEGRMKQNMDIFDWELSDQDKAMIAGVPQRRACHGNYFVSPDGPYKSLHDLWDGEI

SEQ ID NO: 2627 - protein, 339 aa, Pseudomonas putida KT2440
MNIVHKALTTSLLALSVSSAFAAGSPGVEQHTQAFLEALEKGGGKPLEQLTPNDARAVLTGAQASVKVDLSGVEVKERTIQANGQSIKLQVVRPTNVKGDLPVFMFFHGGGWVLGDFPTHQRLIRDLVVGSGAVAVYVDYTPSPEAHYPTAINQAYAATRWVAEHGKEIGVDGKRLAVAGNSVGGNMAAVVALKAKEAGTPALRFQLLLWPVTDASFETASYKQFAEGHFLTTGMMKWFWNNYTVDAKARAQIYASPLRASAEQLKGLPPALVQTAEFDVLRDEGEAYARKLNAAGVTVTSVRYNGMIHDYGLLNPLSQVPAVKAALRQAGNELKVHLQ

SEQ ID NO: 2628 - protein, 1050 aa, Neurospora crassa
MSEPEPRRSVRATKGQHKALEQLDQIDIPKKRGKKAAKKAVPEPEEPEEEIIRCVCGATEQDEDSGEPWIACDMCGAWQHNICMGMSQYSEDLPKEYFCELCKPENHQELLNGMKNGERPWEARRKAFEEEKAEKRRRGNKKKSKRVSDHKEESAQVSQKPKPSPVPEPKKDAKTAAGQKRKTTEPVPEKEPKQKVRKVTETQAPSLPSYKAPDDIAGKISELPELRQGAAKLLSKSLVHSIGVAEKKGVSIPSEGVSASAERLAIQIERAVHDSHQPTAYSGQMRTLSYNLKTNQDLTTGLLGGTLTPTMLASMTTEELATKELQKETAEMKARAEKQSIMITEDVPRIRKTHKGEEVIGDESFNLSTDVSSAPVRRPPQDTAEPPKKRVKEEGPERAAQGTASKRASRDLTVDTQKSPSTGNFDINKVFSSVRSPTQSHHRRPSAMSTSTGPGVDADVDRLLDDGTQSPPYSPKEEILDPDVVWKGNLVMNTIADFQVTAKHIGGAKLKESIGLEWDKLMPKTLTVCGRIDEQQAIVYLCSLRYSLPTDVVVVNLQPTSAASKPQFQRLVDYFVSKKRYGVIGDRGVANVRDTYLVPVLPGTGQYPEFMLNLADNHIPETRTEPMLLAVFVYRNDPDTIMRLHGTNDYNQVVANQSTKVHTSFANTPAPSSPALANLPPGHRPSLSTPAFSPTSPQGTFPNYPTPRHSSTPSQVPPQQQPQPTPPAQQHSVSQIQHPAVDQVQKQGEAIAREVLGSLITSPTVAFLLPQAHKMSRKEWEVIKKIYERDPKARDDLPYLSNVLERESTNAQAKAAQAQQQSQQHPVHQQHQNQQQQMHHQPHHQQHHPQHQVQQQQQQQQQQHLPQHPPQHQPHHQAHFQPQPQHQQQHQAHHPPHHQPQHQSQQQAHHQPHPPPPQHHQQPQQQQQHPPKHQAQHPPQHQPQHQAPAQQPQAAYPPQPASHHPQPPQHQQHQPPQPQHAQPHPQAQPQQAHPQHHQQYFTPPVRTTPIPPPPIPPVTSGSGGPIKQTPIPPPPIPHQAATAATGPPSA

SEQ ID NO: 2629 - protein, 268 aa, Vitis vinifera
MSPTCLLVLLLGMVVLTSTPSLAHYPKPPPFQKPPPEHKPPGEKPSPEHKPPTKPPKGEKPLPEHKPPTPIGKPPKGEKPPPEHKPPTPIGKPPKGKKPLPEHKPPTPIGKPPKGEKPPPEHKPPTPIGKPPKGEKPLPEHKPPTPIGKPPKGEKPPPEHKPPTPISKPPKGEKPLPEHKPPTPIGKPTKGEKPLPEHKPPTPIGKPPKGEKPPSPFGKPPTGEKPPHYGHTPGHPPAHSYKPPQKIKPPPTPPHKPPHKPPSPTYPN

SEQ ID NO: 2630 - protein, 330 aa, Listeria monocytogenes str. 4b H7858
MELRDVEEPQVYGDKVKIKVAFTGICGSDIHTFKGEYKNPTTPVTLGHEFSGVVVEVGPDVTSIKVGDRVTSETTFETCGECIYCKERDYNLCSNRRGIGTQANGSFAEFVLSREESCHVLDERISLEAAALTEPLACCVHSALEKTTIRPDDTVLVFGPGPIGLLLAQVVKAQGATVIMAGITKDSDRLRLAKELGMDRIVDTLKEDLAEVVLGMTDGYGAERVFDCSGAVPAVNQGLPLTKKKGDFVQVGLFAEKKNAIDEESIIQREIAYIGSRSQKPSSWILALDLLANGKINTDKMITKVYGLDDWREAFEAVMAGNEIKVLVKS

SEQ ID NO: 2631 - protein, 246 aa, Triticum aestivum
  misc_feature (33)..(33): Xaa can be any naturally occurring amino acid
  misc_feature (40)..(40): Xaa can be any naturally occurring amino acid
  misc_feature (73)..(73): Xaa can be any naturally occurring amino acid
QQLALQPLQQFAKIQQPQQSFPQQPHRPHPFPXQLKQVIXQYPQQPFLLQPHQPFPQQPEQIIFQQPQQLFPXSQQPFLQQPQQPFPLQPQQPFPQQPAQIIAQQPQQPSPLQPQQSFLRQPQQPFPQPQQVVQINPQQPQQPFSQSRQPFPQQPQQPFPLQPQQPFPQQSAQIIPQQPQQPFPLQPQQSFLRQSQQPFLQQPQQPSPQPQQVVQIIPQQPQQPFPLLANQPQQPYPQQQPSGVMV

SEQ ID NO: 2632 - protein, 168 aa, Aquifex aeolicus VF5
MNKKGKVVITYGTFDLFHIGHLNLLKRAKALGDFLIVGVSTDEFNAIKGKKSVYPYEHRAEIVRSIKYVDLVIPERNWEQKIEDIKKYNVDVFVMGDDWKGKFDYLKEYCEVVYLPRTEGISTTELKEALVKLSNILEEDILRVLDIVVRGRICIEEILKNKNLKNGE

SEQ ID NO: 2633 - protein, 337 aa, Sinorhizobium meliloti 1021
MKAVRLYDIRDLRVEEVAELAAPPPGFVNLEVRAAGICGSDLHNYRTGQWISRRPSTAGHEFCGRVTAIGEGVSHLVRGDVVSADSRMWCGTCPACASGRSNVCETLGFLGEVCDGGFAEAVQLPSRLVFRHDPKLSPHVAAMAEPLAVALHAVRRLAVPDGAPVLVMGCGTIGGLSALLLSRLHQGPLLLTDLNADKAALVAEVTGGVVVALDGAAIEEALPGTRLRHALDATGSIQAIARALDILSGGGALALVGIGHGKLDLDPNILVEREISLVGCHAFAGELPEAIELLADLAPALQRFIEVLPTLDDVPEAYERLLRGESNALKTIIEVAG

SEQ ID NO: 2634 - protein, 160 aa, Bradyrhizobium japonicum USDA 110
MRRMMAAFVALALLASPAVHAVQPDEIMSDPAKETRARDLSRELRCMVCQNQSIDDSDAPLARDLRLLVRERIAAGDSNSQVLDFLVARYGEFVLLKPRFERQTLLLWLLGPLLLTGGGLALWLQIRRRSRSGADLPAPPLTPDEEARLAALMSDEAKSS

SEQ ID NO: 2635 - protein, 191 aa, Pneumocystis carinii
MQTIKCVVVGDGAVGKTCLLISYTTNKFPSEYVPTVFDNYAVTVMIGEEPYTLGLFDTAGQEDYDRLRPLSYPQTDVFLICFSVTSPASFENVREKWHPEVRHHCPGTPCLIVGTQIDLRDDPMIVEKLSRQRQTPITKELGEKLSKELGAVKYVECSALTQKGLKNVFDEAIVCALEPPVTKKKTKCLIL

SEQ ID NO: 2636 - protein, 337 aa, Triticum aestivum
MKTLLILTIIAVALTTTTANIQVDPSGQVQWPQQQQPFPQPQQPFSQQPQQIFPQPQQTFPHQPQQAFPQPQQTFPHQPQQQFPQPQQPQQPFPQQPQQQFPQPQQPQQPFPQQPQQQFPQPQQPQQPFPQPQQPQLPFPQQPQQPFPQPQQPQQPFPQLQQPQQPLPQPQQPQQPFPQQQQPLIQPYLQQQMNPCKNYLLQQCNPVSLVSSLVSMILPRSDCKVMRQQCCQQLARIPQQLQCAAIHGIVHSIIMQQEQQQQQQQQQQQQQGIQIMRPLFQLVQGQGIIQPQQPAQLEVIRSLVLGTLPTMCNVFVPPECSTTKAPFASIVADIGGQ

SEQ ID NO: 2637 - protein, 279 aa, Streptococcus pyogenes MGAS315
MVTTVKMTSGYEIPVLGFGTYQAADGEEAYQSTLAAIKADYRHIDTAAIYKNEESVGRAIKDSGVLREDLFITTKLWNDAHSYEGAKDALAASLDRLGLDYVDLYLIHWPNPKALRNTWKEANAQAWQYMEEAVEAGLIKSIGVSNFMVHHLEALQETAKITPAINQIRLAPGCYQKEVVDYCKANEILLEAWSPLGQGEIFDNETMQQLANKYDKTVAQVALAWSLAEGFIPLPKSVHDERIKENMAIFDVSLTPEDKKTIRYLSGMSAISNPDTTSF

SEQ ID NO: 2638 - protein, 325 aa, Vitis vinifera
GGGNFGVARLVSDKRTRELFAVKFIERGQKIDEHVQREIMNHRSLMHPNIVRFKEVLLTPTHLAIVMEYAAGGELFGRICNAGRFSEDEARFFFQQLISGVSYCHSMRICHRDLKLENTLLDGSTAPRVKICDFGYSKSSVLHSQPKSTVGTPAYIAPEVLSRKEYDGKLSDVWSCGVTLYVMLVGAYPFEDPDDPRNFRKTIGRILSVHYSIPDYVRVSIECRHLLSRVFVANPDKRITIPEIKTHPWFLKNLPIEMMDGGSWQKNDVNNPSQSVEEILSIIQEARKTTGVRKAGGPFMEGSMDLDDIDADEDIETSGDFVCPL

SEQ ID NO: 2639 - protein, 103 aa, Brassica napus
  misc_feature (12)..(12): Xaa can be any naturally occurring amino acid
  misc_feature (15)..(15): Xaa can be any naturally occurring amino acid
  misc_feature (22)..(22): Xaa can be any naturally occurring amino acid
  misc_feature (29)..(29): Xaa can be any naturally occurring amino acid
  misc_feature (34)..(34): Xaa can be any naturally occurring amino acid
  misc_feature (39)..(39): Xaa can be any naturally occurring amino acid
  misc_feature (49)..(49): Xaa can be any naturally occurring amino acid
  misc_feature (54)..(54): Xaa can be any naturally occurring amino acid
  misc_feature (58)..(58): Xaa can be any naturally occurring amino acid
  misc_feature (61)..(61): Xaa can be any naturally occurring amino acid
  misc_feature (69)..(69): Xaa can be any naturally occurring amino acid
  misc_feature (74)..(74): Xaa can be any naturally occurring amino acid
MASSMLSSAAVXTSXPAQVTMXAPFTGLXKTSAXFPVTXKANNDITSIXSNGGXVSCXKVXPPVGKKKXETPPXPPLTTRSLNCVEAHYLPLIFAISATPLSR

SEQ ID NO: 2640 - protein, 358 aa, Azoarcus sp. EbN1
MSKFHDMRVASVRPETRDAIVVTFDVPPSLADSFHYAPGQHLTLRTEIGGEDVRRSYSICSGADERALRIAIKRVHGGLFSNWANDFMKPGVSVEVMPPSGHFGVAPDPQHHRNYAAFAAGSGITPILSQIKTILAAEQGSRFTLVYGNRSSSSVMFREELADLKDQYGERLNLVHVLSREQQDIELFNGRIDRERCDALLTRWIDAKRIDVAFICGPMDMMEAVSASLQAHGVAKSAIKMELFATSLPKGPRPVHSHPVKGTEDCEVTVIQDGRVRQFTMPKNRDSVLDAGLGQGIEMPYSCKGGVCSTCRCKVIDGEVDHDTNFALEDYEIARGFRLSCQSYPVTDKLVLDFDQET

SEQ ID NO: 2641 - protein, 201 aa, Pisum sativum
MSNEYDYLFKLLIIGDSSVGKSCLLLRFADDSYVDSYISTIGVDFKIRTVELEGKTVKLQIWDTAGQERFRTITSSYYRGAHGIIIVYDVTDMESFNNVKQWLHEIDRYANDSVCKLLVGNKCDLTENKVVQTQTAKAFADELGIPFLETSAKDSINVEQAFLTMAAEIKKKMGSQPSGSKSAESVQMKGQPIPQNNNCCG

SEQ ID NO: 2642 - protein, 448 aa, Clostridium perfringens str. 13
MEKVDFSKLTGDLVTRENIEYEKSIESWNRAIKKYPLGIVFCNNIDDVKNALEWAKENNIPFRIRVGRHNYEGYSIENDILVIDLSKMNNIIIDEENMKVTIEGGVKNEEIYEALGVLGYPFPGGGCPTVGVVGFALGGGWGYSSRLLGLGCDNLLEVKFINSKGKIVIANEYDNSDLFWAAKGCGGGNFGVVVSMTFKIPQKIEMATLIDIDYPNAEKEELVYVIRTLQKKFKNLDRRMNLKTAIYNSKYKGIGVKITGLFYGHKEEANEILLPFKLPTRVNFNLSYMRVLEANRKIEYSHPPYEKYKSTGRFVFRDYDNSEIEKLIDIVSNRAEGAYYTAISFYGLGGAVKDVHKNSSAFYYRDARFIMGIQSVWEDDIFAEENIKWIKNNFKYIESITTGSFINFPFKDLKDYEEEYYGENKDKLREIRKKYDENRFFAFEQGIK

SEQ ID NO: 2643 - protein, 496 aa, Nicotiana tabacum
MVLSKTASESDVSIHSTFASRYVRTSLPRFKMPENSIPKEAAYQIINDELMLDGNPRLNLASFVTTWMEPECNTLMMDSINKNYVDMDEYPVTTELQNRCVNMIAHLFNAPLGDGETAVGVGTVGSSEAIMLAGLAFKRKWQNKMKAQGKPFDKPNIVTGANVQVCWEKFARYFEVELKEVKLSDGYYVMDPEKAVEMVDENTICVAAILGSTLNGEFEDVKRLNDLLIEKNKETGWDTPIHVDAASGGFIAPFLYPELEWDFRLPLVKSINVSGHKYGLVYAGIGWAIWRNKEDLPDELIFHINYLGADQPTFTLNFSKGSSQVIAQYYQLIRLGFEGYKNVMENCQENARVLREGIEKSGRFNIISKEIGVPLVAFSLKDNSQHNEFEISETLRRFGWIVPAYTMPPNAQHVTVLRVVIREDFSRTLAERLVIDIEKVLHELDTLPARVNAKLAVAEANGSGVHKKTDREVQLEITTAWKKFVADKKKKTNGVC

SEQ ID NO: 2644 - protein, 487 aa, Rhizobium sp. NGR234
MQRFQCYIDGEFADGEGRFESVDPATGAAWAEMPEAREADVDRAVEAAHKALDAGPWSKLTATLRGKLLYRLADLVAENAQRLAELETRDTGKIIRETSAQIAYVAEYYRYYAGIADKIEGSYLPIDKPDMEVWLRREPIGVVAMVVPWNSQLFLSAVKIGPALAAGCTMVVKASEDGPAPLLQFARLVHEAGFPAGVVNIITGFGPACGAALSRHPKVDHIAFTGGPETARHVVRNSAENLASTSLELGGKSPFIVFADADLESAANAQVAGIFAATGQSCVAGSRLIVEKSVKDRFLEILKRKAEAICIGSPLDMATEVGPLATERQRAHIQALLGRSLAAGARLVTGGTAPDGAGFFYQPTILDCDGNSTPALEEEFFGPVLSVVSFETEAEALALANATRYGLAAGLFTRDLTRAHRLMKGIRTGIVWVNTYRAVSPIAPFGGFGLSGHGREGGMEAALDFTRTKTVWLRTSDDPIPDPFVMR

SEQ ID NO: 2645 - protein, 377 aa, Sulfolobus solfataricus P2
MSVVSKGLENVIIKVTNLTFIDGEKGILRYRGYNIEDLVNYGSYEETIYLMLYGKLPTKKELNDLKAKLNEEYEVPQEVLDTIYLMPKEADAIGLLEVGTAALASIDKNFKWKENDKEKAISIIAKMATLVANVYRRKEGNKPRIPEPSDSFAKSFLLASFAREPTTDEINAMDKALILYTDHEVPASTTAALVAASTLSDMYSSLTAALAALKGPLHGGAAEEAFKQFIEIGDPNRVQNWFNDKVVNQKNRLMGFGHRVYKTYDPRAKIFKKLALTLIERNADARRYFEIAQKLEELGIKQFSSKGIYPNTDFYSGIVFYALGFPVYMFTALFALSRTLGWLAHIIEYVEEQHRLIRPRALYVGPEYQEYVSIDKR

SEQ ID NO: 2646 - protein, 246 aa, Zea mays
MAKNYPTVSAEYSEAVDKARRKLRALIAEKSCAPLMLRLAWHSAGTFDVSSRTGGPFGTMKHQSELAHGANAGLDIAVRLLEPIKEEFPILSYADFYQLAGVVAVEVTGGPEIPFHPGREDKPQPPPEGRLPDATKGSDHLRQVFGKQMGLSDQDIVALSGGHTLGRCHKERSGFEGAWTTNPLVFDNSYFKELLSGDKEGLLQLPSDKALLSDPVFRPLVEKYAADEKAFFDDYKEAHLKLSELG

SEQ ID NO: 2647 - protein, 469 aa, Zea mays
GTSPATSTTSLQAVDTFSGIRGSMSNYYDDYDDIDEMEDDYDMDDPIDDMVDEQQGIRDSDAEDNDYGQPNDKIPDTSSADARKGRDIQGIPWEQINITRKKYRQSRLEQYKNYENVPNSGEEAMKDCKPTEKGGIYYEFRRNTRSVKSTILHFQLRNLVWATSKHDIYLVSHYSIRHWSALSGVDTELINVQGHVAPREKHAGSLLEGFYQTQVSTLTVKDNLLVAGGFQGELICKHLDQEGISFCCRTTYDDNAITNAVEIFNTSSGAVHFMASNNDSGVRYYDMERFQLFKHFQFEWPVNHASLSPDRKVVVIVGDDPDGLLIDANSGKTVHSIKGHRDYSFASAWSPDGRTFATGNQDKTCRIWDVRNLSKSVHVLRGNLGAIRSIRFTSDGQFMSMAEPADFVHIYDVKSDYNKRQELDFFGEISGTSFSPDTDTLFVGVWDRMYGSLLQFGRLYNYSYLDSLF

SEQ ID NO: 2648 - protein, 154 aa, Magnetospirillum magnetotacticum MS-1
MKRLLVLLFVLATPALAVNPDEMLKDPAQEHRARELGKDLRCLVCQNQSIDDSDADLAKDLRVIVRERIAKGDSDDQVKSFVVDRYGDYVLLKPPFKATTLALWLGPLALFAGALWAVLAFYRRRPAEKAAPPPPPLSAEESRRLDKLLKETER

SEQ ID NO: 2649 - protein, 75 aa, Brassica napus
MPSKCEILCEILIAILLPPLGVCLRRGCCTVEFLICLVLTLLGYVPGIIYALYVIVFQNRDEYFDEARRPLYYSA

SEQ ID NO: 2650 - protein, 458 aa, Streptococcus agalactiae NEM316
MAYKTIYPYTNEVLHEFDNISDSDLEQSLDIAHALYKTWRKEDNVEERQNQLHKVADLLRKDRDKYAEVMTKDMGKLFTEAQGEVDLCADIADYYADNGQKFLKPVPLESPNGEAYYLKQAVGVLLAVEPWNFPFYQIMRVFAPNFIVGNTMLLKHASICPASAQAFEDLVREAGAPEGAFKNIFASYDQVSNLISDPRVAGVCLTGSERGGASIAAEAGKNLKKSSMELGGNDAFLILDDADFDLLSKTIFFARLYNAGQVCTSSKRFIVMADKYDEFVNMVVETFKSAKWGDPMDSETTLAPLSSAGAKDDVLKQIKLAVDHGAEVVFGNDTIDHPGNFVMPTVLTNITKANPIYNQEIFGPVASIYKVDTEEEAIALANDSSYGLGSTVFSSDPEHAKKVAAQIETGMTFINSGWTSLPELPFGGIKNSGYGRELSQLGFDAFVNEHLVFTPNSD

SEQ ID NO: 2651 - protein, 289 aa, Saccharomyces cerevisiae
GAMPPIFLPPPNYLFVRDVWKSNLYSEFAVIRQLVSQYNHVSISTEFVGTLARPIGTFRSKVDYHYQTMRANVDFLNPIQLGLSLSDANGNKPDNGPSTWQFNFEFDPKKEIMSTESLELLRKSGINFEKHENLGIDVFEFSQLLMDSGLMMDDSVTWITYHAAYDLGFLINILMNDSMPNNKEDFEWWVHQYMPNFYDLNLVYKIIQEFKNPQLQQSSQQQQQQQYSLTTLADELGLPRFSIFTTTGGQSLLMLLSFCQLSKLSMHKFPNGTDFAKYQGVIYGIDGDQ

SEQ ID NO: 2652 - protein, 175 aa, Triticum aestivum
  misc_feature (24)..(24): Xaa can be any naturally occurring amino acid
MAPAVMASSATTVAPFQGLKSTAXGLPVGRRSSGSLSSVSNGGRIRCMQVWPIEGIKKFETLSYLPPLSTEALLKQVDYLIRSKWVPCLEFSKVGFVFREHNSSPGYYDGRYWTMWKLPMFGCTDATQVLNEVEEVKKEYPDAYVRVIGFDNLRQVQCVSFIAFRPPGCEESGKA

SEQ ID NO: 2653 - protein, 219 aa, Triticum aestivum
  misc_feature (103)..(103): Xaa can be any naturally occurring amino acid
RVPREWTAQVEPGVHITFVSIPGGAGNDLKRIRFSREMFNKWEAQRWWGENYDRVVELYNVQTFRGRARWCCRRRPRRRRAGSGPSPGPRHTRRRATRPRPCXDPSDHVWAHHFNMLNSAAGAGASSMPSSAGAPAPYDPSRATTSSLDEASVSVSNASDLEAAEWVEQDEPGVHITIRELGDGTRELRRVRFSRERFGEERAKVWWEQNRDRIHTQYL

SEQ ID NO: 2654 - protein, 510 aa, Allium cepa
MPIPVLLLLTIFLALLLYLFFFVAKKHEGKRVPGPKGWPILGNLPQLGAKPHQSLCELSRTYGPLFGLRFGYVDVVVAASADVAEQFLRVHDVNFSNRPPNSGAEHIAYNYQDLVFAPYGPRWRMLRKLCALHLFSPKALEDLSPVRSLEVATLANTLYLRAQSDQPTVNLAQMLTTCTTNALSKAMMGRRVFVNETTDTETSKFKDMVLEIMSLAGVFNVGDFVPWLRPFDLQRVVRKMKDVHARFDSFLDKVIAEHRMVDNAHDLLSLLIRSKDDVDNDGVKLTNTDIKALLLNLFTAGTDTSSSTVEWALSEMIRHPDALKRAQRELDEVVGRDRLVSETDIRSLPYIQAIVKETFRLHPSTPLSLPRISSEACTVNGYLIPKNTTLLVNVWAISRDPGVWKEPLEFRPERFLGGGGYETVDLKGNDFELIPFGAGRRVCAGLSLGLRMVQFLTATLVHGFDWKLVDGQSAEKLDMEEAYGLPLQRAVPLMVRPVPRLDEKAYHVVV

SEQ ID NO: 2655 - protein, 478 aa, Klebsiella pneumoniae
MTAPVQHPMYIDGQFVSGRGDGWIDVLNPATEALLSRIPDGTAEEARLAIDAAERAQPGWEALPAIERAGWLRKIAAGIRQRADEIAGLIVAEGGKIQQLAAVEVAFTADYLDYMAEWARRYEGEIVQSDRPGENILVFKRALGVTTGILPWNFPFFLIARKLAPALITGNTIVIKPSEFTPNNAIAFAEIVHQVGLPKGVFNLVLGRGETVGQELAGNPKVAMVSMTGSVAAGEKIMAAAAKNITKVCLELGGKAPAIVMDDADLELAVKAVVDSRVINTGQVCNCVERVYVQQGIYDRFVNRLGEAMKAVQFGDPATRDDIAMGPLINAAARDQVAGKVRSGGAGGAGGAGGQPLEGKGYFYPPTLLLDVRQEMDIIHEETFGPVLPVVAFSTLDEALATANDSDYGLTSSIYTRDLNVAMKAIKGLKFGETYINRENFEAMQGFHAGWRKSGIGGADGRHGLNEYLQTQVVYLQA

SEQ ID NO: 2656 - protein, 490 aa, Pseudomonas syringae pv. tomato str. DC3000
MARFELQKLYIDGGYVDASNTETFDSINPANGEVLAKIQRASKEDVERAVVAAEKGQKIWAAMTAVERSRILRRAVDILRERNDELAALETLDTGKAISETRYVDIVTGADVLEYYAGLVPAIEGEQIPLRDSSFVYTRREPLGVVAGIGAWNYPIQIALWKSAPALAAGNAMIFKPSEVTSLTTLKLAEIYTEAGVPNGVFNVLTGSGREVGTWITEHPRIEKVSFTGGTDTGKKVMASASSSSLKEVTMELGGKSPLIVFDDADLDRAADIAMMANFYSSGQVCTNGTRVFVPNALKGEFEAKILERVKRIRPGNPEDENINFGPLVSFEHMESVLGYIAKGKEQGARLLCGGDRLTGGVFDKGAFVAATVFTDCTDEMTIVREEIFGPVMSILGYDTEDEVVRRANDTDFGLAAGIVTRDLNRAHRVIHLLEAGICWINAWGESAAQMPVGGYKQSGVGRENGISSLAQYTRIKSVQIELGDYASVF

SEQ ID NO: 2657 - protein, 451 aa, Arabidopsis thaliana
MSGSRRKATPASRTRVGNYEMGRTLGEGSFAKVKYAKNTVTGDQAAIKILDREKVFRHKMVEQLKREISTMKLIKHPNVVEIIEVMASKTKIYIVLELVNGGELFDKIAQQGRLKEDEARRYFQQLINAVDYCHSRGVYHRDLKPENLILDANGVLKVSDFGLSAFSRQVREDGLLHTACGTPNYVAPEVLSDKGYDGAAADVWSCGVILFVLMAGYLPFDEPNLMTLYKRICKAEFSCPPWFSQGAKRVIKRILEPNPITRISIAELLEDEWFKKGYKPPSFDQDDEDITIDDVDAAFSNSKECLVTEKKEKPVSMNAFELISSSSEFSLENLFEKQAQLVKKETRFTSQRSASEIMSKMEETAKPLGFNVRKDNYKIKMKGDKSGRKGQLSVATEVFEVAPSLHVVELRKTGGDTLEFHKVCDSFYKNFSSGLKDVVWNTDAAAEEQKQ

SEQ ID NO: 2658 - protein, 252 aa, Rickettsia sp. DmS1
LLCLRLSSLSAFYPDLLNFKEADYEHIAIRMIAEIPTIAAMSYKYSIGQPFIYPDNSLDFTKNFLHMMFAMPCTKYKVNPIIKNALNKIFILHADHEQNASTSTVRIAGSSGANPFACISTGIASLWGPAHGGANEAVINMLKEIGSSEYIPKYIAKAKDKNDPFRLMGFGHRVYKNYDPRTAVLKEMCKVLKELGQLDNNPLLQIAIELEAIALKDEYFIERKLYPNVDFYSGIIYKAMGIPSQMFTVLFA

SEQ ID NO: 2659 - protein, 512 aa, Aspergillus nidulans FGSC A4
MGQSHSKGNSGAGDSLQSYPSFSKSDTKESLRSFRGSIRSKIRSSDSPRASTSALNQSDDKSDAGSMKSVGSRRSSTNLSRPASADSSAASPTDAPDPPPSPTMSSSLKRGHQDVAAMKQSGEVDHVSDAPPSAAPPPGSQAKVGESILIKREDTSNPILDFIMKTPLHSDASSSSPGMGMGALKSIDLDDMITRLLDAGYSTKVTKTVCLKNAEITAICTAARELFLSQPALLELSAPVKIVGDVHGQYTDLIRLFEMCGFPPVSNYLFLGDYVDRGKQSLETILLLLCYKLKFPENFFLLRGNHECANVTRVYGFYDECKRRCNIKIWKTFVDTFNCLPIAATVAGKIFCVHGGLSPSLSHMDDIRNIARPTDVPDYGLLNDLLWSDPADMDEDWEPNERGVSYCFNKNVIMNFLQRHDFDLVCRAHMVVEDGYEFYQDRILVTVFSAPNYCGEFDNWGAVMSVSGELLCSFELLKPLDSAALKSHIKKGRKERNSLINSPPAVVSAQSF

SEQ ID NO: 2660 - protein, 468 aa, Vibrio vulnificus YJ016
MNQFGMTIDGQTVQGEMPSSIVLNPANEQEVFTAPVASIAQLNKAVESAKAAYPLWSALSQAQRDGYINKIADVIEQNASELADIIVKEQGKPTQLAQMEVGGAVAWTRHSASIAIPVEVYEDSENKRIEGRRKSIGVVGSITPWNWPLMIAIWHIIPALRMGNTVVLKPSELTPINTLKLGQLLQDVLPVGVLNVVSGSGDVGRAMSEHRDINKLVFTGSTLTGQNIMQAAATNLKRLTLELGGNDAGIVLPGANLDAIAEGLFATAFINMGQTCAALKRLYVHESQHDELCQKLADIAEKQVVGEGSADGVTFGPVQNSQQLEKVIALVEEAKQQGATIYAGGARLDKPGYFFPPTIVGDAQSGMRVVEEEQFGPVLPVIKYSTVADAVAAANNVGVGLGGSVWGDVEQASELASKLECGSVWINGHAEVLPHAPFGGCKMSGFGVEFGLEGLLENSLLQVVNINK

SEQ ID NO: 2661 - protein, 124 aa, Triticum aestivum
  misc_feature (26)..(26): Xaa can be any naturally occurring amino acid
  misc_feature (34)..(34): Xaa can be any naturally occurring amino acid
  misc_feature (101)..(101): Xaa can be any naturally occurring amino acid
MAPTVMSSTSVAPFQGLKSTAGLPVXSRRSNGAXSLGSVSNGGRIRCMQVWPIEGIKKFETLSYLPTLSTEALLKQVDYLIRSKWVPCLEFSKVGFIFREXHNASPGYYDRYLDNVESCPMFRH

SEQ ID NO: 2662 - protein, 253 aa, Rickettsia slovaca
YMLAAVGSLSAFYPDLLNFKEADYELTAIRMIAKIPTIAAMSYKYSIGQPFIYPDNSLDFTENFLHMMFATPCTKYTVNPIIKNALNKIFILHADHEQNASTSTVRIAGSSGANPFACISTGIASLWGPAHGGANEAVINMLKEIGSSEYIPKYIAKAKDKNDPFRLMGFGHRVYKNYDPRAAVLKETCKEVLKELGQLDNNPLLQIAIELEAIALKDEYFIERKLYPNVDFYSGIIYKAMGIPSQMFTVLFA

SEQ ID NO: 2663 - protein, 1121 aa, Ustilago maydis 521
MSHSQSLHSLAPRAEQSNGVIPAVLTEQLNANGSTDLKKVAITIVAFVALSLFTLIAFQILRPNNKIVYAPKYKYAEEGKAPPKASEGFFGWIPPILKYKEHDLLPLIGLDGVTFLRFVRMMRWMLTTLALLMSVVLMPVDIAYNVRNGGSNLVTNRLNYLNMSNVHGTYMWAHVGMSYVGTIVALSFIWYHYREMVRLRWSYFRSEEYQTSFHARTLMITDVTKRYQADNALGAVLSELKMPYPTTEVHIGRRVGLLPDLIEKHSDLVRELEHVLAKYLKNPNNLPSKRPTKTIGGFMGIGGEKLDAIDYLTEQINRVEAAVMHQRETIQQKKPEMYGFASLAAVPYAHAAAKVLQNKKPRGMRITLAPPPTGIIWQNLVKSRASRAKSSFFGFLMLLVLFFMNIFPLIIVSLLSNMARLTSISWLRWLKDWQTASSFTFAAVSGLGAPIIMGIASFFFPIAMRKIAKYRGVQTRYRLDRLLVGQYFGFLVISQFLFFSLIGVVLSLVSQLVVEINHDSALAIIKKLGRNAAYATKQQYLNQSNYWLTWLPLRGYLAVFDLAQVIKLLLVWIQKVFLGRTPRDVREYTKPPVFDYWIYYSNFLFMSAVAMIYAPLAPLVVVFSAIVFWASSFIYKYQLMYVFVTKHETGGMLWRPTINRLLICIGFMQVILILAVVLDTLNYYQAIAALPPILMLIAFKIYCRRTFDSRFDWYIPNEAEIAASKIHAGDARHNRLQRRFGHPSLHSKLFTPMVHAKVKHLLPQVYKGRLDTGVAMVDGRKVETEQVAGGLKIAAIEEDQLEYDPSKDSDARSVMSGTTLGGMSMAGIGATTPGSITGGPRGDYFKDQYANYMAAGPMHGGEEFEMSNVGARDSRDNLLEKHQNSLYNESLDGTLAGTTYGGKSSPEAGLGAHGQYNGYSAATTPGLESGIAQQASYVDPYSQAGGVYAPRIGGNHRAQGSQTSLGSYGNLLYGSNAAAAPTGYGSPGSQAAYGSGARGNGGVAHTASPGATQQISPGTVIAPTATQYQASGYTASPPNRQPPQQYMGAPPSRQASADYPYQPSAGYTHPQAQQAPMYSQQQSRQQPYPYGQHPSGGNHYAPSHGSQPGSGYQQDAYGYQR

SEQ ID NO: 2664 - protein, 166 aa, Glycine max
MATSSAKSVHDFTVKDAKGNDINLGDYKGKVLIIVNVASQCGLTNSNYTELSQLYEKYKQKGLEILAFPCNQFGAQEPGSNEQIQEFVCTRFKAEFPVFDKVDVNGDKAAPLYKYLKSSKGGLFGDGIKWNFSKFLVDKEGNVVDRYAPTTSPLSIEKDLLKLLDA

SEQ ID NO: 2665 - protein, 457 aa, Rhodococcus sp. DK17
MSYYATTSPLTGQRVQEFPRATDHEISDALTSSDAAYRQWRTSSLEERADVLRALAKLWHERADELAPILTLEMGKPIPQARGEVALCANIFEYYAEHGPTFMEDEVLEIAGGGEAIVRTEPIGPLVGIMPWNFPYYQVVRFAAPNIMLGNTLLLKHSRNCPQSALAIETLFVEAGLPEGVYVNVFADNAQVARMVADPRVRGVSLTGSERAGSAVGEIAGRHMKKFVLELGGSDPFIVLDDTDLDTTVAAAVNNRMANAGQACTASKRLIVLDDVYDRFLDKFTEAMRNIVPGDPTDPATTFGPLSSRSCVDEIAEQVDDALAKGAKLLTGGCRGEGPGAFYEATVLAGVTPQMRVYSEELFGPVAVVYKVATEAEAIALANESPFGLAAAIFTSDRNQARRVAEDLEVGMAWINGTSKSAPDLPFGGVKRSGVGRELGRYGFNEFANKKLVRTVR

SEQ ID NO: 2666 - protein, 229 aa, Candida albicans SC5314
MVKSNVESAWETMEDTFSEIQNKFHQIYKPIDTGKPDEDDETTKKESLDITDDSTLSVSPITQLLYLARSKFYDLTPLDNQKSPFPFKNLRGKVVLIVNVASRCGFSFQYNGLEQLNKRFANDDFVLLGVPCNQFLWQEPGTNDQIVTKCKKKYDVSFQILDKINVNGEQADPVYKFLKAQKEGLWGTNRVKWNFEKFLIDKNGRVVERYSTFTRPVAIIPKIEQLLES

SEQ ID NO: 2667 - protein, 488 aa, Streptomyces avermitilis MA-4680
MPDLFIDGEWVRGATGTTREVVNPFDATVVRSVDEGDATDVDRAVTAARRAFHAADWAAAPTQRRADVLFRVAEYLLRDIEEIARDETLNTGKTLAEARIDVKDVSNAFRYFAEMAGKDAGRVVDAGPDVLSRVVHEPVGVCALIAPWNYPLLQASWKVAPALAAGNTFVLKPSEITPLTTIAMMRLIEEAGAPPGVANLVLGAGATVGSAMTVHPEVDLVSFTGGLGTGRRIMESAAREVKNIALELGGKNPNVVFDDADFEAAVDHTLDASFLHSGQVCSAGSRLLVQDSWHDRFVRELADRASRIRLGNGLDPHTESGPLSSAEHRAKVEKYIDLGRSEGARLVTGGRRPDDPDLAHGFFLLPTIFDDCDRSMRIVQEEVFGPVVTVETFRTEDEAVELANDTRYGLAAGVWTGEASRAQRVAARLRHGTVWINDFHPYLPQAEWGGYGQSGVGRELGPTGLREYQEIKHIYQNLSPGPSGWFKG

SEQ ID NO: 2668 - protein, 343 aa, Chrysosplenium americanum
MLFAMQLASASVLPMVLKSAIELDLLEIIASQDTCMSPTEIASHLPTTNPHAPTMIDRILRLLSSYSIVTCSVRSVDDQRVYSPAPVCKYLTKNQDGVSIAALCVAAQDKVLMECWYHMKDAVLDGGIPFNKAYGMPIFDYFAKDLGSNKVFNKGMSDFSSMIIKKILETYKGFQGLTSLVDVGGGTGATLTKILSKYPTIRGINFDLPHVIQDAPEYPGIEHVGGDMFVSVPKGDAIFMKWICHDWNEEQCLKLLKNCYDALPNNGKVIVAEYILPVVPDSSLASKLSVTADVMIVTQNSGGKERTEKEFEALAKAAGFQGFQVFCNAFTIYIIEFSKNISN

SEQ ID NO: 2669 - protein, 170 aa, Gossypium hirsutum
MASQSSKPQSIYDFTVKDAKGNDVDLSIYKGKVLIIVNVASQCGLTNSNYTDLTEIYKKYKDQGLEILAFPCNQFGGQEPGSIEESIQNMVCTRFKAEYPIFDKVDVNGDNAAPLYKFLKSSKGGFFGDSIKWNFSKFLVDKEGNVVDRYSPTTTPASMEKDIKKLLGVA

SEQ ID NO: 2670 - protein, 388 aa, Zea mays
  misc_feature (294)..(294): Xaa can be any naturally occurring amino acid
MEAGGAGSGLNGAVQAKGTGADGGSAKPLPPCCVKARAAAPESEARCHATVVSGWFTEPRSRCGKASKVQYYNNPMWPGEANSLKVEKILYQGKSPYQEVLVFESSTYGKVLVLDGIVQLTDKDECAYQEMITHLPLCSIPSPKKVLVIGGGDGGVLREVSRHSSVESIDICEIDQLVIDVCKDFFPHLSVGFQDPRVQLHVGDAVEFLRNAPEGTYDAIIVDSSDPIGPAQELVEKPFFDTIARALRPGGVLCNQAESMWLHTHLVQDMLSICRETFKGSVRYAWTSVPTYPXSGVIGFLLCAKEGPLVNFLTPINPIEKLEGATKAGREIRFYNSEMHRAAFVLPTFARRELEAYCVSTETEQAEETPAAPLKLTLASRSEIFATS

SEQ ID NO: 2671 - protein, 362 aa, Saccharum officinarum
MGSTAEDVAAVADEEACMYAMQLASASILPMTLKNALELGLLEVLQAEAPAGKALAPEEVVARLPVAPTNPDAADMVDRMLRLLASYDVVKCQMEDKDGKYERRYSAAPVGKWLTPNEDGVSMAALTLMNQDKVLMESWYYLKDAVLDGGIPFNKAYGMTAFEYHGTDPRFNRVFNEGMKNHSVIITKKLLEFYTGFEGVSTLVDVGGGIGATLHAITSHHPQIKGINFDLPHVISEAPPFPGVQHVGGDMFKSVPAGDAILMKWILHDWSDAHCATLLKNCYDALPENGKVIIVECVLPVNTEAVPKAQGVFHVDMIMLAHNPGGRERYEREFHDLAKGAGFSGFKATYIYANAWAIEFIK

SEQ ID NO: 2672 - protein, 180 aa, Glycine max
MQHRKLTSGRPSGTDGSDYSYRMVVDSRYQLVAKGKKYLSLHFITEAVLLLIGATLAYLPGIEADAPNTVAYSSVIVSVVSLIIGNIGRRRSRSGLLRFYAVVSSIVMLLLIASLATQHLLLKAIQDSKLWRTGKYDVNDLSHFQIGLLLYMVTLSVLKLCTVNAVVSLLFNMAPPKKTS

SEQ ID NO: 2673 - protein, 113 aa, Triticum aestivum
MLEWFADIRLINGEAIHASPRKTGAIILGGGLPKHHICNANMFRNGADYAVYINTAQEFDGSDSGAHPDEAVSWGKIKGSAKPVKVHCDATIAFPLLVAATFARRSRSANSTN

SEQ ID NO: 2674 - protein, 430 aa, Bifidobacterium longum DJO10A
MATAQLDVDSNKFNLPVVKASAGPDGIVVSKLRNDGWVTLDPGFLTTAQCESKITYIDGKHSILRYCGYPIEQLCENSDFLEVAWLLRHGELPSRAEYEQFCADINHKTMVGEDFRTFMGSFPRSAHPMSVLASAINALATFYPDTTDISDTDQLDEAAKIIMAKARTIVSYIFRRRRDEPMLYPDYARGYVDDFLRMCFAVPYEPFESDPLYVHALGRLLIIHADHEQNCSTSVVRIAGSAHANLYSAVAAGVNALSGPLHGGANEAVLRQLKAIRDSGKSVAEFVRDAKENGQKISGLGHRVYKSYDPRAAIARKYLEKIMEREDTQKLPSDERALFAVATELEDIALNDEYFVSRNLYPNVDFYTGLIYRAIGFDPAMFTTLFALGRIPGWIAQYREMLADPNTKIGRPRQVYTGPVERDFVPMDER

SEQ ID NO: 2675 - protein, 125 aa, Glycine max
  misc_feature (99)..(99): Xaa can be any naturally occurring amino acid
ASSLISSPAVISVNPAGAGMVAPLTGLKCMAGFPTRKTNNDLPFIATNGGRVECMRVWPPVGKKKFETLSYLPYLDDARLAKEIKFLLRKGWIPCLEFXMEHCFSYREHSQSPGYYDGTYWTMRN

SEQ ID NO: 2676 - protein, 192 aa, Zea mays
IGYLEAGRKNALPANAKISKDAKETVQECVSEFISFITGEASDKCQREKRKTINGDDLLWAMTTLGFEDYVEPLKHYLHKFREIEGERAAASAGASGSQQQQGELPRGAANAAGYAGYGAPGSGGMMMMMMGQPMYGGSQPQQQPPQPQPPQQQQQQHQQHHMAMGGRGGFGQQGGGGGSSSSSGLGRQDRA

SEQ ID NO: 2677 - protein, 170 aa, Mesembryanthemum crystallinum
MASQSTDQPKSIHDFIVKDARGNDVDLSIYKGKVLLIVNVASQCGLTNSNYPELTKLYEQYKDKGLEILAFPCNQFGNQEPGDNEQIMEFACTRFKAEFPIFDKVDVNGSNAAPVYKYLKSSKGGLFGDGIKWNFTKFLVDRDGKVVDRYAPTTSPASIEKDIKKLIGTS

SEQ ID NO: 2678 - protein, 398 aa, Zea mays
  misc_feature (84)..(84): Xaa can be any naturally occurring amino acid
MSAAATKVKRRVGKYELGRTIGEGTFAKVRFAKNTETGEPVAVKILDKEKVLRHKMAEQIKREISTMKLIKHPNVVRIYEVMGXSKTKVYIVLEYVTGGELFDTIANQGRMREGEARSYFQQLINAVDYCHSRGVYHRDLKPENLLLDSYGNLNVSDFGLSALSQQIKDDGLLHTTCGTPNYVAPEVLEDQGYDGAMADLWSCGVILFVLLAGYLPFEDSNLMTLYKKISNAEYTFPPWTSFPAKRLLTRILDPNPMTENSCDFRITIPEILEDEWFKKGYKRPEFDEKYDTPLDDVDAVFNDSEEHHVTEKKEEEPVALNAFELISRSAGLNLGNLFDSEQEFKRETRFTSKCPPKEIIRKIEEAAKPLGFGVQKKNYKLRLEKVKAGSHGSTGCRP

SEQ ID NO: 2679 - protein, 253 aa, Triticum aestivum
SLRFHEECRKRKLKVSVVAVPKTIDNDILFMDKTFGFDTAVEEAQRAINSAYIEARSAYHGVGLVKLMGRSTGFIAMHASLSSGQIDVCLIPEVSFTLDGEHGVLAHLEHLLETKGFCVVCVAEGAGQDLLQKSNATDASGNVILSDFGVHMQQKIKKHFKDIGVLADVKYIDPTYMVRACRANASDAILCTVLGQNAVHGAFAGFSGITSGICNTHYAFLPITEVITTPKHVNPNSRMWHRCLTSTGQPDFH

SEQ ID NO: 2680 - protein, 442 aa, Haloarcula marismortui ATCC 43049
MSYTALQVDPNVLAEGVNLLWVLTVSFLIFFMHAGFAMLEAGQVRSKNVANQLTKNLLTWSVGVVVFFLIGSGISSLVGTGSFAPAFGAEAANDYVGWLFGAVFAMTAATIVSGAVAGRAKLRAYITYTFLLAAVIYPVVTGLTWAGAHISLGGVVFKDFAGGMIVHGMGGIAGLTAAYVLGPRMGRYNEDGSANVIPGHSMTFAVLGTLILAFGWYGFNVGTAASVFVVEDGALALGAFATVGRVAMTTTVAMAMGAIGAALVAWLKTGKVDTLYVANGLLAGLVGITAIPDTTTWWGALIVGLLAGGQLPIVFSFMENRMKIDDVCAVFPVHGSAGVLGTIMYPLVATSGTVGSIGSALAVQVVGVAVIAGWTIVTTGLIWYGLKAAGQARVTPEHEQEGLDVSEHGVETYPEFGGGEGVVADGGKVNTNVRTDGGSKDD

SEQ ID NO: 2681 - protein, 150 aa, Brassica napus
VDPRVRGIDVVRFGELMMSSGIVLNDSISWITFHGGYDFGYLVKLLTCKELPLRQADFFKMLFVYFPTVYDIKYLMTFCNGLFGGLNRLAELMGVERVGICHQAGSDSLLTLGSFRKLKERYFPGSTDKYTGVLYGLGVEDSATSTAIAN

SEQ ID NO: 2682 - protein, 342 aa, Streptomyces avermitilis MA-4680
MKALVKEKAEPGLWLMDVPEPEIGPGDVLIKVLRTGICGTDLHIRSWDGWAQQAVRTPLVLGHEFVGEVVETGRDVVDIKAGDRVSGEGHLVCGKCRNCQAGRRHLCRATVGLGVGRDGAFAEYVALPAANVWVHRVPVDLDVAAIFDPFGNAVHTALSFPLVGEDVLITGAGPIGLMAAAVARHAGARNVMITDVSEERLELARKIGVSLALNVADTTIADGQRALGLREGFDIGLEMSGRPEAMRDMIANMTHGGRIAMLGLPSQEFPVDWARIVTSMITIKGIYGREMFETWYAMSVLLEGGLDLAPVITGRYGYRDYEAAFADAASGRGGKVILDWTL

SEQ ID NO: 2683 - protein, 312 aa, Chromobacterium violaceum ATCC 12472
MAIQWFPGHMNKARKDVSERLKDIDVVIEMLDARLPASSANPMLARMAKGKPRLMLLNKQDLADPAVTEQWLAWYRAKKQTEALGMDAGERAPAQRLIAACRALAPNRGGLEKPLRVLICGIPNVGKSTLINSMSSRKIAKTGNMPGVTKNEQRIILADDFELYDTPGMLWPKIEVEEGGYNLAASGAVGRNAMDEEEVALELLKYLLVHYRAELAARYKLDEEELDGAQDWQALERIGKRRGAVLSGGRINMQKAAEIVLTDFRDGQTGRITLERPEEWAKWEKRAKEIAAQRAAEREAREQEKASRKGSR

SEQ ID NO: 2684 - protein, 179 aa, Vibrio vulnificus YJ016
MKYSSIALLLLSSVAASTSYAGDFSLTSHDIMEGQRMAKTFEFKGFGCSGDNLSPQLSWQNAPKGTKSFAITAYDPDAPTGSGWWHWSAIDIPANVSELPRGVDLKKVGATEIRNDYGAKGFGGVCPPEGDGMHRYQFTVWALPEAKLDLDSNSSPALVGFMLNAMALDKATLTATYVR

SEQ ID NO: 2685 - protein, 489 aa, Glycine max
SSTQQILLFLTKLLSKNSSGDSISTMSNSEHNIITGHAGYVLEDVPHLSDYIPHLTTYPNPLQDNPSYSVVKEHSVDVDDTIAQKAIVHKNSPRETHFRRAGPRQKVYFESEDVYACIVTCGGLCPGVNTVIREIVCGLYHMYGVHKVLGIEGGYRGFYSCNTIPLTPKVVNDIHKRGGTILGTSQGEGGNDTLKIVDSIQDRGINQVYILGGDGTQRGASVIFEEIRRRGLKVSVVGIPESVDNDIPVIDKSFGFDTAVEEAQRAINAAHVEAESTENGIGVVKLMGRHSGFISMYATLASRDVDCCLIPESPFYLEGPGGLFEFIRKRLAENGHMVIVISEGAGHELISESLSATNKQEASGNKLLQDVGLWLSQKIKDHFTKSQKMDITLKYIDPTYMIRAVPSIASDNVHCTLLAQSAVHGAMAGYTGFAVGTVNGKHAYIPFYRINEIEKKVVITDRMWARLLSSTNQPSFLNPKDITTHQTGN

SEQ ID NO: 2686 - protein, 506 aa, Vibrio vulnificus YJ016
MTQQLEQNLATAQKYLARFRDNTLGHFINGEWTLGSKGETFDNLTPTDNTSLGKVVKGTAEDVDAACEAAQQAFTAWAEMSGAERKKILHKLADKIEQRAEEIALVESMDCGQPLRFMRQAAIRGAANFRFFADKSPEAKNGLSLHQDTHTNYTIRTPIGPVGVITPWNTPFMLSTWKIAPALAAGCTVVHKPAEFSPLTAAILAECAKEAGLPDGVWNMVNGFGEVAGKTLTEHKAIKAVAFVGETVTGSMIQAQGAPTLKRVHFELGGKNPVIVFDDADFERALDAVVFMIYSLNGQRCTSSSRLLIQNGIKPKFIEALKQRVESLQVGHPLDPETEVGPLVHQSHYNKVMSYMTAAEEDGATIAVGGRKLPEKGAGNYLTPTLFTDADNTMRIAREEIFGPVLTCIGFDSEEEALEIANDTDYGLSGYIWTSNTGRAMRMATKVEAGMIWVNSENNRNLPSPFGGVKMSGIGRDGGDWSFDFYMETKNVCIAHDLHRVPTLGK

SEQ ID NO: 2687 - protein, 494 aa, Bacillus thuringiensis serovar konkukian str. 97-27
MLTKNIELKPKVKAFLNEEIKMFINGEFVPSISGKTFETYNPATEDVLAVVYEAQEEDIDVAVKAARSAFESGPWVEMTTAERAHLIYKLADLIEEHGEELAQLEALDNGKPYQVALDDDIAATVENYRYYAGWATKIIGQTIPISKDYLNYTRHEPVGVVGQIIPWNFPLVMSSWKMGAALATGCTIVLKPAEQTPLSLLYTAKLFKEAGFPNGVVNFVPGFGPEAGSAIVNHHDIDKVAFTGSTVTGKYIMRQSAETIKHVTLELGGKSPNIILEDADLKEAINGAFQGIMYNHGQNCSAGSRVFVHRKHYETVVNELVKMANNVKLGAGMEKETEMGPLVSKKQQERVLHYIEQGKAEGATVAAGGERAFEKGYFVQPTVFTDVTDDMTIVKEEIFGPVVVVLPFDSTEEVIERANRSSYGLAAGVWTQNIKTGHQVANKLKAGTVWINDYNLENAAAPFGGFKQSGIGRELGSYALDNYTEVKSVWVNIK

SEQ ID NO: 2688 - protein, 343 aa, Arabidopsis thaliana
MEGDVGIGLVCQNTMDGKASNGNGLEKTVPSCCLKAMACVPEDDAKCHSTVVSGWFSEPHPRSGEAHSLKVEKVLFKDKSDFQEVLVFESATYGKVLVLDGIVQLTEKDECAYQEMIAHLPLCSISSPKNVLVVGGGDGGVLREISRHSSVEVIDICEIDKMVIDVSKKFFPELAVGFDDPRVQLHIGDAAEFLRKSPEGKYDAIIVDSSDPVGPALALVEKPFFETLARALKPGGVLCNMAESMWLHTHLIEDMISICRQTFKSVHYAWSSVPTYPSGVIGFVLCSTEGPAVDFKNPINPIEKLDGAMTHKRELKFYNSDMHRAAFALPTFLRREVASLLAS

SEQ ID NO: 2689 - protein, 120 aa, Glycine max
TDTTVNQDDTGKIAPFTDLKSMAGFPTTKTNNDITSIASNGGRAQCMYVLPPVAKKKFETLSYLPKLDDAQLANEGEYHLRNGWIPCLEFEMEHGFVYREHNRSPGYYYGRYRTMRKQPM

SEQ ID NO: 2690 - protein, 527 aa, Zea mays
  misc_feature (150)..(150): Xaa can be any naturally occurring amino acid
MATSRPLALALLLCALSACSHAAISYPPSAMSTAAPANNGFLSCLIKSVPPRLLHGKSSRAYGSIWESTVRNVKFVSDKTVKPVYIITPTEAAHIQATVACGRKHGLRVRVRSGGHDYEGLSYRSAKPETFAVVDLSMMRQVRIDGQGRXTAWVDSGAQLGELYYAVAKMTPSLGFPAGVCATIGVGGHFSGGGFGMLLRKYGTAGDNVIDAKVVDANGTLLDRKSMGEDYFWAIRGGGGESFGIMVSWQVQLVPTPPPTTVPTRPRGVKDGAIDLINKWQQVAPSLPDDLMIRIMAMEQDAMFEALYLGTCKDLLPLMASRFPELGVKQEDCNEMPWIQSVAFIPMGKSATVMDLLNRTSNIKAFGKYKSDYVKDPIPRDVWEKIYTWLAKPGAGVMIMDPYGARISSIPQDATPFPHRQGVLFNIQYVSYWFGEGDGAAPTQWSRDMYAFMEPYLSKNPRQAYANYRDLDLGVNEVVGDVSTYDSGRVWGEKYYNGNFERLARTKAKVDPCDYFRNEQSIPPLLK

SEQ ID NO: 2691 - protein, 327 aa, Bordetella bronchiseptica RB50
MSAQIRLMPSQLEALRRHTVVVADTGDFEAMRALRPTDATTNPSLILKAVQQEAYRPLLVQTARAHQGASPAEITDRLLVAFGRQILDIVPGRVSTEVDARLSFDTRATVERARGLIALYQAAGVPRERVLIKIASTWEGIQAARVLQAEGIRCNLTLLFCLPQAAACADAGVQLISPFVGRIYDWHKKNAGAEWVEDARRGANDPGVQSVSRIYRYYKRFGIETEIMGASFRNVDQILALAGCDLLTISPELLTRLSQTEGEVPAALSPQAGHDDADAVRLDGGEVAFRTQLNEDAMASEKLSEGIRLFVADARKLDALIESHGAA

SEQ ID NO: 2692 - protein, 506 aa, Magnetospirillum magnetotacticum MS-1
MLYASPNTSGAKVQYKAKYDNFIGGKWVAPVKGEYFDVITPINGKAYTKAARSGAEDIELALDAAHAAADAWGKTPPAERANILLKIADRLEANLELLAYAETVDNGKPIRETLAADIPLSVDHFRYFAGCLRAQEGGMSDIDENTVAYHFHEPLGVVGQIIPWNFPILMAAWKLAPALGAGNCVVLKPAESTPISILILAELIADLLPPGVLNIVNGYGREAGMPLASSKRIAKIAFTGSTSTGRVIAQAAANNLIPATLELGGKSPNIFFPDVAQADDGFFDKAIEGLVLFAFNQGEVCTCPSRALIHESIYDKFMDRVLGRVAAIKQGSPLDTDTMIGAQASKEQMTKIMSYLDLGKQEGAQLLIGGERAYLGGELNDGYYIQPTLFKGHNKMRIFQEEIFGPVLAVTTFKDEAHALELANDTLYGLGAGVWSRNGNVAYRMGRAIKAGRVWTNCYHAYPAHAAFGGYKESGIGRETHKVMLDHYQQTKNLLVSYSESKLGFF

SEQ ID NO: 2693 - protein, 449 aa, Bacillus thuringiensis serovar konkukian str. 97-27
MKTKQTDELLAKDEQYVWHGMRPFSPNSTMVGAKAEGCWVEDIQGKRYLDGMSGLWCVNSGYGRKELAEAAYKQLQTLSYFPMSQSHEPAIKLAEKLNEWLGGEYVIFFSNSGSEANETAFKIARQYYTQKGEPHRYKFMSRYRGYHGNTMATMAATGQAQRRYQYEPFASGFLHVTPPDCYRMPGIERENIYDVECVKEVDRVMTWELSETIAAFIMEPIITGGGILMPPQDYMKAVHETCQKHGALLISDEVICGFGRTGKAFGFMNYDVKPDIITMAKGITSAYLPLSATAVKKEIYEAFKGKGEYEFFRHINTFGGNPAACALALKNLEIMENENLIERSAQMGSLLLEQLKEEIGEHPLVGDIRGKGLLVGIELVNDKETKEPIDNDKIASVVNACKEKGLIIGRNGMTTAGYNNVLTLAPPLVISSEEIAFVIGTLKTAMERI

SEQ ID NO: 2694 - protein, 190 aa, Brassica napus
  misc_feature (41)..(41): Xaa can be any naturally occurring amino acid
  misc_feature (52)..(52): Xaa can be any naturally occurring amino acid
  misc_feature (99)..(99): Xaa can be any naturally occurring amino acid
  misc_feature (154)..(154): Xaa can be any naturally occurring amino acid
WLPLCFPAAAVVTSPAQATMVAPFTGLKSSAAFPVTRQSKXNDITSIASNGXGELAGMKVWPPVGKKKFETLSYLPDPYRKLNGGKEVDYLLRNKWIPXCLNSSWEAPGFVYPWSTESTPGILTMGRYWDNVGSFPCSGCTGLCSKWLKEVQEXKRSTPNAFIRIIGFDNNRQVQCISFIAYKPPSFTGA

SEQ ID NO: 2695 - protein, 160 aa, Pseudomonas putida KT2440
MSAFHDLKLEALNGGELPLAPFKGQVVLVVNVASKCGLTPQYKALENLYQIYKDKGFNVLGLPCNQFAGQEPGSEKEIQDFCSLNYGVSFPLGSKLEVNGPQRHSLYRLLAGEGAEFPGDITWNFEKFLVGKDGRVLARFSPRTAPDDPAVVQAIEKALA

SEQ ID NO: 2696 - protein, 490 aa, Hordeum vulgare
MVVTVAATGPDTAETLHSTTFASRYVRDQLPRYRMPENSIPKEAAYQIISDELMLDGNPRLNLASFVTTWMEPECGKLIMDSVNKNYVDMDEYPVTTELQDRCVNMIAHLFNAPIGEDETAIGVSTVGSSEAIMLAGLAFKRKWANKMKEQGKPCDKPNIVTGANVQVCWEKFARYFEVELKEVKLTEGYYVMDPKKAVEMVDENTICVAAILGSTLTGEYEDVKLLNDLLVEKNKETGWNVPIHVDAASGGFIAPFLQPELEWDFRLPLVKSINVSGHKYGLVYPGVGWVIWRSKDDLPEELIFHINYLGADQPTFTLNFSKGQQIIAQYYQLIRLGFEGYKHIMENCKLNAAVLKEGIDATGRFDVLSKADGVPLVAIRLKDSTNFSVFDISENLRRFGWIVPAYTMPADAEHVAVLRIVIREDFNRSLAQRLLADINKIIGELDAHAVHAIKLSTAAAGGDGASKSAVDAATEAFKDLAGKKKAGVC

SEQ ID NO: 2697 - protein, 150 aa, Triticum aestivum
ILALSNPTSQSECTAEQAYTWSQGRAIFGSGSPFDPVKYNDKLFVPAQANNAYIFPGFGLGVVISGAVRVSDDMVLAAAEGLAEQVTPEHIEKGLIYPPFSIIRKISANIAARVAAKAYDLGMASQLPRPKDLVKYAESCMYSPVYRTYR

SEQ ID NO: 2698 - protein, 443 aa, Triticum aestivum
FVDEDDTVPQKVVVQKNSRRGVHFRRAGPRQRVNFESDEVKACIVSCGGLCPGLNTVIRELVCGLAHMYNVNNIFGIQNGYKGFYSSNYVAITPKTVNDIHKRGGTVLGTSRGGHDTKKIVDNIQDRGINQVYIIGGDGTQKGAYEIYKEIRKRGLKVAVAGVPKTIDNDIAIIDKSFGFDSAVEEAQRAINSAHVEACSAENGIGLVKLMGRYSGFIAMYATLASRDVDCCLIPESPFYMDGEGGLLQYVERRLKENKHMVIVVAEGAGQDIIAKSIPASDQLDASGNKLLLDIGLWLTHKIKDHFKSKKMEMTIKYIDPTYMIRAIPSNAADNVYCTLLAHSAIHGAMAGYSFTVGMVNGRHAYIPFYRVTSTRNKVKITDRMWARLLSSTNQPSFLRQKDIDEAREADRLTNKPPLPPVANQNVAKAFDQSASASSNGEI

SEQ ID NO: 2699 - protein, 503 aa, Glycine max
  misc_feature (118)..(118): Xaa can be any naturally occurring amino acid
MSIPIPHRQLFIDGDWKVPVLKNRIPIINPSTQHIIGDIPAATKEDVDLAVAAAKAALSRNKGADWASASGSVRARYLRAIAAKITEKKPELAKLEAIDCGKPLDEAAWDIDDVAGCXEFYADLAEKLDAQQKAHVSLPMDTFKSYVLKEPIGVVALITPWNYPLLMATWKVAPALAAGCAAILKPSELASVTCLELAEICKEVGLPPGVLNILTGLGPEAGAPLAAHPDVDKIAFTGSSATGSKIMTAAAQLIKPVSLELGGKSPIIVFEDVDLDKAAEWTIFGCFWTNGQICSATSRLIVHESIATEFLNRIVKWVKNIKISDPLEEGCRLGPIVSEGQYEKILKFISNAKSEGATILTGGSRPEHLKKGFFVEPTVITDVTTSMQIWREEVFGPVLCVKTFSTEEEAIDLANDTVYGLGSAVISNDLERCERITKAFKAGIVWINCSQPCFTQAPWGGIKRSGFGRELGEWGLDNYLSVKQVTQYISDEPWGWYQSPSRL

SEQ ID NO: 2700 - protein, 384 aa, Mycobacterium tuberculosis CDC1551
MRAVVIDGAGSVRVNTQPDPALPGPDGVVVAVTAAGICGSDLHFYEGEYPFTEPVALGHEAVGTIVEAGPQVRTVGVGDLVMVSSVAGCGVCPGCETHDPVMCFSGPMIFGAGVLGGAQADLLAVPAADFQVLKIPEGITTEQALLLTDNLATGWAAAQRADISFGSAVAVIGLGAVGLCALRSAFIHGAATVFAVDRVKGRLQRAATWGATPIPSPAAETILAATRGRGADSVIDAVGTDASMSDALNAVRPGGTVSVVGVHDLQPFPLPALTCLLRSITLRMTMAPVQRTWPELIPLLQSGRLDVDGIFTTTLPLDEAAKGYATARARSGEELRFCLRPDSRDVLGAHETVDLYVHVRRCQSVADLQLEGAADGVDGPSMLN

SEQ ID NO: 2701 - protein, 210 aa, Triticum aestivum
TLPDWSTRTLTWTEAVKKLARVPPPEQAIYLHTTAVAPTVMASSGTSVAPFQGLKSTAGLPVSRRSNGASLGSVSNGGRIRCMQVWPIEGIKKCDTLSYLPPLSTEALLKQVDYLIRSKWVPCLEFSKVGFIFREHNASPGYYDGRNWTMWKLPMFGCTDAIQVINEVDEVKKEYPDAYVRIIGFDNMRQVQCVSFIAFKPPGCDESGKA

SEQ ID NO: 2702 - protein, 493 aa, Vicia faba
MSNSNNPPPPKPTWVLPYITENIRELYTLGRKLGQGQFGTTYLCTHNPTGKTYACKSIPKKKLLCKEDYDDVWREIQIMHHLSEHPNVVRIHGTYEDSVSVHLVMELCEGGELFDRIVNKGHYSEREAAKLIRTIVEVVENCHSLGVMHRDLKPENFLFDTVEEDAVLKTTDFGLSAFYKPGEIFSDVVGSPYYVAPEVLHKHYGPEADVWSAGVILYILLSGVPPFWAETEIGIFKQILQGRLDFQSEPWPGISDSAKDLIRKMLDRNPKTRFTAHQVLCHPWIVDDSIAPDKPLDSAVLSRLKQFSAMNKLKKMALRVIAERLSEEEIGGLKELFKMLDADSSGTITLDELKEGLKRVGSELMESEIKDLMDAADIDNNGTLDYGEFIAATVHLNKLEREENLLSAFSYFDKDGSGYITIDEIHVACKEFGLDDIHIDEMVKEIDQDNDGQIDYGEFAAMMRKGNGGMGRRTMTSRLNFRNALGIIGNESN

SEQ ID NO: 2703 - protein, 131 aa, Triticum aestivum
MSYYDRRGESSVLEAFTLSPLPYPVILILMMVTLLLGASWFFSYEDFMEEASEQFSWFLLGVPIALVLLIRWISSVDTFEGYFGFYPTESRWRGYPAAPSEGSSPWGVAMVVVLLLLLASFHSTFQDMWKP

SEQ ID NO: 2704 - protein, 494 aa, Novosphingobium aromaticivorans DSM 12444
MTSTSSSPVTETILNFIDGSYRKGSEGKSFPNVNPATGTAIGVVHEASQADVADAVAAAKAALTGPWGKMTTAERVKLIAAVATEIERRADDFLAAEVADTGKPRHVASHIDIPRGAANFRMFADVVSTMPGESFNTSTPDGGQALNYTVRKPKGVVAVVCPWNFPLLLMTWKVGPALACGNTVVVKPSEETPRTAALLGEVMNAVGMPKGVYNVVHGFGPGSAGEFLTSNPDVDAITFTGETGTGQAIMQKAAIGVRDISFELGGKNPAIVFADADLDKAVEGLSRSVFLNTGQVCLGTERVYVERPIFDAFVARMAAAAQGFKPGVTGDRAYLGPLISAEHREKVLGYYRRAVEDGATVVTGGGVPEISGAEAGGFFVEPTLWIDVAHGDTVMREEIFGPCCGIVPFDSEDEVIALANDTVYGLCASIWTENMSRGHRVAAAMDVGVCWVNSWFLRDLRTAFGGSGHSGIGREGGVHSLEFYTEITNICVKL

SEQ ID NO: 2705 - protein, 315 aa, Glycine max
TRLIDCVSFCHNKGVFHRDLKLENVLVDAKGNIKITDFNLSALPQHFREDGLLHTTCGSPNYVAPEILANKGYDGATSDIWSCGVILYVILTGYLPFDDRNLAVLYQKIFKGEVQIPRWLSPGSQNIIKRMLDANPKTRITMAMIKEDGWSKEGYTPANPEDEEESVYIDDEDFSIHDVSHEADQGCPRSPTLINAFQLISMSSSLDLSGLFEQEDVSERKIRFTSIHSPKDLVERLEDIVTEMGFRVQKKNGMLKVVQEIKTQKCLGNLSVAAEVFEISPSLYVVELSKSCGDASVYRQLCKKLSNDLGVHKKE

SEQ ID NO: 2706 - protein, 305 aa, Hordeum vulgare subsp. vulgare
MKILIILTILAMATTFATSEMQVNPSVQVQPTQQQPYPESQQPFISQSQQQFPQPQQPFPQQPQQPFPQSQQQCLQQPQHQFPQPTQQFPQRPLLPFTHPFLTFPDQLLPQPPHQSFPQPPQSYPQPPLQPFPQPPQQKYPEQPQQPFPWQQPTIQLYLQQQLNPCKEFLLQQCRPVSLLSYIWSKIVQQSSCRVMQQQCCLQLAQIPEQYKCTAIDSIVHAIFMQQGQRQGVQIVQQQPQPQQVGQCVLVQGQGVVQPQQLAQMEAIRTLVLQSVPSMCNFNVPPNCSTIKAPFVGVVTGVGGQ

SEQ ID NO: 2707 - protein, 276 aa, Bacillus subtilis subsp. subtilis str. 168
MPTSLKDTVKLHNGVEMPWFGLGVFKVENGNEATESVKAAIKNGYRSIDTAAIYKNEEGVGIGIKESGVAREELFITSKVWNEDQGYETTLAAFEKSLERLQLDYLDLYLIHWPGKDKYKDTWRALEKLYKDGKIRAIGVSNFQVHHLEELLKDAEIKPMVNQVEFHPRLTQKELRDYCKGQGIQLEAWSPLMQGQLLDNEVLTQIAEKHNKSVAQVILRWDLQHGVVTIPKSIKEHRIIENADIFDFELSQEDMDKIDALNKDERVGPNPDELLF

SEQ ID NO: 2708 - protein, 196 aa, Hyacinthus orientalis
PTPGSTRCSTRGCATTPTVVTKKILDTYKGFGDLATLVDVGGGVGGTINMIVKKHPHIKGTNFDLPHVISEAELIAGVEHVGGDMFESVPGGDAIFMKWILHDWSDEHCLKLLKNCWRALPDNGKVILMESILPVYPEPTAAAQGVIHVDMIMLAHNPGGKERTEQEFESLAKDAGFAGSKVVCGYANSWVIEFHK

SEQ ID NO: 2709 - protein, 155 aa, Triticum aestivum
  misc_feature (110)..(110): Xaa can be any naturally occurring amino acid
  misc_feature (113)..(113): Xaa can be any naturally occurring amino acid
  misc_feature (115)..(115): Xaa can be any naturally occurring amino acid
  misc_feature (122)..(122): Xaa can be any naturally occurring amino acid
  misc_feature (134)..(134): Xaa can be any naturally occurring amino acid
  misc_feature (139)..(140): Xaa can be any naturally occurring amino acid
SLDRQVLLKKLRDVLDTLKGRVAGRNRDDADEAISLVEALAVQLTQREGELIYEKAEVKKLASFLKQATEDARKVAEEERALALAEIEKSRAAIEKVEKALQEQDSASSXREXEXIEELMKXIREARRIKMLHXPCKVXXMQFELGTAVHLSKKH

SEQ ID NO: 2710 - protein, 483 aa, Vibrio vulnificus YJ016
MNLNYPELFQQRCYIDGQWVAESGQTQAVTNPSTGKVIGEIPVFGEQQAKECITAAQAAFELWKKTTADYRADVLRRWYELMMVNIDDLAAILTLEQGKPFTEAKGEITYAASFVQWYSEEARRAYGEIIPSHRENGKIVVTKEPIGVVAAITPWNFPAAMITRKAAPAFAAGCSMVLKPAQETPFTALALAKLAEDAGLPKGLFNVITGDSRSIGGVFTSDKRVRKVSFTGSTNVGKILMNKSASTIKKLALELGGNAPFIVFEDADIDAAVEGAMIAKFRNAGQTCVCANRLFVHHAVYDEFAEKLANRVKQLKVGDGFADGVAIGPLINSSSVAKVQEHVDDAVAKGAKVLCGGLLNDEQLFVAPYVLTDMSDDMLVAEEETFGPVAPLFRFKDEAEVLERANDTESGLAGYFYTRSLGRAWRVADALEVGMVGINEGLISTAAAPFGGIKESGLGREGSRHGMDEYMEMKYMLMGGLDS

SEQ ID NO: 2711 - protein, 1239 aa, Ustilago maydis 521
MSSSQRPVVQPIPPFKGAPLQATDVQNRRPTAAEAYVALANRKAGANVVSTRATGCENHRPSQHQPTSHHASQRQQPAPAADRRVQQSQPSERPKPASRLEREKKRHHNDPKNIGHWRLDKLIGQGASGRVRLAIHDQTGQKAAVKIIPRTLINASRMSLRDADVKANKMILGIEREIVIMKLIEHPNLLGLWDVYETSKDLFLIMEYVAGGELFDHLVAQGKLSPRDARGYFRQIIFGMDYCHRFNICHRDLKPENLLLDETKKIVKVADFGMAALQPTEKMLETSCGSPHYASPEIVSGKRYKGTASDIWSCGIILFALLCGRLPFDDPNIQQLLGKVRAGKFIMPEWLEPASKDLIWRMLEVDPEKRIKMADIMRHPWFTNNGTESSVNPVSTSLDSLQMEELTLDTIDIDILGNLKTLWFELSEQDIIKELLAPGPSWQKTFYTLLVAHRENHSADDEDDMNDDILDEQIVTASAVPAHALLSTTSAAKTLEKPRPRRTSDAAGATSAPASPRLESVEMDRRHSTPEKGSVYHTTSRRPDNVTPPKVASPHVRPANPSPRLRPSPLDSPASTLDSAFVSASKLKVASPTKPRALGSSHGADKSGYVLPQISLQTASPQRNERPAVDLQRRNTSPTKPNTVGVTAPLSARIALANMYDAPTLSHTATASCGSTSSTASSTVSVSAARNRANRGSGSEMMPPLALPGRASSRPVSPTKSTFGAQATLPPQTAPQPAPPRPSTSRAYTTQPTPCIQVPQVGDATMQRFFQEIADELASIRATGEKPDALQSKLDQLKNSMAWQQQQQQQQLQSQPMAVTASAPSARTRNSEMNQFEDAEDDVSEGESMRSVSQASSHQQTYTPSTPMTPLSPVELIAPLALTDKSGAGARSSVASSSASASARNSVRSARSGTEASSSGTTSRPTSVFSNISTGSTGLGRKRSLLGLRRADKHAQQQHATATEANTIRSIAYESTPTPTALASVFAAPASGRFVPNGGATTASSVRMQRLNPGLGLDIGASSAAGIISPPSTPQSPNTATLSPAPAASASAIASASAPGKKDSWFAGLFNWKPATFTLMSSENFSETLTECIRRLQSYGVRVAMDDSSDVHHTTLKCSINEYRESNGVVTAAKPLRFRVDVHILAVGSPATNSAYMGGGLGLSLHGGAVGTNVNATSIMTHGLPSPALSTYSRASTPGGVTFATSVLVVQEKGALSTFKLIHARLRREWMLDLGSAII

SEQ ID NO: 2712 - protein, 414 aa, Physcomitrella patens
MVLEATMVCMDNSEWMRNGDYSPTRFQAQADAINLICGAKTQSNPENTVGVLTMAGKGPRVLITPTNDLGKILQALHGLEVGGEMRMTSGVQVAQLALKHRQNKHQRQRIVLFAGSPVLADKAVLEGMGKKLKKNNVALDIVSFGEDDGEKVEKLEALLNAVNNGDNSHIVHIPGGERVLSDVLISSSIFTGDGEGGSGFAAAAAASAAAAAVGGGGGAYDFGVDPNLDPELALALRVSMEEERARQEAAMKRSAEDSTAKGQQAGESSSAPDVAMSDVGLVDTTDKSKDMMIDDDTALLQQAIAMSMAQAAQAAAAAGGGPATTDTSMEESGGDDQDLAYALQMSMQQAAAAASAAQGSADVNQVLGDQSFVSSVLSSLPGVDPNDPNVRDVLASLQTDEGKNDDQATKDKSK

SEQ ID NO: 2713 - protein, 463 aa, Zea mays
MARSGREADPGEEERKLVLGKYELGRLLGQGTFAKVYYARDLSAGAGTGHSCSVAIKVIDKARLRRTEGMVEQLRREISIMRMVRHPNVVGIREVLASRSRVFVVMEYARGGELFAKVARGRLPEDHARRYFQQLVAAVGFCHRRGVAHRDLKPENLLLDEAGRLKVTDFGLAALPEQLRHDGLLHTQCGTPAYVAPEVLRKRGYDGARADLWSCGVVLYVLLCGFLPFQHDNYVKLYQKIFKADYQVPPWVSGDARRLIARLLVVDPAKRASIAEIMCTPWFRKGFVPPVLSPPVTPKKQQLDEGAALFDNDDDDDNSNHSGATSPRSCNAFQLISSMSSGFDLSGLFESEQKTATVFTARAPAATVVEKLESVARALGFEVTRGKGWKVRMEAKAEGTNGRLAATAEVLEVAVDVAVVEFVHDAGDALDFNKFCAVDVRPGLTEIVWAWQGDSPAAAVGTA

SEQ ID NO: 2714 - protein, 621 aa, Zea mays
  misc_feature (172)..(172): Xaa can be any naturally occurring amino acid
MATMKLGSKPEIFVLQDLTWRCTIELESDVVVEVGEMSFYLHKFPLLSRSGVLQRMISEYQAPADGGGMCTLQLDDIPGGAKAFELAAKFCYDVKIELNALNVVCLRCAAEYLRMTDDYAEGNLITQAECFLVDVLANWKDSIKALETCEGVLPTAEDLHLVSRCITALASXADTPSCRASGPAAAGMDWWHEDGSFLSLPMFKRLIQAMEAKGMRDESIAGAIMFYAGRFLPGLKRNTSFSNALASYGADGSGGAGGGMSSRNITPRAASVSAPSEGDQRYFLEEIVALLPTKKGVASTKFLLGMLRTAMLLHASPLCRENLERRIGAQLEDASLDDLLVPNLGYHVETTLYDIDCVQRILDYFMSSTDGIGTGYTSPALAEEGGGSLGIPQGATPSSSLSPITMVAKLMDGFLAEVAPDTNLKLPKFQALAAVVPDYARPVDDGIYRAIDIYLKSHPWLSESEREQLCRLLNCQKLSLEACTHAAQNERLPLRVVVQVLFFEQLRLRTSIAGWFFVSDNAAGGDGARPHAGGAIVPKGTAAIAGCPQADADSDVEGDAPDGKETITDVKARVSDLEKECKSMKQEIRRLGKPRRSWSLLTRKCGFGAKVQQAQTAMSGK

SEQ ID NO: 2715 - protein, 120 aa, Zea mays
  misc_feature (20)..(20): Xaa can be any naturally occurring amino acid
NPLLPIYIERIHRDKHGSEXATYDTEGRFMPVNLENMFTKYALTKPDNLSLKELWQMTEGNRAAFDYLGWMASKLEWLLLYYVAKDKQGFLSKEAVRGCFDGSLFKNISKMYKDSDRKSK

SEQ ID NO: 2716 - protein, 89 aa, Zea mays
YEEHGEEFVDMLDGVFSFVLLDTRHGDRAGSSFFMAARDAIGVTPLYIGWGVDGSVWISSEMKALHDECEHFEIFPPGHLYSSNTGGFS

SEQ ID NO: 2717 - protein, 155 aa, Brassica napus
  misc_feature (152)..(152): Xaa can be any naturally occurring amino acid
MSDEEHHFESSDAGASKTYPQQAGNIRKGGYIVIKGRPCKVVEVSTSKTGKHGHAKCHFVAIDIFTSKKLEDIVPSSHNCDVPHVNRVDYQLIDISEDGFVSLLTDNGSTKDDLKLPTDEALLTQLKSGFEEGKDIVVSVMSAMGEEQMCAXKEV

SEQ ID NO: 2718 - protein, 386 aa, Vicia faba
GGELFDRIIQRGHYSEKAAAQLARVIIGIVEACHSLGVMHRDLKPENFLFVNQKEDSPLKTIDFGLSIFFKPGGIYSDVVGSPYYVAPEVLLKQYGCEVDVWSAGVIIYILLSGVPPFWDESEQGIFEQVLQGDLDFSSGPWPSISKSAKDLVRKMLNRDPGKRLTAHEALCHPWVCVDGVAPDKPLDSAVLSRLKQFSAMNKLKKMALRVIAENLSEEEISGLKELFKMIDTDNTGQITFEKLKAGLKMFGANLNEFEIFDLLNAADVDNSGTIDYREFIAATLHLNKVGREDNLVTAFSYFDKDGSGYITQDEIQKVCKEFGMEDVHLEEMIQEADQNNDGQIDYSEFVAMMLRGNADLGNSGSKCRSTSFNIGLRKIEAQSVC

SEQ ID NO: 2719 - protein, 471 aa, Methanopyrus kandleri AV19
MEYGCLIGGEWLEGDREIVVENPYDGSEVGRVLAPEVDVEALLKDAREGQRRWRERPTYEVREALAEAAHLLKKHEDELAELIALEGGKPIRDARYEVYRTREVLRLSAAEAERLYGETLPGDAQRGRTAELILTVREPVGVVLSITPYNFPLLLPTHKLGPALAARCSVVHKPATVTPLSSLRLAEILLDAGVEPLALQVVVGPGAELGEELARADFDALSFTGSRSVGEHLREISPIPRITLELGGNDPVIVDETADVEAAAEAAVRGACYHAGQVCIAVERAIVVEDVYEEFLEAAVEVAESLKVGDPLDEDTDVGPLIDDGAVEKVRRHVEDAVERGAEILTGGEPEGRLFPPTVLADVPEDALVAREETFGPVLPVIRAKDFEEAIRIANSTDYGLHAAVFTERLDRAVKATRKLEAGGVIVNESTIYRADYMPFGGVKASGVGREGVPQAVREFTEEKTVVIGRR

SEQ ID NO: 2720 - protein, 330 aa, Ustilago maydis 521
MSKLGDYAAVKKDILAVLKQPEYDDGSAGPVLVRLAWHASGTYCARTDTGGSNGAGMRYEAEGGDPANAGLQHARVFLEPIKEKHSWITYADLWTLAGVVAIEAMGGPSIQWKPGRTDFADDSRLPPRGRLPDGAQGADHLRFIFNRMGFNDQEIVALSGAHNLGRCHSDRSGFEGPWVNSPTRFSNQYYKLLLKLKWQPKKWDGPFQYVAKAPGADDDDEQLMMLPTDYALIQDEKMRPWVEKYAEDRDAFFNDFAKVFAKLIELGVYRDESGIARADKMKQFKGEYKSAPQKSPVPGAPGAGKDGEANPLARQNERAHGQAQHALAKL

SEQ ID NO: 2721 - protein, 413 aa, Wolbachia pipientis
MDKKALLELSNGSKIDLPVLSGTVGPDVLNIKDLYKKTGLFTYDPGFVSTASCSSTITFIDGDEGVLKYRGHNIADLAENNNFTAVIYLLLYGKLPSSEQHKKFLLKIQESSKVSEQVTNVIKAFPKTAHPMSILVACFANLSASYHEMHGKNVNGEDLDFGISAIAKVPAIVAMIYRHINNQEFINANNKLSYSENFLNMIFGSAVNNTLFVKALDKIFTLHADHEQNASTAAVRLVGSAGSNLFASLSAGVATLWGPAHGGANEAVINMLKEIEQSGDVDRFIEKAKDDKDPFKLMGFGHRVYKNYDPRALILKDACHEILSKLEQNNELLEIAKKLEEIALKDEYFITRKLYPNVDFYSGIIMNAIGIPSSMFTPIFALARTTGWVAQWYEMINDKETKICRPRQLYLGK

SEQ ID NO: 2722 - protein, 333 aa, Triticum aestivum
AYRQDQIVSVWLLQSTTFFSIWIKQHLQSIVHIFYSEGTDHSYSWYLQLRNLVWATSKHDVYMAQNNSVMHWSSLLQRGTEVLHVAGQVVPKQKAHGARTLSRVQISSMALKDNLMVAGGFRGELIFKYVDKPGPGVVFCTNVADNKNSVTNAVDVYESPSGATRATAANNDCTVKFLDAERCSLLSRFNFPWSVNEIATLKGHLDYSFSSAWHPGGNVLATGNQDKTCRLWDTRNLSAPFAVLGGRIGAVRGLRFSSDGRFLAAAEAADFVHVYDARAGYGAAQEIGLFGEIAGVAFSPDAGALFVGVADRAYGSLLEFGRRGRHAYLDSYL

SEQ ID NO: 2723 - protein, 498 aa, Bifidobacterium longum NCC2705
MSITLRNIKVWNTGEVIDLVVPGTAAAYFADTSVVADGADIDATGLTVAPGFEDPHVHFRDPGQTYKESMVSGCRASASGGYTNVLIMPNTLPALDGQTVSGPEATGAKEVLDAGFDNVIDFLQQYDTAHDVQLPVRYDLCVCASKDRAGHEASDVADWLKYVPGFEDDAKTPAMLTHPITAISDDGSAVTPEILDQVLENVKASDLYLIEHCEHHDTGAVNEGPVSRELGVPGIPEDTELKIVARDIEAARRTGVHVHFQHVSTAISFEAIRRAKAEGLPITCETAPHYLALSDEALLKYGTLAKMNPPLRSEADRKATIAAIADGTVDLLATDHAPHTLAEKELGFLEAPNGIIGLECAYGVCHKVLVDGGFISDERLIELMSVGPAELMGHVPTDVAALVEDYAEPAPTGDDPDGVIAGESDAQPQREGVNRLLDLSRVDDADNVDLVVLNAAEEWTVDPEQFHSKARNTPFGGWQVTGRPLATIIGSQLMFSRL

SEQ ID NO: 2724 - protein, 304 aa, Zea mays
MCSSRALWPVHCCRFKAEGSLSSLESGRGLGAFLYRPDPSFIRVVTVRPRSPRRSPKSQPRFLWSARASMASPSPAVSSLETEAPQATVTRERRLNPDLQEHLPKPYLARAMVAVDPDHPTGTEGRDPRGMSVLQQHVAFFDRNGDGVVYPWETFKGMRAIGCGFFTSLVISFLINLVMSYPTQPGWLPSLLLSVHVKNIHKAKHGSDSETYDTEGRFDPSKFDAIFSKYGRTHPDALTKDEMNSMLKANRNIYDFLGWIAAIGEWHLLYSVAKDKDGLLQRETVRGLFDASLFERLQDSKKSS

SEQ ID NO: 2725 - protein, 1209 aa, Magnetococcus sp. MC-1
MIVTCENCDARFDVDPQLLGSKGRKLKCSQCHHIFFQAPPEPKSAQPPASEQPGLEDESTAQDNDTESRDYAEFAFEESPLEEVDLDEIEKLTAQATLDMALEATRDKRQEPSFDEDTQVDEDAVIEPSLEEVDVDQMIQAATALPTEPEAASEAEEELEAEEELEAEEEPEAEEEPEAEEEPEAEEEPEAEEELEAEEEPEAEEEPEAEEESEAEEESEAEEEPEAEEESEVEEAPEVEEELELEEEAEEEPEAEEEAAPEAEEEAAPEVEEEPEVEEELELEEEAEEESEAEEESEAEEEAAPEAEEEAAPEAEEEAAPEAEEEAAPEAEEEAAPEVEEEPEVEEELELEEEAEEAPEAEEAPEIEEELEAEEELEAEEELEAEEELEAEEELEAEEELEAEEELEAEEELEAEEELEAEEELEAEEELEAEEELEAEEELEAEEELEAEEELEAEEEPEAEEAPEIEEELEAEEESEAEEVPEIEEELEAEEEPEVEEEPEVEEEPEVEEEPEVEEEPEVEEEPEVEEEPEVEEEPEVEEEPEVEEELELEEEAEEAPEVEEELELEEEAEEEAAPEVEEEPEAEEESEAEEEAAPEVEEELELEEEAEEEPEAEEELEAEEEPEAEEEPEAEEEPEAEEEPEAEEEPEAEEEPEAEEEPEAEEEPEAEEEPEAEDAFALDVDEQVPAADFADDGDFLSESALQEEQDKLLDVDDFNAATMVEPASLVEEDELDLAEVMENAERTADEAFNPSAMAEPDLLESELQLEDVEAEVVEEGGAELTLEGEEQAAFADLLTEEDDLSALADDALDLDDDDDVTVLADPPAMDLEGLVDAVESDHEVAFEDESVEAFAPLGDDLPNDLDDLTELVNEPGGELMLDDDLAALAPSPVMQERLVPADGMDELSALASDDQDEINLDLPESNDLSLGDLGEAESWSPDDELLEPEDETILAVPDSDETIEELDFPEPDIPQPKEEIIELDYGQQEEEPFDLSSSPDDEDEDLEWANTATPAKEKGGLGGLLGWGVAAMMLLAVIGAWFGKDYLSRGGATNRVDDFTLDGVEVKWRESDHGVLLIVEGSMTNQMNRRSARRPMMARVTLLDENNRNLNSVSVIPERIIPERAMNLNPNNMARIITKQGDIETRFNKMNPKQPVKFQAIFMDPPMEAVRYRIDFDATPEAEWEKQKKARSQAIKNREGTTTFMGNF

SEQ ID NO: 2726 - protein, 137 aa, Thermus thermophilus HB27
MMRFDPFKELEELQERLVRAFGAPQQGPRVYAPPVDVWEDEEGLHLLVYLPGVEPEKVEVVAEEGVLSVKAERPFERKENAAYHRLEGTYGTFVRSFNVPSTYDLSKVQARFRHGVLHLLVPRAEATKPKKIQVQVE

SEQ ID NO: 2727 - protein, 202 aa, Petunia x hybrida
MSNEYDYLFKLLLIGDSSVGKSCLLLRFADDSYVDSYISTIGVDFKIRTVELDGKTIKLQIWDTAGQERFRTITSSYYRGAHGIIIVYDVTEMESFNNVKQWLSEIDRYANESVCKLLVGNKCDLVENKVVDTQTGKALADELGIPFLETSAKDSINVEQAFLTMAGEIKKKMGNQPAGAKKTGSTVQIKGQPIEQKSNCCG

SEQ ID NO: 2728 - protein, 256 aa, Zea mays
  misc_feature (67)..(67): Xaa can be any naturally occurring amino acid
YILFIINLVFNSCSFTFISHCSSTDPCSLFFRVVEIVRHRNRVEVTVSSGQTFVADAAVVTVPLGVXGVENKIVLHFGQVFWPNVEFIGVVSSSTYGCSYFLNLHKATGHPVLVYMPAGRLARDIEKMSDEAAARFAFSQLKKILPNAAEPMNYLVSHWGSDENTLGSYTFDGVNKPRDLYEKLRIPVDNLFFAGEATSVKYTGTVHGAFSTGVMAAEECKMRVLERFRELDMLEMCHPAMGDESPVSVPLLISRL

SEQ ID NO: 2729 - protein, 293 aa, Triticum aestivum
  misc_feature (126)..(126): Xaa can be any naturally occurring amino acid
PLSPAGSRRLPAAGTPVTTLFQTTARASAELGAVNVTAAGPGLGVVRSPAPFPGSNATVLGSVTSVPYNLSVLAVDGLIAPSGVAEEFEGDERGAGITVFVPTDDAFASLPAGDRLQSLPADRKAXVLRFHVLHSYYPLGSLESIVNPLQPTLATEYASQAGRFTLNITRSNGSVAIDTGVVQATITRTVFDQNPVAVFAVSKVLLPKEMFTRADSAAVVAAALAPPPATSNSMPPEPPESARTPPTKLSSPPALRGVTRNDTAVSPPPSSSAKAAAIGWWCIALLYLLLPLV

SEQ ID NO: 2730 - protein, 486 aa, Chromobacterium violaceum ATCC 12472
MLNLQDPSLLRQQCYLGGEWLDADGGQHIAVHNPATGEKIGQVPKMGAAEAERAVAAAARAFPAWKAKSAKERAAILRRWFDLIIAHQQDLAIILTSEQGKPLAEAKGEIAYGASYIEWYAEEAKRVYGDIVPGPAGDRRVLVTKEPIGVTAAITPWNFPSAMITRKAAPALAAGCTMVVRPASQTPLSALALAELAERAGIPAGVFSVITGGSSEIGAVLTGSDTVKKFSFTGSTEVGRKLIAQCAGTVKKVSMELGGNAPFIVFDDADLDAAVEGALISKYRNAGQTCVCANRIYVQDGVYDAFAEKFAAAVATLKVGNGLEAGVSQGPLIDHNAVAKVEEHIADALAKGGRLIAGGKRHALGHTFFEPTLIADVTRDMKVAREETFGPLAPLFRFKTEEEAIRLANDTEFGLASYFYARDVGRIFRVAEGLEYGMVAVNSGLLSNEAAPFGGVKQSGLGREGSKYGIEDYLEIKYVLLGGLDR

SEQ ID NO: 2731 - protein, 124 aa, Nicotiana tabacum
IKLAHSKMAKVALLVVVCMAAVAVMLTPHADADISCGQVVASLSPCISYVRQGGAIPAPCCSGINSLNNQATSTPDRQTACNCIKSAAAGISGINFSLAGSLPSKCGVNLPYKISPSIDCSTVQ

SEQ ID NO: 2732 - protein, 122 aa, Spinacia oleracea
MIQPQTHLNVADNSGARELMCIRIIGASNRRYARIGDVIVAVIKEAIPNTPLERSEVIRAVVVRTCKELKRDNGMIIRYDDNAAVVIIDQEGNPKGTRIFGAIARELRQKFAKIVSLAPEVL

SEQ ID NO: 2733 - protein, 250 aa, Candida albicans SC5314
MPKPAGPELAPVATEFPVMLPLDPEPSPEPEPTPAPEPEPEPELVPLDEPEPPEGLVLLDEPRPPTKLPAPEVSCPAAAVSAPRAAAPAAVSAPRAAPAAPEVAVLAAPAAPEVAVFAAPTAPEVAVSAAPAAPEVAVLAAPAAPEVAVSAAPAAPEATVFAIPAAPEVAVSAAPAAPEATVLAAPTAPDVTAAAAPPAAEAASASISFFSILWKGEMLSAVAIGIIDVDKTNVETLISIYKCCCLNLIN

SEQ ID NO: 2734 - protein, 309 aa, Bacillus cereus ATCC 10987
LFFVYNIEMLYMNRGRDVMSKFTVASNGSLETTLRGVEVLSTPLLNKGVAFTQEEREELGLKGLLPPAVLTLEEQARRAYEQFCSQPDDLLKNVYLTALHDRNEVLFYRILTDHLREMLPIVYTPTVGVAIQRYSHEYRKPRGVYLSINDPSGIEEAFANIGATAENIDLVVVTDGEGILGIGDWGVGGINIAIGKLAVYTAAVGIDPSRVLPVILDVGTNREELLNNPFYIGNRHPRITGEAYDEFIDTFVRAVNKQFPKALLHWEDFSSRNARKILDKYRHDICTFNDDIQGTGAVSLAAVLSAVKA

SEQ ID NO: 2735 - protein, 327 aa, Bacteroides thetaiotaomicron VPI-5482
MDNKYIGILTSGGDASGMNAAIRAVTRAAIFNGFKVKGIYRGYEGLIAGEVKELTTEDVSSIIQRGGTILKTARSETFTTPEGRKKAYKVIQKENINALIIIGGDGSLTGARIFAEEYDVTCIGLPGTIDNDLYGTDFTIGYDTALNTIVECVDKIRDTATSHDRIFFVEVMGRDAGFLAQNSAIASGAEAAIIPEDRTDVDQLETFIGRGFRKTKNSSIVIVTESPENKNGGAIYYADRVKKEYPGYDVRVSILGHLQRGGAPSANDRILASRLGEAAIQALMEGQRNVMIGIRNNEIVYVPFVQAIKKDKPIDKSLIRVLNELSI

SEQ ID NO: 2736 - protein, 275 aa, Triticum aestivum
  misc_feature (44)..(44): Xaa can be any naturally occurring amino acid
MEAETAAKRARENEGAAAADGAGEQAGISAVIPGWFSEISPMWXYQEMITHLPLCSIKDPKKVLVIGGGDGGVLREVSRHSSVEQIDICEIDKMVVDVSKQFFPHLALGFEDPRVSLHIGDGVAFLKNAPEGTYDAVIVDSSDPVGPAQELFEKPFFESVSRALRPGGVVCTQAESIWLHMHIIEDIVTNCRQVFKGSVNYAWTTVPTYPSGVIGFMLCSTEGPSVDFQHPVFSIEEDEYSTKSKGPLKFYNSEFHTASFCLPSFARRVIEAKAN

SEQ ID NO: 2737 - protein, 174 aa, Triticum aestivum
  misc_feature (141)..(141): Xaa can be any naturally occurring amino acid
  misc_feature (145)..(145): Xaa can be any naturally occurring amino acid
  misc_feature (159)..(159): Xaa can be any naturally occurring amino acid
MAPAVMASSATTVAPFQGLKSTAGLPVSCRSGSTGLSSVSNGGRIRCMQVWPIEGIKKFETLSYLPPLSTEALLKQVDYLIRSKWVPCLEFSKVGFVFREHNSSPGYYDGRYWDNVGKLPMFGCTDAHSAQRGGGVKKEYXDAYXRVIGFDNIASECVXLNAFRHKAARNPGKA

SEQ ID NO: 2738 - protein, 335 aa, Xylella fastidiosa 9a5c
MTQTITVIRGDGIGPEIMDATLLVLNTLQANLNYEFADAGLNALEKHGDLLPEATLNSISKNKVALKSPLTTPVGEGFSSINVALRRKFDLYANVRPAKSFPNTKSRFSDNVDLITVRENTEGAYLSEGQTISPDGEVATSSARVTRKGSERIVRYAFDLARTTGRKKVTAVHKANIIKSTSGLFLKTARDVASQYPEIDFQEMIVDNACMQLVMRPEQFDIIVTTNLFGDILSDLCAGLVGGLGLAPGANIGNEQAIFEAVHGSAPDIAGQGKANPCALLLGAVQMLDHIGQPQNAERLRNAIVATLNAKDSLTPDLGGNGNTMEFAKAIASRL

SEQ ID NO: 2739 - protein, 172 aa, Triticum aestivum
  misc_feature (111)..(111): Xaa can be any naturally occurring amino acid
MGAAESSSKLASSVHGFSVKDARGNDVELSRYKGKVLLIVNVASQCGLTNSNYTELGSLHKKYGEKGFEILAFPCNQFVGQEPGTNEQIAEFACTRFKADFPVFGKVDVNXGGKAAPLYKFLKSERGGLFGERIKWNFTKFLVDKDGHVVSRYAPTSSPLSIENDIQKLLEA

SEQ ID NO: 2740 - protein, 150 aa, Triticum aestivum
  misc_feature (42)..(44): Xaa can be any naturally occurring amino acid
  misc_feature (79)..(79): Xaa can be any naturally occurring amino acid
  misc_feature (89)..(89): Xaa can be any naturally occurring amino acid
  misc_feature (110)..(110): Xaa can be any naturally occurring amino acid
  misc_feature (119)..(119): Xaa can be any naturally occurring amino acid
  misc_feature (121)..(121): Xaa can be any naturally occurring amino acid
  misc_feature (128)..(128): Xaa can be any naturally occurring amino acid
  misc_feature (132)..(132): Xaa can be any naturally occurring amino acid
MAHAAAAAAVPLRRPLLLFLRPARLLSFVAPRSSSVRAYRAXXXAPSPPSPPNDEGPGTNGERRAQAATKKKREGRRAXVEVGHGSRQXSPPQLKRIVRAASLERQVVDXLMLGEEFGXDXAKGRRRXFNYXGNRHVRRFPRKVTGVPLD

SEQ ID NO: 2741 - protein, 415 aa, Spinacia oleracea
MASFTTTTAAAASRLLPSSSSSISRLSLSSSSSSSSSLKCLRSSPLVSHLFLRQRGGSAYVTKTRFSTKCYASDPAQLKNAREDIKELLQSKFCHPIMVRLGWHDAGTYNKDIKEWPQRGGANGSLSFDVELKHGANAGLVNALKLLQPIKDKYSGVTYADLFQLASATAIEEAGGPTIPMKYGRVDATGPEQCPEEGRLPDAGPPSPAQHLRDVFYRMGLDDKDIVALSGAHTLGRSRPERSGWGKPETKYTKDGPGAPGGQSWTAEWLKFDNSYFKDIKEKRDADLLVLPTDAALFEDPSFKVYAEKYAADQEAFFKDYAEAHAKLSNQGAKFDPAEGITLNGTPAGAAPEKFVAAKYSSNKRSELSDSMKEKIRAEYEGFGGSPNKPLPTNYFLNIMIVIGVLAVLSYLAGN

SEQ ID NO: 2742 - protein, 258 aa, Zea mays
MGEEAVDDYELHMVCYGGGGGGSEDERVMEWESGLPGADELTPLSQPLVPAGLAAAFRIPPEAGRTLLDVHRASAATVSRLRRAPPPSSSGSGGSSSFAPFHPAARGDEGADSSAAGGGAAATTNGNNNMSSSSKRPRLVWTPQLHKRFVDVVAHLGMKNAVPKTIMQLMNVEGLTRENVASHLQKYRLYVKRMQGLSDEGPSPSDHIFASTPVPQSLVHEVPMYGTMASGGQAYHNHNGMGGGGYQYQYHHYHHAHK

SEQ ID NO: 2743 - protein, 136 aa, Thermococcus kodakaraensis
MGDKTKVQVSKLKPGRYIIIDGEPCRIVNVTVSSPGKHGSAKARIEAVGIFDGKVRSIVKPTSAEVDVPIIDKRVGQIIAITPDTVQLMDMETYETFDVPIEGGVDDEVKGQLTEGITVEYWETLGRIQIKKIRGE

SEQ ID NO: 2744 - protein, 137 aa, Triticum aestivum
PHPWLNVLVPRSRIADFDSAVFKGILQGTDIAGPLVVYPLNKSKWDDGMSAVTPAEEVFYAVSLLFSSVANDLKRLEAQNQKILRFCDLAGIGYKEYLAHYTAHGDWVRHFGGKWQRFVEMKDKYDPKRLLSPGQDI

SEQ ID NO: 2745 - protein, 442 aa, Glycine max
  misc_feature (80)..(80): Xaa can be any naturally occurring amino acid
MKVAKGRILVGKYELGKTIGEGSFAKVKFARNVQNGNYVAIKILDRKHVLRLNMMEQLMKEISTMKLINHPNVVRILEDXVLASKTKIYIVLEFVDGGELFDKIAANGRLKEDEARNYFQQLINAGDYCHSRGVYHRDLQPENLLLDSNAILKVTDFGLSTYAQQEDELLRTACGTPNYVAPEVLNDRGYVGSTSDIWSCGVILFVLMAGYLPFDEPNHATLYQKIGRAQFTCPSWFSPEAKKLLKRILDPNPLTRIKIPELLEDEWFKKGYKPTTFVEEEDVNVDDVAAAFNDSKENLVTERKEKPVSMNAFELISRSQSFNLENLFEKQTQGIVKRETHFTSQRPANEIMSKIEEAAKPLGFNVHKRNYKMKLQGDKSGRKGHLSVATEVFEVAPSLHMVELRKTGGDTLEFHKFYKSFSSSSGLQDIVWHSEGKKNMKN

SEQ ID NO: 2746 - protein, 534 aa, Glycine max
MGLFSSTKLLPIVVLFSLLFTSYATNSAENNFVHCLVNHSEPSHPISAAIFTQNSSSFSSVLQAYIRNLRFNTSTTRKPFLIVTPFHVSHVQASIVCAKKHNLLMKIRSGGHDYEGVSYVASQPFFILDMFNLRSIEIDMESETAWVEAGAMLGEVYYRIAEKSKTHGFPAGVCPTVGVGGHISGGGYGNLMRKYGTSVDNVVDAQIVDARGRLLNRRTMGEDLFWAVRGGGGGSFGVVLAYKIKLVRVPEKVTVFQVGRTLEQNATDIVYNWQHVAPSIDNDLFIRLILEVVNGTQTATKTVRATFIALFLGDSKSLVSLMDEKFPQLGLKQFDCIETTWLRSVLFWDNIDIATPVEILLERQPQSFKYLKRKSDYVKKPISKEGWEGIWNKMIELEKAIMYFNPYGGRMAEIPSTASPFPHRAGNLWKIQYQANWNKPGKEVADHYINLPRKLPKFMTPFVSKNPREAFYNYKDLDLGINPNGKNSYAEGRVYGVEYFKDNFDRLVQIKTKVDPHNFFRNEQSIPTLSYRKG

SEQ ID NO: 2747 - protein, 302 aa, Pinus pinaster
MERFANDVDEHSLKETELRLGLPGVCESDTGPGQTRNGKRGFSEVMDSTKASSFNDNKWIFPSVKCQPATSAITETAEACKGSQPGLFSATPSQKIMMQGGCGAPQSWAGDNGLSRSTAPKDELHPKTPRDGPTEKTNGASQSQAATDPAMAPAPKAQVVGWPPIRSFRKNTLAANSKPNDEGSSSNALYVKVSMDGAPYLRKVDLKMYSTYHELSSALEKMFSCFNMGQCGAPGLSESKLIDLLNGSEYVPTYEDKDGDWMLVGDVPWEMFVDSCKRLRITKASEAIGLAPRAMEKSRSKN

SEQ ID NO: 2748 - protein, 334 aa, Triticum aestivum
  misc_feature (237)..(237): Xaa can be any naturally occurring amino acid
MGSTAADMAASADEEACMYALQLVSSSILPMTLKNAIELGLLETLVAAGGKLLTPAEVAAKLPSTANPAAADMVDRMLRLLASYNVVSCTMEEGKDGRLSRRYSAAPVCKFLTPNEDGVSMAALALMNQDKVLMESWDYLKDAGLDGGVVSTMAYGMSAFEYHGTDPRFNRVFNEGMKNHSIIITKKLLESYKGFKGLGTLVDVGGGIGATVGAITAHYPTVKGINFDLPHVISEAXILHDWSDEHCATLLKNCYDALPAHGKVVLVECILPVNPEATPEAQGGFHLDMIMLAHNPGGRERYEREFEALAKGAGFGAIKTTYIYANIWVIEFTK

SEQ ID NO: 2749 - protein, 323 aa, Fragaria x ananassa
MTATQIPEVVLESSNGRRTMPVLGFGTASNNLQPEVLIEAVLEAIKLGYRHFDTASIYGSEQTLGVAIAQALKLGLVASRDELFITSKLWPNDGHPNLVIPALKKSLQNLELEYLDLYLIHWPISAKPGKLSHALEEKDQMPMDFKGVWADMEEAQRLGLTKSIGISNFSTKKTQNLLSFATIPPSVNQVEMSPFWQQKKLRDFCKASGIVVTAFSPLGAIGTSWGTNHVLESKVLNEIAEAHGKTVAQVCIRWVYQVGATLAVKSYNKERLKQNVQVFDWELTEEDLEKINQIPQRKMMPREELVTATGPYKSLDDLWDGEY

SEQ ID NO: 2750 - protein, 329 aa, Acinetobacter sp. ADP1
MTQSALDQLKKLTTVVADSSDIEAIRKFLPLDATTNPSLITAAASIPENKALIEDAFNQAHQEGYENDLLIERTIDILTVKFGVEILKLIQGRVSTEVDASLSYNTEATIEKARELSKLYKEYGIDQSRILIKIASTWQGIQAAKVLEAEGIPCNLTLLFGLHQAQACADAKVTLISPFVGRILDWYKKAENVDHYPIEKDPGVVSVKKIFTYYKQQGTPTQVMGASFRSIDQVLGLAGSDLLTISPALLSELEQDHRTVEATLTIEEAKQAEIIHRAAQTEQSFKDELEHDLMAFQLLQSGIDGFIKAREQLSTLLRQSYGIDAEIQP

SEQ ID NO: 2751 - protein, 496 aa, Gibberella zeae PH-1
MVLSQKQGRRETLTVVDNRTNQSYEIPITHNSIPATEFKKIKAEAGNDRPEDETNQGLRVYDPAYMNTAVVQSKITYINGLDGVLRYRGYPIEQLVEKSDFLESAYLLIYGELPTKSEYDLWHGEVMHHTYIHSDIENMFKSFRYDSHPMSMLTAAFATLGAFAPEANPSLAGQKLYTNAASGNLEALQMLDKQILRILGKAPTLAAASYRMRQGRPFNRPAQDLGYTGNFLYLLDHLSETDYKPHPVLARALDKLFIIHADHEVNCSTATVMQVGSSLVDPYSVVAAGCAALYGPSHGGASESAIRMLIEIGSPENVPAFMQAVEKRERVLVGFGHRVYKNVDPRSTAIRKLAEEVFEVTGRNKLLDTALTLADYARKSEFMRSRNLYPNVDFYSGLIYQAMGFPLDFYPVLFAVPRCVGWLAHWRQMMLNSAGVKIWRPRQLYIGEGEREYVEAKDRKAKADATVFDAPVKVGHGGNSQRTLLATSSKELKTIQ

SEQ ID NO: 2752 - protein, 105 aa, Zea mays
RGDNRCVNESIAMASRLVAAAASSSSLSSASPLARLISRRGLAGAADGHGSAKVPLWKDPLSPSKWKEEHFVLASLSMWGVIFYGGYKLFSGKKEAKTEAASPQA

SEQ ID NO: 2753 - protein, 287 aa, Vitis vinifera
MSPTCLLVLLLGMVVLTSTPSLAHYPKPPPFQKPPPEHKPPGEKPSPEHKPPTKPPKGEKPLPEHKPLTPIGKPPKGEKPPPEHKPPTPIDKPPKGKKPLPEHKPPTPIGKPPKGEKPPPEHKPPTPIGKPSKGEKPLPEHKPPTPIGKLPKGEKPPPEHKPPTPISKPPKGEKPLPEHKPPTPIGKPPKGEKPLPEHKPPTPIGKPPKGEKPLPEHKPPTPIGKPPKGEKPPSPFGKPPTGEKPPHYGHTPGHPPAHSYKPPQKIKPPPTPPHKPPHKPPSPTYPN

SEQ ID NO: 2754 - protein, 274 aa, Enterococcus faecalis V583
MTLDKTKKLANGNEMPRLGLGVWRVEDGSEATNSVKWALEVGYRLIDTAAVYKNEVGVGEGIRQSGIPREEIFVTTKLWNEDQGYENAIKAFDKSLEKLGLDYVDLYLIHWPVAGKYKESWKALEEIYASGRAKAIGVSNFHQHHLEDLLTEANVVPMVDQIELHPTLTQEPLRKYLAENKIAVEAWSPLGQGNLLSEPVLVKIGEKYGKSAAQVIIRWHLQNDIIVIPKSVHEKRIQENFAVFDFELTPEEITAINQLNKDHRFGADPDNFDF

SEQ ID NO: 2755 - protein, 250 aa, Zea mays
MAKNYPTVSAEYSEAVEKARRKLRALIAEKSCAPLMLRLAWHSAGTFDVSSRTGGPFGTMKHQSELAHGANAGLDIAVRLLEPIKEEFPILSYADFYQLAGVVAVEVTGGPEIPFHPGREDKPQPPPEGRLPDATKGSDHLRQVFGKQMGLSDQDIVALSGGHTLGRCHKERSGFEGAWTTNPLVFDNSYFKELLSGDKEGLLQLPSDKALLSDPVFRPLVEKYAVDEKAFFDDYKEAHLKLSELGFADA

SEQ ID NO: 2756 - protein, 180 aa, Helianthus annuus
MATQTVFDFPDDVLQQPPMPADNAFSDKDVKGQDVELSKYKGKVLLIVNVASQCGFTNSNYPELTTLYQKYKDQGFEILAFPCNQFGGQEPGSNEEIQVFACTRFKAEYPVFSKVNVNGKEADPLYKFLKSSKGGFLGDSIKWNFTKFLVDREGKVVDRYAPTTSPLSIEKDIKKLLNVA

SEQ ID NO: 2757 - protein, 410 aa, Glycine max
  misc_feature (32)..(32): Xaa can be any naturally occurring amino acid
  misc_feature (81)..(81): Xaa can be any naturally occurring amino acid
  misc_feature (87)..(87): Xaa can be any naturally occurring amino acid
  misc_feature (105)..(105): Xaa can be any naturally occurring amino acid
EELLPIVYTPVVGEACQKYGSIFKRPQGLFIXLKEKGKVLEVLKNWPERSIQVIVVTDGERILGLGDLGCHGMGIPVGKLXLYTALXGGVRPSACLPITIDVGTXNEKLLNDEFYIGLRQKRATGQEYSELLHEFMTAVKQNYGEKVLVQFEDFANHNAFELLAKYGTTHLVFNDDIQGTASVVLAGVVAALKLIGGTLPEHTFLFLGAGEAGTGIAELIALEMSKQVIKPTVLIGSSGVGRTFTKEVVEAMTSNNDKPLILALSNPTSQSECTAEEAYQWSEGRAIFASGSPFDPVEYKGKVYASGQANNAYIFPGFGLGLVISGAIRVHDDMLLAASESLAKQVSEENYKNGLIYPPFSNIRRISANIAANVAAKAYELGLATRLPRPQNLVKCAESCMYTPVYRNYR

SEQ ID NO: 2758 - protein, 500 aa, Oryza sativa (japonica cultivar-group)
MDRARLAVLSAHLASPAAACGEADAAGPLERSAASAGARGGALAVVDGRTGKRYEVKVSDEGTVRATDFKKITTGKDDKGLKIYDPGYLNTAPVRSSICYIDGDEGILRYRGYPIEELAESSSFVEVAYLLMYGSLPTQSQLAGWEFAISQHSAVPQGLLDIIQAMPHDAHPMGALASAMSTLSVFHPDANPALRGQDLYKSKQVRDKQIVRVLGKAPTIAAAAYLRLAGRPPILPTNSLSYSENFLYMLDSLGDKEYKPNPRLARVLDILFILHAEHEMNCSTAAARHLASSGVDVFTALSGAVGALYGPLHGGANEAVLKMLNEIGSVENIPDFIEGVKNRKRKMSGFGHRVYKNYDPRAKVIRKLAEEVFSIVGRDPLIEVAVALEKAALSDDYFVKRKLYPNVDFYSGLIYRAMGFPTEFFPVLFAIPRMAGWLAHWKESLDDPDTKIMRPQQVYTGVWLRHYTPVRERVPASQGEQLGQIATSNATRRRRAGSAL

SEQ ID NO: 2759 - protein, 482 aa, Glycine max
MLPQKQGEETMMSNLNETTIERGEEREEENVGGGSHSSLKSILWHGGSAYDAWFSCASNQVAQVLLTLPYSFSQLGMLSGIIFQVFYGIMGSWTAYLISILYIEYRTRKEKESVSFKNHVIQWFEVLEGLLGPYWKAIGLAFNCTFLLFGSVIQLIACASNIYLINDHLDKRTWTYIFGACCATTVFVPSFHNYRIWSFLGLGMTTYTAWYMTIAAIAHGQVENVTHTGPKKLVLYFTGATNILYTFGGHAVTVEIMHAMWKPQKFKYIYLYATLYVFTLTLPSAVAVYWAFGDKLLDHSNAFSLLPRSGWRDAGVILMLIHQFITFGFACTPLYFVWEKVIGMHDTKSICLRALARLPVVIPIWFLAIIFPFFGPINSAVGALLVSFTVYVIPACAHMLTYKSASARQNAAEKLPFFIPNWTAMYVVNAFVVVWVLVVGFGFGGWASMTNFIKQVDTFGLFAKCYQCPPKVPASNNTMLHH

SEQ ID NO: 2760 - protein, 608 aa, Glycine max
  misc_feature (236)..(236): Xaa can be any naturally occurring amino acid
  misc_feature (251)..(251): Xaa can be any naturally occurring amino acid
  misc_feature (291)..(291): Xaa can be any naturally occurring amino acid
ILNYSIWVANRTIVWFRRDLRIEDNPALGVVNFKFLYTRSNISSPNEEGKFYPGRVSRWWLKQSLAHLDQSLKSLGSRLVLIKTHSTVRALVDFVQAIQATKVVFNHLYDPVSLVRDHNIKEKLVEQGISVQSYNGDLLYEPWEVNSESGRAFTTFNAFWKKCLHMQMDIVSVVPPWQLIPAEGKIEECSLEELGLENESEKPSNALLGRAWSPGWRNADKALREFVELHLLHYSXWTTEGNCAGEQSCKXYLHFVGLSEYSRYLCFNFRFTHEKALLGHLRFFPWIYSLXNPDPDIFKTWRQGRTGFPLVDAGMRELWATGWIHNRIRVIVSSFAVKMLLLPWKWGMKYFWDTLLDADLESDILGWQYISGGLPDGHELERLDNPEIQGAKFDPEGEYVRQWLPELARMPTEWIHHPWDAPLTVLRAAGVELGQNYPKPIIDIDLARERLTEAIFKMWESEAAAKAAGSEPRDEVVVDNSHTLENLDTQKVVVLGKAPCATISANDQKVPALQDSKNEPPTRKRPKHMIEEGQNQDHSQNHNKDTGLSSIDQDICSTADSSSCKKQCASTSSYSFSVPQQCSSSSNLKWPWQEKIDMEQSSSKDGAM

SEQ ID NO: 2761 - protein, 400 aa, Arxula adeninivorans
  misc_feature (380)..(380): Xaa can be any naturally occurring amino acid
MADFIRTQIFGTCFEITSRYVDLNPVGMGAFGLVCSARDQLTNQNVAIKKIMKPFSTPVLAKRTYRELKLLKHLRHENLITLSDIFISPLEDIYFVTELLGTDLHRLLTSRPLEHQFIQYFLYQILRGLKYVHSAGVVHRDLKPSNILINENCDLKICDFGLARIQDPQMTGYVSTRYYRAPEIMLTWQKYDVEVDIWSAGCIFAEMLRGKPLFPGKDHVHQFSIITELLGNPPDDVIETIGSENTLNFVKSLPKRERIPLSQKFPNADPDAVDLLEKMLVFDPRKRINAADALAHPYLAPYHEPSDEPVASEKFDWSFNDADLPVDTWKVMMYSEILDFHNVDSSAVEQQQQQPQPPQPQLQQQQQPPQQPQQPQQPQXAQQPVQPVQGDYVPQVAPRS

SEQ ID NO: 2762 - protein, 506 aa, Shewanella oneidensis MR-1
MIYAQPGTAGALVNFKEKYANFIGGKWVAPVNGKYFDNRSPVNGQNFCKIPRSDAQDIELALDAAHAAKDAWGKTSVTERSNILLRIADRVEQNLEYLAVAETWENGKAVRETLNADLPLFVDHFRYFAGCIRAQEGSAADIDGNTVSYHFPEPLGVVGQIIPWNFPLLMAAWKIAPALAAGNCVVLKPAEQTPVSILVLLELIEDLLPPGVLNVVNGFGAEAGQALATSKRIAKLAFTGSTEVGFHILKCAAESLIPSTVELGGKSPNLYFADVMDQEDEYLDKAVEGMLLAFFNQGEVCTCPSRVLIQESIYDRFIEKVLARAQTIKQGNPLDTATQVGAQASQEQFDKILSYLAIGKDEGAQVLLGGSLCQLEGEQSKGYYISPTIMKGHNKMRIFQEEIFGPVISVTTFKDEAEALAIANDTEYGLGAGVWTRDMNRAQRMGRGIQAGRVWINCYHAYPAHAAFGGYKKSGIGRETHKMMLNHYQNTKNLLVSYDINPLGFF

SEQ ID NO: 2763 - protein, 458 aa, Thermus sp.
  misc_feature (149)..(149): Xaa can be any naturally occurring amino acid
PLLIKNGEIITADSRYKADIYAEGETITRIGQNLEAPPGTEVIDATGKYVFPGFIDPHVHIYLPFMATFAKDTHETGSKAALMGGTTTYIEMCCPSRNDDALEGYQLWKSKAEGNSYCDYTFHMAVSKFDEKTEGQLREIVADGISSFXIFLSYKNFFGVDDGEMYQTLRLAKELGVIVTAHCENAELVGRLQQKLLSEGKTGPEWHEPSRPEAVEAEGTARFATFLETTGATGYVVHLSCKPALDAAMAAKARGVPIYIESVIPHFLLDKTYAERGGVEAMKYIMSPPLRDKRNQKVLWDALAQGFIDTVGTDHCPFDTEQKLLGKEAFTAIPNGIPAIEDRVNLLYTYGVSRGRLDIHRFVDAASTKAAKLFGLFPRKGTIAVGSDADLVVYDPQYRGTISVKTQHVNNDYNGFEGFEIDGRPSVVTVRGKVAVRDGQFVGEKGWGKLLRREPMYF

SEQ ID NO: 2764 - protein, 353 aa, Candida sp. HA167
MSTPENLSFVLQKPFDVKFEDRPIPKLSDPYSVKIQVKKTGICGSDVHYFTHGAIGDFVVKAPMVLGHESSGVVLEVGSEVKSLKVGDRVAMEPGVPSRHSDEYKSGRYNLCPHMAFAATPPYDGTLCKYYILPEDFCVKLPEHVSLEEGALVEPLSVAVHSSKLGNIKPGSHVAIYGAGPVGLLVAAVASAFGAESVTIIDLVESRLNLAKELGATATVQVDFKDTPKESAAKVVAANNGIAPDVVIDASGAEASINSAINAIRPGGTYVQVGMGKPDVSFPIATLIGKELTVKGSFRYGYGDYPLAVSLLASGKVNVKKLITHEVKFEDAAEAFQLVRDGKAIKCIINGPE

SEQ ID NO: 2765 - protein, 451 aa, Alnus glutinosa
MTSLQYFSLNRPVFPATHLHRPGIRHLQVSACANVEVQAPSSVKKQGVSKEVMEAAGRVLVGTYARVPVVLSRGKGCKLYDPEGREYLDLSAGIAVNVLGHADSDWLRAVTEQAATLTHVSNVFYSIPQVELAKRLVASSFADRVFFSNSGTEANEAAIKFARKFQRFTRPDEKQPATEFVSFSNSFHGRTMGSLALTSKENYRSPFEPVMPGVTFLEYGNIEAATQLIQRRKIAAVFVEPIQGEGGVYSATKEFLYALRKACDDSGTLLVFDEVQCGLGRTGYLWAHEIYDVFPDIMTLAKPLAGGLPIGAVLVTERVASAITYGDHGTTFAGGPLVCKAALTVLDKILRPGFLASVSKKGHYFKEMLINKLGGNSHVREVRGVGLIVGIELDVSASPLVNACLNSGLLVLTAGKGNVVRIVPPLIITEQELEKAAEILLQCLPALDRHG

SEQ ID NO: 2766 - protein, 262 aa, Brassica napus
  misc_feature (106)..(106): Xaa can be any naturally occurring amino acid
RPTRPELTRTIVGVVEACHSLGVMHRDLKPENFLFVSKHEDSLLKTIDFGLSMFFKPDDVFTDVVGSPYYVAPEVLRKQHGPEADVWSAGVIVYILLSGVPPFWAXVLHGDLDFSSDPWPSISESAKDLVRKMLVRDPKKRLTAHQVLCHPWVQVDGVAPDKPLDSAVLSRMKQFSAMNKFKKMALRVIAESLSEEEIAGLKEMFNMIDADQSGQITFEELKAGLKRVGANLKESEILDLMQAADVDNSGTIDYQEFIARTL

SEQ ID NO: 2767 - protein, 459 aa, Magnetospirillum magnetotacticum MS-1
MPTRASNRTITEKDVDSVLHPYTNLKRHPEVGPLVITRGKGVRVYDEAGKDYIEGLAGLWCTSLGWGEERLVEAAARQMRTLPFYHLFSHKTHDVGVELCARLLEMAPVPMSKVFLAGSGSEANDTAIKLIHYRSNALGLPHKKKIIAREKAYHGVTVATASLTGLVNNQRSFDLPIPGVLRAGCPHHYRFARQGESEEDFSSRLAAELEALILAEGPDTVAAFFAEPVMGAGGVIVPPAGYFPKIQAVLDRYDILLVVDEVICGFGRTGKMFGTETFGIRPDMMTLAKGLSSGYAPISALMVNERVYGPVAEESGRIGVFGHGYTYGGHPVSAAVALETLNIYAERDILAHIAKVGPVLQEGLGSFRDHPLVGEARGIGLIGALELVADKTSRAPFPPERTMGAKVVARAQDKGVILRAMGDAIAFAPPLIITEAEIGDMLRRFKAALDEAHGALGLG

SEQ ID NO: 2768 - protein, 137 aa, Hordeum vulgare
PHPWLNVLVPRSGIADFDRAVFRGILQGTDIAGPLVVYPLNKSKWDDGMSAVTPAEEVFYAVSMLFSSVANDLRRLEAQNQKILRFCDLAGIGYKEYLAHYTAHGDWVRHFGGKWKHFVEMKDKYDPKKLLSPGQDI

SEQ ID NO: 2769 - protein, 305 aa, Zea mays
  misc_feature (144)..(144): Xaa can be any naturally occurring amino acid
  misc_feature (177)..(182): Xaa can be any naturally occurring amino acid
  misc_feature (185)..(185): Xaa can be any naturally occurring amino acid
MAGLSLEHPWAFAFGLLGNVISFMTFLAPIPTFYRIYKSKSTEGFQSVPYVVALFSAMLWIFYALIKSNETFLITINAAGCVIETIYIVMYFVYAPKKAKLFTAKIMAPPQWRRLWGHPSCSPFSLFKGSKRVVLLGWICVGFXSVSVFVAPLSIMRRVIQTKSVEYMPFSLSLSLXXXXXXVWXLYGLLIKDKYVALPNIWGFTFGVVQMVLYVLYMNKTPVAATAEGKDAGKLSSAADEHVLVNIAKLSPALPERSSGVHPVTQMAGVPVRSCAAEATAPAMLPNRDVVDVFVSRHSPAVHVA

SEQ ID NO: 2770 - protein, 495 aa, Rhizobium etli
MAISSTLLGRLKDQTLVREQMLVGGKWSSEGVNGTRINVLNPSTMDVLASLPSAGLAEVRASIDAAKAAQKKWAKVSAKERSLIMRKFYEEVVANAEDLAVILTSEMGKPLAEARGEIAYGASYIEWFGEEAKRVYGDTIPGHQADKRLLVIKQPVGVVAAIAPWNFPSAMVCRKIAPALASGCAIVFKPAAETPLSALALAILAERAGIPDGLFSVLPTDNARMFGEEVCSNPVVKKLTFTGSTEVGRILMAQGAQKIMKLSLELGGNAPFIVFDDADLDQAVEGAMLSKFRNAGQTCVCANRIYVQSGIHDRFVEKLAMRVSALQVLDGFESGATIGPLINDEAVAKLYGHIDDAVTKGATVVVGGDRDARGGTFVQPTLLSGATKDMKVAREETFAPLAPVFKFDTVEEVIELANDTEFGLAAYFFANDLRNVWKVTEALEYGMVGVNTGLISTELAPFGGVKQSGFGREGSKYGMDDFLSMKYVCMGGIGA

SEQ ID NO: 2771 - protein, 213 aa, Glycine max
MGCFHSKSARQFPAQENTVNLAAETAFTVSEVEALFELFRSISSSVVDDGLISKEEFQLAIFKNKKKDNLFANRIFDLFDVKKKGVIDFEDFVRSLNVFHPNASLEDKIAFSFRLYDLHNTGFIERPEVKQMLIALLFESDMKLADDVIETILDKTFVEADLNQDGKIDTEEWETFVKKNPSLLKIMTLPYLRDITTSFPSFIFNSNVDEITA

SEQ ID NO: 2772 - protein, 498 aa, Schizosaccharomyces pombe
MSTSSKLSTNIKDLSLFDLEEFPARSYIGGKWVTAASGKTFDVENPGLNETLAPVTDMSVEETRKAIKVAHEAFLSYRNSDIKERYAILRRWYDLIMENADDLATMMTLENGKALGDAKGEVVYAAKFIDWFAGEALRISGDSSMSSNPQNRIITIKQPVGVVGIITPWNFPAAMITRKVGAALAAGCTVVIRPAAETPFTALALAKLAERAGVPAGVLNMVTANSPSEHGIELTTNPLIRKVSFTGSTNVGKILAKQSSSTLKKLSLELGGNAPFIVFEDADLEKAADALMACKFRGSGQTCVCANRIYVHSSVYDAFVDLVTERVSKFKLGYGLDAGVTHGPLISEKAISKVKQHVEDAVQKGGVVVTGGKVASNLGPMYFEPTVIINAKQGMLISEEETFGPVGALFKFDTEDEVVAWANDSPVGLAGYLFSKDISRVFRVGEALQVGMVGCNTGLVSDVLSPFGGVKESGFGREGSKYGISEYLDIKSLTISTL

SEQ ID NO: 2773 - protein, 117 aa, Zea mays
MTASQSSMSGGGEPGMRTVVWFRRDLRVEDNPALSAAARTGGEVVPAYVWSPEEDGPYYPGRVSRWWLSQSLKHLDASLRRLGAGRLVTRRSSDAVVALVDLVRSTGATHLFFNRLY

SEQ ID NO: 2774 - protein, 357 aa, Gibberella zeae PH-1
MNYPHPYSKAAELDKRIQIPRPCYDSALAPMLDYASLPEEFSLDLMRGVAAGVEECPHGSHTFNAETVLKDQPHLTHAEHVVAGPDNNDVILSVFTPKEPAKVPRPALYHIHGGGMVSGDRFSALTQVIDLLSGIDCVVVSVEHRLAPETRAPGPAEDCYAGLVWVSKNAENLGIDPAAIVVFGVSGGGALAAATCLMARDRKSPAVPIKAQMLYSPLLDDRCESVADKQFEYGNPAPTTWLRAIWDHILGDERGSENVTPYQAPSRETNLSNLPPAYIDAGECEVFRDVAVAYASTMWRCGSTCELHIWPGAFHGFDMMDDPQIPLINIANKAKANWFKRVLTTDTKPLPAPISHA

SEQ ID NO: 2775 - protein, 375 aa, Gibberella zeae PH-1
MSPSAVEGNGVVDVKTTLKPNVGVYTNPNHDLWVAPAEPSAEAVKSGSDLKQGEVSVAIRSTGICGSDVHFWHAGCIGPMIVEGDHILGHESAGEVIAVHPSVSHLKVGDRVAIEPNIPCGTCEPCLTGRYNGCETVQFLSTPPVPGMLRRYINHPAVWCHKIGNMSYENGALLEPLSVALAGMQRAEVRLGDPVLICGAGPIGLITLQCCAAAGASPIVITDISESRLAFAKELCPRVITHKVERLSAEDSAKAIVKSFGGVEPTVAMECTGVESSIAAAVWSVKFGGKVFIIGVGKNEINIPFMRASVREVDIQLQYRYCNTWPRAIRLVENNVVDLSKLVTHKFKLEDAIKAFETSADPKTGAIKVMIQSLE

SEQ ID NO: 2776 - protein, 288 aa, Magnaporthe grisea 70-15
MASSLTLQSTFKLPSGHEMPLLGFGLWQTPPDEAERCCNDALRLGYRHIDSAASYRNEGGCGKAIRTSSIPRSDIFFTSKVRIITYDGAKEQVAKTLAETGLDYIDLMLLHCPYGGSENRKGAWKALVEAVEAGKVRSIGVSNYGVHHLDELEKHMAELEAERPGAGGVLSVGQYEIHPWCARDDVVGWLQKRGVAVEAYSPLVRGERWGEPVLKKLADKYGKTEAQVLIRWSLDQGFVPLPKSVNEDRIKANTDVYDFQLTAEEVKELKTDEYKPVCWDPVTSGLDN

SEQ ID NO: 2777 - protein, 507 aa, Glycine max
  misc_feature (180)..(180): Xaa can be any naturally occurring amino acid
  misc_feature (213)..(213): Xaa can be any naturally occurring amino acid
  misc_feature (240)..(240): Xaa can be any naturally occurring amino acid
  misc_feature (354)..(354): Xaa can be any naturally occurring amino acid
  misc_feature (432)..(432): Xaa can be any naturally occurring amino acid
MVLSKTASESDVSVHSTFASRYVRTSLPRFKMAEESIPKEAAYQIINDELMLDGNPRLNLASFVTTWMEPECDKLIMAAINKNYVDMDEYPVTTELQNRCVNMIAHLFNAPLEETEAAVGVGTVGSSEAIMLAGLAFKRKWQNRRKQEGKPYDKPNIVTGANVQVCWEKFARYFEVELKXEVKLRDDYYVMDPEKAVELVDENTICVAAILGXSTLNGEFEDVKRLNDLLIEKNKITGWXTPIHVDAASGGFIAPFIYPELEWDFRLQLVKSINVSGHKYGLVYAGIGWVIWRSKQDLPEELIFHINYLGADQPTFTLNFSKGSSQVIAQYYQLIRLGFEGYRNVMENCRDNMXLVLKEGLEKTGRFSIVSKDNGVPLVAFTLKDHTHFDEFQISDFLRRFGWIVPAYTMPPDAQHVTVLRVVIREDFSRTXLAERLVSDVEKVLHELDSLPARVISSTTVTLSAEENGKVVVAKKNPMETQREITAIWKKFVLERKKNNDKMNGVC

SEQ ID NO: 2778 - protein, 213 aa, Zea mays
MGCFHSTAKRQHPGYEDPVHLASQTAFSVSEVEALFELFKSISGSVIDDGLINKEEFQLALFKNQRKENLFANRIFDLFDVKKRGVIDFGDFVRALNVFHPNIPMEEKVDFSFKLYDMDGTGFIERKEVKQMLIALLGESEMRLSDEIIETILDKTFSDADANQDGKIDRTEWENFVTRNPSLMKIMTLPYLKDITTTFPSFVFNSEVDDLVT

SEQ ID NO: 2779 - protein, 451 aa, Oryza sativa (japonica cultivar-group)
MPPAGDDESPAATGDGYSKKVLQGRYELGRVLGQGASSKVYRARDARTGAHVAVKAIRKQQQPHHHPSCRSPEAAAAARRCVEVEREVAALRRVRGHPHVVALLDVLATRSTVYLVLELASGGSVLSALDSRGGGHYDEPAARRLFAQLASAVAHAHSLGVFHRDIKPENLLLDERGDLRLTDFGLSAFADADQHLGATDGLAATHCGSPAYVAPEILLKRRYDASKADVWSCGVVLFVLTAGYLPFNDGNLMAMYRKICAAKFRCPKWCSQELRSLIGRMLDPEPDTRIKIGEIFDHPWLQQDGSSSSFGMIQAASSHSKPEVEKWEAELEQAMELNAFDIIGFASGCDLSGLIGPLPDRVRFVLPGGDSKSVLDKVEKLGREEGLVVRRKEEEWCGGVHVEATSGKFTAYVRVNLLPKKILMIEAERVIGSEIPKFWHQLQIGNLLVRK

SEQ ID NO: 2780 - protein, 488 aa, Listeria monocytogenes EGD-e
MSIKETALPKVQTKLFINGKWTDGDNKETKDIVNPANGDVIAKIAQAGPSETKKAIKAAKDAFPDWAKMELADRVKLLHKIADLMEEKADTLAKIMTLEQGKPLKESKGEVLTGVENFRFAAEEARRLYGETIPAPNNHAFIVKKQPIGVVAAITPWNFPGGMVTRKLAPALATGNTIVLKPSGDTPLSALAIFEIFEEAGLPKGVANIVMGSSKEIGETLTDSDDVRKLTFTGSTKVGQTLFKQSADTLKKISLELGGHAPFIVFDDANLDAAVNDLVAAKFRNNGQVCVSPNRIFVAKEIKEKFTKALVAKVEQLKVGNGLDDVNVGPLIREDAIDKIDKQLKNATEKGAKVLTGGGRLTGSDYDKGNFYKPTVLDNVTRKMDIFYEETFGPVIPLITFETEDEAIEMANDSEFGLASYFYTKDLARVEKVGAALEYGMVGANEIAISNPETPFGGVKHSGFGRENGHYGMEEYIQVKFINLKYRD

SEQ ID NO: 2781 - protein, 57 aa, Triticum aestivum
  misc_feature (48)..(48): Xaa can be any naturally occurring amino acid
MPFTASDICKILLAIILPPLGVFLERGCNADFLIDILLTVLGHIPGIXHALYIIFQF

SEQ ID NO: 2782 - protein, 52 aa, Glycine max
  misc_feature (34)..(34): Xaa can be any naturally occurring amino acid
  misc_feature (43)..(43): Xaa can be any naturally occurring amino acid
MDYAAKHVTEKMMLNAGDIYPHNTSDANEAYYYXMVFEKVFRXNSAKLTVPG

SEQ ID NO: 2783 - protein, 215 aa, Triticum aestivum
  misc_feature (78)..(78): Xaa can be any naturally occurring amino acid
  misc_feature (169)..(169): Xaa can be any naturally occurring amino acid
MAPAVMASSATTVAPFQGLKSTAGLPVSRRSCSAGLSSVSNGGRIRCMQVWPIEGIKKFETLSYLPPLSTEALLKQVXDYLIRSKWVPCLEFSKVGFVFREHNSSPGYYDGRYWTMWKLPMFGCTDATQVLNEVEEVKKEYPDAYVRVIGFDNMRQVQCVSFIAFRPPXCEESGQGLKVQVEVIDIHVMLVKFVGGSAFSVLLLLLICEYMSICM

SEQ ID NO: 2784 - protein, 160 aa, Zea mays
MDARMFGLENPLVAALHHLLDVPDGDAGAGGDKAGGGATRTYVRDARAMAATPADVKELAGAYAFVVDMPGLSTGDIRVQVEDERVLVISGERRREEREDAKYLRMERRMGKFMRKFVLPDNADVDKVAAVCRDGVLTVTVEKLPPPEPKKPKTIEIKVA

SEQ ID NO: 2785 - protein, 140 aa, Glycine max
  misc_feature (22)..(22): Xaa can be any naturally occurring amino acid
  misc_feature (43)..(43): Xaa can be any naturally occurring amino acid
  misc_feature (56)..(56): Xaa can be any naturally occurring amino acid
  misc_feature (61)..(61): Xaa can be any naturally occurring amino acid
  misc_feature (97)..(97): Xaa can be any naturally occurring amino acid
QQRDVAHTVGPAHHECICTVSXGIGAIEHVLYHSVTYEVTTIXASSPRFLMSRKTXSLGVXWVIFAEGLDQIFGGYMYLYEAPHKALFHQMTIGMVXALAKHDCLRDNRSTSAWGLEARVPMLVKQCVRVAMIFGPEYNM

SEQ ID NO: 2786 - protein, 280 aa, Triticum aestivum
MKTFLIFVLLAMAMKIATAARELNPSNKELQSPQQSFSYQQQPFPQQPYPQQPYPSQQPYPSQQPFPTPQQQFPEQSQQPFTQPQQPTPIQPQQPFPQQPQQPQQPFPQPQQPFPWQPQQPFPQTQQSFPLQPQQPFPQQPQQPFPQPQLPFPQQSEQIIPQQLQQPFPLQPQQPFPQQPQQPFPQPQQPIPVQPQQSFPQQSQQSQQPFAQPQQLFPELQQPIPQQPQQPFPLQPQQPFPQQPQQPFPQQPQQSFPQQPQQPYPQQQPYGSSLTSIGGQ

SEQ ID NO: 2787 - protein, 384 aa, Rhodococcus sp. DK17
MSNATQTDPASRTTGTATAMVLEGFGRAMAPRTFPRVDPDAGAVVVDVTHAGICGTDIHLQQGRLAIPVPVILGHEAVGRVHALGEGVTTDARGEELRVGDAVSWASNIPCGHCYYCEDQQEPSLCETRKVYGINQSSADWPHLSGGWSEQIYLQPGSTIVRIPSSVTPQQVIALGCAGPTAVHAVNRIAKPDAGNVVVVQGSGPVGLACAMYATLAGAAKVIIVGGPANRLEVARTAGIGDIHIDIFAETDRAARLDRILAETTGGRGADVVIEAAGVPTAVSEGIDIARRGGKYLVVGQYTDHGTTPINPHYITKKQLQVLGSWAFSPHNHLEYVESLPRLAARFDLASMVTEYPLGKAEEAMGDMRDGRSLKSVLVTGGQS

SEQ ID NO: 2788 - protein, 256 aa, Triticum aestivum
MLLPTRRLPAAPSRPSVHPYISPARPSLRFRRQHGRAATARATSATPPVFGDTLLGLYEKERLGLSRYADEESREDVFWETLDADLQYWTRSLRPVQWYPGHIAKTEKELKGQLKLMDVVIEVRDARIPLATTHPKMDSWLGNRRRIIVMNREDMVSADDRNAWATYFSSQGIKVIYSNGQLGMGTMKLGRMAKSAASTVNTRRREKGLLPRPVTQLICFASCLFFLYTCKLFVLKLFHKKRYTVQLGYDVIEVMF

SEQ ID NO: 2789 - protein, 147 aa, Triticum aestivum
AEINFGGETAIAKTAGLVDPDAGLVDYVETLVRKPETEFNVVVLQLNGIDQPKEAVHVLNVGRLRMRLSKGKTVVAKEFYSSSMQLCGVRGGGEAASQAMFWRPRSDLSFAVAFETARERNTAIMLARRFAIDCNIILAGPGDKTPW

SEQ ID NO: 2790 - protein, 201 aa, Nicotiana tabacum
PNYTGPTTGCPREPWHDLHSRIEGPAAYDVLTNFEERWLKASKRHGLQKMKASQDDALLQLDRIPDILKIADVPCLGEDDADTWHVQIFRSIDSNSVKGFPKDPKEATNKNLVCGKNVLIDMSIHTAYVKAIRAAQHFIYIENQYFLGSSYNWNNYQDLGANNLIPMEIALKIANKIRANERFSVYIIVPMWPEGVPTSTA

SEQ ID NO: 2791 - protein, 133 aa, Zea mays
PASSPTRLDDVQLAFCLLSEVRLGNSDGYQHGQCWRDVYDAICQARRLIYIIGWSMFHTIHLVRDGHDDMALGDLLRRKSQEGVQVLLLVWDDPTSRRLLGIKMEGYMGTRDEETRRFFKHSSVQILLCPLSA

SEQ ID NO: 2792 - protein, 560 aa, Triticum aestivum
MAAAAVASNGGAAPVPGRLASVYSEVQTSRIAHALPLPSVLRSHFTLADGPASTAAGSPDEIAKLFPCLYGQPSAAVVPSAEPVETKPLKIGVVLSGGQAPGGHNVICGIFDYLQERAKGSTMYGFKGGPAGVMKGKYVELTTDFVYPYRNQGGFDMICSGRDKIETPEQFQQAEDTVNRLDLDGLVVIGGDDSNTNACLLGEYFRGRNLKTRVIGCPKTIDGDLKCKEVPTSFGFDTACKIYSEMIGNVMTDARSTGKYYHFVRLMGRAASHITLECALQTHPNVALIGEEVAEKKETLKNVTDYITDVVCKRAELGYNYGVVLIPEGLIDFIPEIQKLIAELNEILAHDVVDEAGAWKSKLEPASRELFDFLPKTIQEQLLLERDPHGNVQVAKIETEKMLIAMVETELEKRRAAGKYSAHFRGQSHFFGYEGRCGLPTNFDSSYCYALGYGAGALLQFGKTGLISSVGNLAAPVEEWTVGGTALTALMDVERRHGKNKPVIKKAMVELDAAPFKKFASLRDEWASKNRYISPGPIQFSGPGSDASNHTLMLELGAEI

SEQ ID NO: 2793 - protein, 211 aa, Zea mays
  misc_feature (126)..(126): Xaa can be any naturally occurring amino acid
MASDRVLGTVKWFNGTKGFGFITPDDGSEDLFVHQSSIKSDGYRSLNDGDAVEYTVGSGNDGRAKALDVTAPGGGPLAGGERPDGGNGGGRGGYGGGDRGYGGGGDRGYGGGGDRGYGGGDRGYGXGGGDRGYGGGGDRGYGGGGGYGGGYGGGGGGGGRGCFKCGEEGHMARDCSQGGGYGGGGGGGRGSECYNCGQEGHISRDCPNKRR

SEQ ID NO: 2794 - protein, 446 aa, Methanosarcina mazei Go1
MKAVVYRGPNQVSVEEVEDPKIEHPADAIIRLTSSGICGSDLHMYEGRTVEKPGKVLGHEPLGVIEEVGDAVTSFKKGDRVVVTFNIACGHCLNCIRGFTSACLTVNPESAGGAFGYAKMGPYRGAQAEFLRVPFADLNCTKLPGSPGDKWEDDFIMLSDVFPTGFFATQLAMVMPGFPVAVFGAGPVGLLSAYSAILQGAAQVFVVDYIPERLKLAKSIGAIPVDFTLSDPVAMIEALRSQHSRVDTVLPGEEKLQGIMSSIENLAKSIGANLELARSDPVTMIQMLRAGNPAIVQSLIPGEEKMKGVMSGIDAVGYQARDRQDPSRENPTQVISDLVRLINPTGHLGVIGVYVADDPGAYNERAKKGEYILPFGQLWEKGISVGTGQTPVKKLQPMLRDMIIAGVAKPSFIVSHKISIEEAPDAYREFAKRSEGFTKVTIQFEK

SEQ ID NO: 2795 - protein, 334 aa, Streptomyces globisporus
MLGDEDGKAAELWSMANLGTPMAVRVAATLRIADHITAGAHTAGEIAEAAAVHEESLDRLLRYLTVRGLLDRDGLGRYTLTPLGRPLCEDHPAGVRAWFDMEGAGRGELSFVDLLHSVRTGKAAFPLRYGRPFWEDLAEDPRRAESFNRLLGQDVATRAPAVVAGFDWASTGHVIDLGGGDGSLLTALLTACPSLRGTVLDLPEAVQRAKESFAVSGLDDRANAVAGSFFDALPAGAGAYVLSLVLHDWDDEASVAILRRCAEAAGQTGSVFVIESTGSAGDAPHTGMDLRMLCIYGAKERRVEEFEELAGRAGLRVVAVHPAGPSAIIQMSAV

SEQ ID NO: 2796 - protein, 55 aa, Brassica napus
  misc_feature (10)..(10): Xaa can be any naturally occurring amino acid
  misc_feature (42)..(42): Xaa can be any naturally occurring amino acid
MSTATFVEIXLAILLPPLGVFLKFGLKVEFWICLILTLFGYXPGILYALYIITKD

SEQ ID NO: 2797 - protein, 253 aa, Brassica napus
METEREKQVYSAKLSEQTERYDEMVEAMKKVAQMDVELTVEERNLVSVGYKNVIGARRASWRILSSIEQKEESKGNEENVKRIQNYRKRVEEELAKVCNDILSVIDKHLIPSSTAVESTVFFYKMKGDYYRYLAEFSSGAERKEAADQSLEAYKAAVAAAETGLAPTHPVRLGLALNFSVFYYEILNSPESACQLAKQAFDDAIAELDSLNEESYKDSTLIMQLLRDNLTLWTSDLPEEGEEKSKGDEPKEEN

SEQ ID NO: 2798 - protein, 178 aa, Glycine max
  misc_feature (93)..(93): Xaa can be any naturally occurring amino acid
  misc_feature (122)..(122): Xaa can be any naturally occurring amino acid
  misc_feature (125)..(125): Xaa can be any naturally occurring amino acid
  misc_feature (144)..(144): Xaa can be any naturally occurring amino acid
  misc_feature (165)..(165): Xaa can be any naturally occurring amino acid
  misc_feature (174)..(174): Xaa can be any naturally occurring amino acid
  misc_feature (177)..(177): Xaa can be any naturally occurring amino acid
MASSMISSPAVTTVNRAGAGMVAPFTGLKSMAGFPTKKTNNDITSIASNGGRVQCMQVWPPIGKKKFNTLSYLPDLNNTQLAKEVEYLLKKRXIPYLQFDLNHNFIYHNHNESPRYYNKLYXTIXNLPIFNYTNTSHVCKDLQXTKTTYPSNCIPIIRFYNSHQXQYINFISYXPAXF

SEQ ID NO: 2799 - protein, 480 aa, Pseudomonas putida KT2440
MQLKDAQLFRQQAYINGEWLDADNGQTIKVTNPATGEVIGTVPKMGTAETRRAIEAADKALPAWRALTAKERSAKLRRWFELMIENQDDLARLMTTEQGKPLAEAKGEIAYAASFIEWFAEEAKRIYGDTIPGHQPDKRLIVIKQPIGVTAAITPWNFPAAMITRKAGPALAAGCTMVLKPASQTPYSALALVELAHRAGIPAGVLSVVTGSAGEVGGELTGNSLVRKLSFTGSTEIGRQLMEECAKDIKKVSLELGGNAPFIVFDDADLDKAVEGAIISKYRNNGQTCVCANRIYVQDGVYDAFAEKLAAAVAKLKIGNGLEEGTTTGPLIDGKAVAKVQEHIEDAVSKGAKVLSGGKLIEGNFFEPTILVDVPKTAAVAKEETFGPLAPLFRFKDEAEVIAMSNDTEFGLASYFYARDMSRVFRVAEALEYGMVGINTGLISNEVAPFGGIKASGLGREGSKYGIEDYLEIKYLCISV

SEQ ID NO: 2800 - protein, 133 aa, Crocosphaera watsonii WH 8501
MSAATDEILEKLKSLTLLEASELVKQIEEAFGVSASAPSGGMMMMAPGGAAPGGAAAEAEEEKTEFDVVLEEVPGDKKIAILKVVRAITGLGLKEAKDMVESAPKPIKEGTGKDDAEEIKKKLEEAGAKVSVK

SEQ ID NO: 2801 - protein, 157 aa, Chloroflexus aurantiacus
MNIYQFTVRTIDGEQQSLAVYRNKVLLIVNVASHCGLTPQYGDLESLYRRYKDRGFVVLGFPSNQFNQEPDDEATIKSFCARTYAVTFPLFAKVEVNGPNTHPLFAYLKAQQPGLSPDGEIKWNFTKFLVNRNGTVVRRYAPTDTVGAIERELVELL

SEQ ID NO: 2802 - protein, 283 aa, Zea mays
MPMYSKSELIHVPPPPCSRPRYVMAPPLVFTSIGASMNAAVRDVWASNFDEELSNLSAVLPRYPCVCLDTEFPGAVHDSDMPRYMRGPRESYELVKRNVGIALSGPAGRFPIAWQFNIRGFDPALHPHAPASIAMLREQGMDFAMLNEFGIDPEDFAAGFRRSGLACGRLTWTAFSGSYDFGYLAKALTGGQPLPDTLDGFLALVRRLFGHSVFDVKHLARCCAMRGGLEQVATALGVKRAAGRAHCAGSDSLLTTDVLLLMMHRFFRNVDVLAHAGTIVDLT

SEQ ID NO: 2803 - protein, 250 aa, Ipomoea batatas
MGKCYPTVSEEYKKAIEKLRRKLRGFIADKNCAPLMLPLAWHSAGTYDVSSKTGGPFGTMRLKAEQAHGANNGLDIAVRLLEPFKEQFPIVSYADFYQLAGVVAVEITGGPDVPFHPGREDKTEPPVEGRLPDATQGNDHLRDVFVKQMGLSDKDIVALSGGHTLGRCHKERSGFEGPWTTNPLIFDNSYFTELLSGEKEGLLQLPTDKALLNDSVFRPLVEKYAADEDAFFADYPEAHLKLSELGYAEA

SEQ ID NO: 2804 - protein, 199 aa, Triticum aestivum
MEGVGARLGRSSARYGPAMTFTGPVRKWRKEWVTISAATATATSAAASSTGTGSRGNNLILFKWTPLNGANERDEEQTAPAKTATRRRLYVPVSVVQDQRQESAKSDDENKANDGEPSSTETEQSIGKTNMDDILMDESQASDEVRDSGNFVGGTDLNLNLGPKDPDGEDEGDTGEQHEVRTEHRLKRKSVTPDLEMRM

SEQ ID NO: 2805 - protein, 332 aa, Nostoc sp. PCC 7120
MTKNLLEQLREMTVVVADTGDIQAIEKFTPRDATTNPSLITAAAKMPEYQEIVDQTLLQAKKDAGAGASKGQIVSLAFDRLAVSFGLKILQIIPGRVSTEVDARLSYDTEATITKARELIAQYKAAGIGPERVLIKIASTWEGIKAAEILEKEGIHCNLTLLFGLHQAIACAEAGITLISPFVGRILDWYKKETGRDSYPSAEDPGVLSVTTIYNYYKKFGYKTEVMGASFRNIGEITELAGSDLLTISPGLLGELQATIGELPRKLDPAKAATLDIDKISIDKATFDKMHAADRMAYDKLDEGIKGFTKALEELETLLAERLARLEVVASH

SEQ ID NO: 2806 - protein, 143 aa, Zea mays
MAMAYKMATEGMNVKEECQRWFMEMKWKKVHRFVVYKIDERSRAVLVDKVGGPGEGYEELVAALPGDDCRYAVFDFDFVTVDNCQKSKIFFIAWSPAASRIRAKILYATSKQGLRRLLDGVHYEVQATDPSEIGFDVIRGRAQ

SEQ ID NO: 2807 - protein, 374 aa, Thermoproteus tenax
MQYSPGLEGIIVKESKICLIDVENSKIYYRGYDIEELADKSTFEETAYLLIYGQLPRASELDAFKERLASLRRPPEHVVKLLGLLPKSAEPIDVLRTAVSAMGMGRNLSDRSPEAELERGLEVIASMPFIAANWDRTRRGLEIADPQAEGHAEYFLRALKGDASPRQIKAMDVMLIIYAEHGMNNSAFTAVTVASTLSDMYSVISAAIASLKGPLHGGANIDAAKMIEEVGEPGRVQRWVDEALAAGKRIPGFGHRLYKRGPDPRLRVLRRLARELAEEAGDYKYYEIAERLEEYVHSRLSHKGIYANTDLYAAVIFKYLGLPTDLNLPAFAMSRAAGWVAHAVEYRRNNRLIRPTERYIGPVGLRYIPLEARG

SEQ ID NO: 2808 - protein, 326 aa, Aspergillus nidulans FGSC A4
MALKRTFKLNTGYEIPAVGLGTWQSKPSEVEEAVTAALNIGYRHIDAAAVYGNERDVGNGIKASGVPRGEIFLTSKLWNTHHDPENVEAAVDRSLSDLQTDYLDLYLIHWPVAFRYSTTTIQPVDEKTGLIDVIDVPIKDTWAAMEALVAKGKVRSIGVSNFNRRRIEELLKTAKIPPAVNQIEAHPYLQQRELLEWSKEKGILITGYSPLGNNIYNIPRTVDDPLVIEVAKFLNRTPAQVLISWAVQRGTAVLPKSVTPERIKSNFRDFILPEDAFQAIQSLERHQRMNFPARLGVDIFDEVGEESARRSALEWAEGQRLSKSQA

SEQ ID NO: 2809 - protein, 442 aa, Cupriavidus necator
MPQRHLPESRRPAMNRRQSQPFRTGDVMYQHIKVPAGEKITVNQDFSLNVPDNPIIPYIEGDGTGLDITPVMIKVVDAAVAKAYCGKRKIAWMEIYAGEKSTKVYGLDVWLPDETLEVLKDYVVSIKGPLTTPVGGGIRSLNVALRQTGPDVCLRPVRYFKGVPSRCVSSEKTDMVIFRENSEDIYAGIEWAAESEHAKKLIKFLQDEMGVKKIRFPRTSGIGIKPVSREGTERLVRKAIQYAIDNDKPSVTLVHKGNIMKFTEGGFRDWGYELAHKEFGAELVDGGPWCKFKNPKTGKDIVIKDAIADAFLQQILLRPAEYSVIATLNLNGDYVSDALAAQVGGIGIAPGANMSDSVAMFEATHGTAPKYAGKDYVNPGSEILSAEMMLRHMGWTEAADLIISSMEQSILSKKVTYDFARLLEGATQVSCSGFGQVMIDNM

SEQ ID NO: 2810 - protein, 105 aa, Glycine max
FAELMMSSGLICNNSMSWVTFHSTYNFSYLVKILTHRNLPTRLEKFLKTIKVFCRDNVYNIKHIIRFYNTLYNKLNHIAQSLNLKHTRKNYHHTKSDSLLTVHAF

SEQ ID NO: 2811 - protein, 367 aa, Zea mays
  misc_feature (171)..(171): Xaa can be any naturally occurring amino acid
  misc_feature (185)..(185): Xaa can be any naturally occurring amino acid
  misc_feature (268)..(268): Xaa can be any naturally occurring amino acid
MAATVRRAASSVLSRFLLTKPSPASAAGNKSALLGSGAAALHRFSTAPASAAAAAEEPIQPAVEVKHTQLLINGNFVDAASGKTFPTLDPRTGEVIARVAEGDSEDIDRAVAAARRAFDEGPWPRMTAYERCRVLLRFADLIERHAEEVAALETWDNGKTLAQAAGAEVPXVARCVRYYAGWADXHGLVAPADGAHHVQVLHEPVGVAGQIIPWNFPLLMFAWKVGPALACGNTVVLKTAEQTPLSALYVANLLHEAGLPEGVLNVVXPVQTILKFSGVEEVIRRANATPYGLAAGVFTRSLDAANTLSRALRAGTVWVNCYDVFDATIPFGGYKMSGVGREKGIYALRNYLQTKAVVTPIKNPAWL

SEQ ID NO: 2812 - protein, 288 aa, Gibberella zeae PH-1
MVLEAVMVVVDNSESSRNGDYQPTRFDSQVDAVNITFQSITQGNPESSVGLMSMGGKGPEVLVTLTTEQGKILEGLHRTKKKIGGSSHLKTGIQVATLALKHRQNRSQRQRIIVFVCSPVEESEKELTTLAKKMKKANISVDFVLFGDLDDDSTKNKLQLFIDTVKTNEGCHLVVIPPSSKLLSDQLVSSPILLGENAGGSGGAGGAGGGNDEFEFGFDPAMEPELALALRMSMEEEKARQEKAAREEEEAAKKASLGDVKEEDEGQGSSSKDQDKDKKGDGDKMDIS

SEQ ID NO: 2813 - protein, 266 aa, Triticum aestivum
  misc_feature (196)..(196): Xaa can be any naturally occurring amino acid
MGSNEGGGCDGKPVVVVPEIKYTKLFINGEFVDAASGKTFETRDPRTGDVLAHIAEADKADVDLAVEAAREAFEHGKWPRMSGYERSRAMNKLADLMEQHIEELAALDGADAGKLLLWGKFIDIPSAVQMLRYYAGAADKIHGESLRVSGKYQGYTLKEPIGVVGIIIPWNFPSLMFFLKISPALAAGCTVVVKPXPSQTPLSALYYAHLAKLAGIPDGVINVVPGFSPTAGAAIASHMDVDSVAFTGSGEVRRLIMEASARSNLK

SEQ ID NO: 2814 - protein, 292 aa, Arabidopsis thaliana; identical to SEQ ID NO: 375

SEQ ID NO: 2815 - protein, 238 aa, Glycine max
  misc_feature (191)..(191): Xaa can be any naturally occurring amino acid
AGIPGSTPRPETDEFIYHECLVHPALLHNPSPKNVFIMGGGEGSTARELLRHKTINKVVMCDIDEEVVNFCKSYLVVNKEAFRDQRLEVVINDARAELETRDESYDVIIGDLADPIDGGPCYKLYTKSFYELIVKPRLKQGGIFVTQAGPAGIFSHTEVFSCIYNTLRQVFKYVVPYSAHIPSYADILEWXQASDSPLDLSAEELDLRMRHRIKGENGYLDGKTFTSASTLSKTVRNS

SEQ ID NO: 2816 - protein, 132 aa, Thermosynechococcus elongatus BP-1
MSAATDEILEKLKSLTLLEAAELVKQIEETFGVSAAAPVGGMMVAAPVAGAAAAPAEEVEEKTAFDVILEEVPADKKIAVLKVVRSLTGLGLKEAKEVVESTPKPVKEGASKEDAEAAKKELEEAGAKVSIK

SEQ ID NO: 2817 - protein, 358 aa, Thermosynechococcus elongatus BP-1
MSHAVTLIRGDGIGPEVAAAARTAIDATGVKIDWVVVDAGVAMMERYGTPLPEEVIDAIKSTKTAIKGPITTPVGTGFRSVNVEIRKRLNLYANLRPAKSIVGVKSYFQNIDLVIVRENTEDLYAGIEFAYTSPEAAKARAFLSDLSGKPIREDAAIGVKPISVLGSDRILEFAFKYAKANGRKKVTAVHKANIMKFTDGLFLERAREIASRYPDIVFEDRIVDNMCMQLMQKPELYDVMVMPNLYGDILSDLCAGMIGGLGVAPGANIGDECAVFEAIHGSAPKYAGQNKANPTALILSGVLMLQHLGEMEAAQRLQAAVEKVIAEGRFVTYDLAAPGKEPVGTQEMAAAIAEYAAP

SEQ ID NO: 2818 - protein, 430 aa, Oceanobacillus iheyensis HTE831
MKTILLNANRLLPSNELEKVEVLIEDNKIIKIASQIPDKVENYIDIEGKLLLPGLIDVHIHLREPGGEHKETIKTGTMAAARGGYTTVCAMPNTNPVPDHPEALTSLLSKIADDAHIRVLPYASITKSLKGEERTDIQSLIDAGAFAFTDDGVGIQTADQMYQAMKDAARHNTTIVAHCEDNSLVYGGVLHEGEVSERLSLPGIPSLSESVQIARDVLLAEATGCHYHVCHVSTKESVRVIRDAKKAGIHVTAEVSPHHLLLNETDIPDDNADWKMNPPLRSTEDQQALFDGLMDGTIDLIATDHAPHATEEKAVGFKEAPFGIVGLETAFPLLYTHLVLKGKMTLYQLVERMTEKPAATFQLPYGKLEEDSVADITVIDLEKEETIHRETFYSKGKNTPFDNWKVKGIPVLTMVNGVVVYEEAKQHEEA

SEQ ID NO: 2819 - protein, 396 aa, Oryza sativa (japonica cultivar-group)
MASAAGGASGKDWFDCLPDDLVHHVLSFLPALDAVRTSVLSRRWRDFWVSMPRLNVDVGDFRDDGQFENFTVHALPLLDSSVPLRSLRLRSSLHYLSALWVNHAVKRKVAVLEYSGRAELCSSVDASLSLASSYLTKVVLKHFDFDYGQFWPLIDACPALENLELLDVWTFYSVTISSSSLKHLRIVSCLFYNGFRINAPNLLTMCLDDVNVNGPLGHDSLVLENLSSLMTASVSVYHCFYPKHYVKTELHFFHGLSHARNLKLIAPLYEALFEEGLPTCPVFNNLKCLVLGDWCMAFDLYPLRCILRQSPMLEELCVELGEEECENCKNRKPAFSYGEISPFWCDRLKTIKIKCTEHDERFVALLQLFCKILVCIEEVDIDRQWVSAQPPDSSEL

SEQ ID NO: 2820 - protein, 70 aa, Glycine max
MSALFNFHSFLTVILLGICACTYFKMQFPAILDQKTGFRGFFWKAARIGERLSPWVAAGCFMMGVSIIFF

SEQ ID NO: 2821 - protein, 343 aa, Chrysosplenium americanum
MLFAMQLACASVLPMVLKSAIELDLLEIIRGQDTCMSPTEIASHLPTTNPDAPAMVDRILRLLSCYSVVTCSVRSVDDQRVYGLAPVCKYLTKNQDGVSIAALCLMNQDKVLMESWYHLKDAVLDGGIPFNKAYGMSSFEYHGTDPRFNKVFNRGMSDHSTITMKKVFQTYQGFQGLTSLVDVGGGTGATLTMILSKYPTIRCINFDLPHVIEDAPEYPGIEHVGGDMFVSVPKGDAIFMKWICHDWSDEHCLKLLKNCYDALPNNGKVILAECILPEVPDSSLATKGVVHIDVITVAHNPGGKERTEKEFEALAKAAGFQGFQVFCNAFNTYIIEFSKKICN

SEQ ID NO: 2822 - protein, 140 aa, Nicotiana tabacum
KEEFHKETCRKIKALHQYDCLRANKSTSAWGLEARVPFLDKEFINVAMSIDPEWKLIKPEQRRIEKWALRRAFDDEEHPYLPKHILYRQKEQFSDGVGYSWIDGLKAHAEQHVTNRMMLNASHIFPHNTPITKEAYYYSM

SEQ ID NO: 2823 - protein, 114 aa, Triticum aestivum
FSWADAWADAWDLCITAGALVLRFQRRLKTAERVMGTVKRFNFTKGFGFIFAEDGSQDLFVHQDSIKADGYRSLNENDVLEFEVITGDDGRTKVFDVTAPGGGALAGGSRPGHR

SEQ ID NO: 2824 - protein, 359 aa, Zea mays
  misc_feature (68)..(68): Xaa can be any naturally occurring amino acid
MSHGNGMLNSVKVERWPAAVAANGQPRPMDVLHDGSSPPFLTKTYDMVDDPTTNAVVSWSAANNSFVXWDPHIFGTVLLPRYFKHNNFSSFVRQLNTYGFRKVDPDRWEFANEEFLRGQRHLLKNIRRRKPPHSSPNQQSLGSYLEVGHFGYEEEIDQLKRDKQLLMAEVVKLRQEHQNTRSDLQAMEEKLQDTEQKQQQMMAFMARVMQNPDFMRQLISQREMRKELEDAISKKRRRRIDQGHEAGSMGTGSSLEQGPQGVFEPQEPVESVANGVPSDLESSSVEAKGLEVRQGVSSGGSEHLNGRPSGELNDDFWEDLLHEGGLGADAGNAVGQDDMNMDMDPDVSLPQLKQHGPRH

SEQ ID NO: 2825 - protein, 180 aa, Spinacia oleracea
MASSVLSSARVATVSRTPAQASMVAPFTGLKSTVGFPATKKNDDITSLASNGGRVQCMKVWPTQNMKRYETLSYLPPLTTDQLARQVDYLLNNKWVPCLEFETDHGFVYREHHNSPGYYDGRYWTMWKLPMFGCTDPAQVLNELEECKKEYPNAFIRIIGFDSNRQVQCVSFIAYKPAGY

SEQ ID NO: 2826 - protein, 350 aa, Thermococcus kodakaraensis
MAEKMQAIMKTKPAYGAELVEVDVPKPGPGEVLIKVLATSICGTDLHIYEWNEWAQSRIKPPQIMGHEVAGEVVEVGPGVEDLQVGDYISVETHIVCGKCYACKHNRYHVCQNTKIFGVDMDGVFAHYAIVPAKNAWKNPKDMPPEYAALQEPLGNAVDTVLAGPIAGRSTLITGAGPLGLLGIAVAKASGAYPVIVSEPSEFRRKLAKKVGADYVVNPFEEDPVKFVMDITDGAGVEVFLEFSGAPKALEQGLKAVTPGGRVSLLGLFPREVTIDFNNLIIFKALEVHGITGRHLWETWYTVSSLIQSGKLNLDPIITHKYKGFDKFEEAFELMRAGKTGKVVFFPHKG

SEQ ID NO: 2827 - protein, 219 aa, Lactococcus lactis
GGLYAPFVEPELEWDFRLKNVISINTSGHKYGLVYPGVGWVLWRDKKYLPEELIFKVSYLGGELPTMAINFSHSASQLIGQYYNFVRYGFDGYKAIHERTHKVAMFLAKEIEKTGMFEIMNDGSQLPIVCYKLKEDSNRGWNLYDLADRLLMKGWQVPAYPLPKNLENEIIQRLVIRADFGMNMAFNYVQDMQEAIEALNKAHILYHEEPENKTYGFTH

SEQ ID NO: 2828 - protein, 113 aa, Glycine max
MTMGLKFFTCLVLTVCIAASVDAALTCGTVTSSLAPCATYLSKGGAVVPGPCCAGVKKLNDMAQTTPDRQQACKCLKAAAKSINPSLASGLPGKCSVSIPYPISMSTNCDNVK

SEQ ID NO: 2829 - protein, 503 aa, Acinetobacter sp. ADP1
MRYIDPNQPGSKVQFKAQYENFIGGQWVPPVKGEYFGNSSPVDGKVFTQIPRSSVEDIELALDAAHKAKADWNKASPTVRSNVLLKIADRLEENLELLAVAETWENGKPIRETLAADIPLAIDHFRYFAGCIRAQEGGISEIDEDTIAYHFHEPLGVVGQIIPWNFPILMAAWKLAPALAAGNCIVLKPAEQTPSSILVLAELIQDLLPPGVLNIVNGYGAEVGRPLATNPRISKIAFTGSTKVGQMIMQYATENIIPVTLELGGKSPNIFFEDILDKEDDYLEKTLEGFAMFALNQGEVCTCPSRALVQESIADKFLEMAVERVKRIKTGHPLDTETMIGAQASKQQFDKILGCIDTGRNEGAQLLTGGDARHDVDGGFYIEPTIFKGNNSMKIFQEEIFGPVLSVTTFKDFDDAMRIANDTIYGLGAGVWSRSAHTSYRAGRAIEAGRVWTNCYHLYPAHAAFGGYKQSGIGRENHRMMLDHYQQTKNLLVSYSTKPMGFF

SEQ ID NO: 2830 - protein, 163 aa, Lactococcus lactis
GGLYAPFVEPELEWDFRLKNVISINTSGHKYGLVYPGVGWVLWRDKKYLPEELIFKVSYLGGELPTMAINFSHSASQLIGQYYNFVRYGFDGYKAIHERTHKVAMYLAEEIEKTGMFEIMNDGSQLPIVCYKLKENSNLGWNLYDLADRLFNEGMASACLSTS

SEQ ID NO: 2831 - protein, 444 aa, Bradyrhizobium japonicum USDA 110
MTQRFDVILRGGTVVNQDGEGLRDIGIASGRIAEIGALSQASAAEVIDCKGLHILPGVMDTQVHFREPGLDQKEDLETGSRSAVMGGVTAVFEMPNTSPLTVTEASFTDKVKRARHRMHCDFAFFIGGTRENVQDLPVLERAPGCAGVKVFIGSSTGALLVEDDESLRRIFQVIRRRAAFHAEDEYRLNERKPLRIEGDPRSHPVWRDETAALMATQRLVKLAHETGKRIHVLHISTKEEIEFLRDHKDVASCEATPHHLTLVAPECYERLGTLAQMNPPVRGADHRAGIWRGIEQGIIDVLGSDHAPHTLEEKQKTYPASPSGMTGVQTLVPLMLDHVNAGRLSLARFVDLTSAGPARLYNMACKGRIAAGYDADFTVVDLKRSETITNKWVASKAGWTPYDGVRVTGWPVGTFIRGRRVMWQGELVTPSQGEPVRFLETLKA

SEQ ID NO: 2832 - protein, 158 aa, Brucella suis 1330
MKKNNLFRALLISATFALQATAALAVNPDEVLSDPKLEKRAREISAELRCMVCQNESIDDSNAELARDLRILVRERLTKGDTDGQVIDFVVDRYGEFVLLKPRFNAQTALLWGFPVIILLIGVGALLVAFRRRRAAGTAPQPLSESEKAELSRLLDGK

SEQ ID NO: 2833 - protein, 113 aa, Bartonella sp. Tm916nv
ANEACLKMLQEIGSVKRIPEFIARAKDKNDPFRLMGFGHRVYKNYDPRAKIMQQTCHEVLKELNIQDDPLLDIAIELENIALNDEYFVEKRLYPNVDFYSGITLKALGFPTEM

SEQ ID NO: 2834 - protein, 75 aa, Glycine max
MLEFNCMQHILYRQREQLGEGIGYGWIDGLKTHAEKHATDLMLLIAAYMFPFNTPTSREAYYYRMKLERNFRQVH

SEQ ID NO: 2835 - protein, 452 aa, Burkholderia cepacia R1808
MTDTISASQHEDTNLRTDAAWLDAHWMPFTANRQFKSDPRMIVSAKDAYYTDAEGRKIFDGLSGLWCTGLGHGRTEITEAVSRQIAQLDYAPAFQFGHPKSFELANKIKELTPAGLDYVFFTGSGSEAADTSLKMARAYWRAKGKGTKTRLIGREKGYHGVNFGGISVGGIGANRKLFGQGIDADFLPHTQLAENKFSRGMPDNGADLADRLLDLITLHDASNIAAVIVEPFSGSAGVVIPPKGYLKRLRDICTAHDILLIFDEVITGFGRSGAMTGADAFGVTPDIMNFAKQVTNGTQPLGGVIATKEIYDTFMAAGGPDYMLEFPHGYTYSAHPVACAAGVAALDLLVKEDAVARVRDLAPHFEAAVHGLKGQRHIADIRNYGLAAGLTIAALPGEPARRPYEIAMRCWAKGFYVRYGGDTIQLAPPFIAEKREIDNLVNALSDALNEVD

SEQ ID NO: 2836 - protein, 317 aa, Methanosarcina acetivorans C2A
MDFEASARDLTTPVKGAKIVPNMSVDELVREYAGCAFGAGRLAEAVDIYYEMLASEKTTKFFGLAGAMTPAGMRGIIADLIRDGHIDVLVTTGANMVHDTVEALGLHHYKGSDCANDIQLRHECIDRIYDVYLPDQHFTDLEEFLQSVYAGLPQEKLSIRQVLTEIGKNLDDDSSILKTAAEMGVPVYCPALQDSVIGLQAWLYKEGNLLHVDAFADMHEFMEICYEAESAGAMLLGGGVPKNYILQSMLVTPKSFDYAIQLTMDRPETGGLSGATLDEAQSWGKVGEDAKSVTVYADATITLPLIVSAVRTRLSKR

SEQ ID NO: 2837 - protein, 280 aa, Pleurotus djamor
MERYNTRTASNFPGLVFDCAEEAQSGYKHIDTAYNYHTEKYVGNAVRESGIPREELFITTKLPWHHYARVAESFQESLDALGLGYIDLYLIHWPQPILYDPNDPLPKNPDGTPKTTNYPFTKIWADMERLLDTGKVRAIGVSNFSIKNLEILLESAKVVPAVNQVELHPYLAQPELVDYCKQKGIAITAYTPTGYQTVRDDPVIVELASKYRVSPAQVILAWHMSRGVIVTPKSANAERQRENINVSFLHFPINSFDVLFLASTAATCPGACRSSAYISS

SEQ ID NO: 2838 - protein, 306 aa, Pleurotus djamor
MSAYPPIVLNTGARMPALALGGWAGLTEEERTQAKEWFLTALKSGYRHIDTAQIYYTEKSVGNAIRESGIPREELFITTKLPWNHHSRVAESFQKSLENLGTEYIDLYLVHFPQRVFYDETTDFPRNPDGSIKVVNSPTLNDVWADVETLLDTGKVKAIGVSNYSIKTLEELLKTAKVVPAVNQVELHPFLAQSKLLAYCKEKGIAVTAYTPTGYQTVLTDPTIVELAGKYGVSPAQIVLAWHLSRGVAAAPKSANESRQKENLNLPFLQPEDVAKISALDRGQRIANKADERGQVWGLTLEELGW

SEQ ID NO: 2839 - protein, 164 aa, Triticum aestivum
  misc_feature (72)..(72): Xaa can be any naturally occurring amino acid
  misc_feature (107)..(107): Xaa can be any naturally occurring amino acid
  misc_feature (110)..(110): Xaa can be any naturally occurring amino acid
  misc_feature (117)..(117): Xaa can be any naturally occurring amino acid
  misc_feature (124)..(124): Xaa can be any naturally occurring amino acid
APVRSSICYIDGDEGILRYRGYPIEEVAESSSFVEVAYLLMYGNLPTQSQLAGWEFAISQHSAVPQGLLGYXINQMPHDAHPMGVLANAMSTLSCPSNPRCKPCSLXGQXLFNPKQXRDNKLYXSLGKAPAITTAAYLRQQEGCLLPFKLPNPEFLMLTGVTRI

SEQ ID NO: 2840 - protein, 496 aa, Thermus thermophilus HB27
MPLITTETGKKMHVLEDGRKLITVIPGDGVGPECVEATLKVLEAAKAPLAYEVREAGASVFRRGIASGVPQETIESIRKTRVVLKGPLETPVGYGEKSANVTLRKLFETYANVRPVREFPNVPTPYAGRGIDLVVVRENVEDLYAGIEHMQTPSVAQTLKLISWKGSEKIVRFAFELARAEGRKKVHCATKSNIMKLAEGTLKRAFEQVAQEYPDIEAVHIIVDNAAHQLVKRPEQFEVIVTTNMNGDILSDLTSGLIGGLGFAPSANIGNEVAIFEAVHGSAPKYAGKNVINPTAVLLSAVMMLRYLEEFATADLIENALLYTLEEGRVLTGDVVGYDRGAKTTEYTEAIIQNLGKTPRKTQVRGYKPFRLPQVDGAIAPIVPRSRRVVGVDVFVETNLLPEALGKALEDLAAGTPFRLKMISNRGTQVYPPTGGLTDLVDHYRCRFLYTGEGEAKDPEILDLVSRVASRFRWMHLEKLQEFDGEPGFTKAQGED

SEQ ID NO: 2841 - protein, 504 aa, Cryptococcus neoformans var. grubii
MDAKKATIAIIALAAAATAYKVMSTTQEKKNTEGVCPATGQKRAGSTGCPFSSGLPLPDPGHRCDPNSIQEEYKVPEVPPLTEAQKDIIKSTAPILEQHGVTITTHFYKNMIRAHPELRDVFSESAQKLGHQPAALAAAVYAYACNIHDLTPILPVVERIAHKHTSLHITANQYGIVGKHLIQAIVDILGDAVTPEVGDAWYNGYWNLAHVFIKRERQLYDSAIEAGGWEGWRQFKVAKRVKESNEITSFYLKPVEGSGAPLPKFRPGQYTAVQIDIPGLGYKQARQYSLSDAPNGEYFRISVKREDGVPVPTLSNPEVPFHPGWMSNVLHKDYQEGSIVNVASPFGDFYYAPSDSSPTAPLVLLSAGVGQTPVMAMLNAQLAKNNEPNSPIKPITYVTVARSPKVRAFKDHVKKLSDVHENVKSRIFYSRPTDDVVEGQDYDFKGRMDLEKIKEDLYLGDKTAEYYICGPSKFMLNTRDKLQSLGVDPSRIHYELFEAGNLSA

SEQ ID NO: 2842 - protein, 461 aa, Rubrobacter xylanophilus DSM 9941
MVDPATGEEVDSVPVCGEAEVDAAVRGAAGAFPGWSGTPASRRGELLARAAEAVLGARDELAGLLTAEQGKPLREARLEIRRFVHTLEHYAGLAKNIRGGYVPDLDEGAYGLILRRPVGVVGAIVPWNFPTTLLANKLGPALVAGNVVVAKPAETTPLTTLRIAEIMHGAGLPAGVFNVVTGDGPTTGQALAGHPSVRKVAFTGSTPVGKKLAALAAGDLKRVTLELGGSDPMIVCDDADLDRAASAASVGRFFNCGQACLAVKRLYVFESVAEEFVEKLVGKAKRLRVGPGRAEGTIIGPLHTPEGRELLEGQVRDAVESGARVLAGGRRPEGEVFERGNFYEPTLLLEPSHESRVATEEVFGPALPIWRVGDLEEAIERANGSIYGLGSSVWTADLDRATEAAERIEAGYTWINSPQVIYDELPFGGWKQSGYGKEHGMEAIEYYTETKSVVVRRAYQG

SEQ ID NO: 2843 - protein, 116 aa, Schizosaccharomyces pombe
MSADGLDYTNLLPIANVARIMKSALPENAKISKEAKDCVQDCVSEFISFVTGEASEQCTQEKRKTITGEDVLLALNTLGFENYAEVLKISLTKYREQQARSASMKETKQSRSEEPQ

SEQ ID NO: 2844 - protein, 249 aa, Glycine max
MPTHHASAAIFGIIGNMISVMVYLAPVPTFYQIYKKKCTDGFHSLPYLLSLMSSMLWLYYAFLKIHDGVVPLITINSIGCVIELIYILTYIKYAHKDARNLTYTLFAAMNIAFLTLVLSSHFALHGSHRVKVIGWICDAVSLSVFASPLSIMAKVIRTKSVQFMPFYLSFFLTLNAITWFVYGLSIQDKCIYVPNVGGFGLGLVQMVLYGIYRNGGESEKEQALAEGAINIVVVNPLGPAEVFNRRGSG

SEQ ID NO: 2845 - protein, 341 aa, Oryza glaberrima
MDHRELWPYGLRVLVIDDDCSYLSVMEDLLLKCSYKVTTYKNVREAVPFILDNPQIVDLVISDAFFPTEDGLLILQEVTSKFGIPTVIMASSGDTNTVMKYVANGASDFLLKPVRIEELSNIWQHIFRKQMQDHKNNNMVGNLEKPGHPPSILAMARATPATTKSTATEALLAPLENEVRDDMVNYNGEITDIRDLRKSRLTWTTQLHRQFIAAVNHLGEDKAVPKKILGIMKVKHLTREQVASHLQKYRMQLKKSIPTTSKHGATLSSTALDKTQDHPSRSQYFNQDGCMEIMDYSLPRDDLSSGSECMLEEQNDYSSEGFQDFRWDSDKQEYGPCFWNF

SEQ ID NO: 2846 - protein, 71 aa, Triticum aestivum
MASRSCTFLEILLAIILPPLGVFLHYGCCSMEFCICLLLTILGYIPGIIYAVYVLVALGSEERDRDYDTLA

SEQ ID NO: 2847 - protein, 346 aa, Rhodococcus ruber
MKALQYTEIGSEPVVVDVPTPAPGPGEILLKVTAAGLCHSDIFVMDMPAEQYIYGLPLTLGHEGVGTVAELGAGVTGFETGDAVAVYGPWGCGACHACARGRENYCTRAAELGITPPGLGSPGSMAEYMIVDSARHLVPIGDLDPVAAVPLTDAGLTPYHAISRVLPLLGPGSTAVVIGVGGLGHVGIQILRAVSAARVIAVDLDDDRLALAREVGADAAVKSGAGAADAIRELTGGEGATAVFDFVGAQSTIDTAQQVVAIDGHISVVGIHAGAHAKVGFFMIPFGASVVTPYWGTRSELMDVVDLARAGRLDIHTETFTLDEGPTAYRRLREGSIRGRGVVVPG

SEQ ID NO: 2848 - protein, 74 aa, Triticum aestivum
MAFVPICVQCGTRSNPCRCKVVGPTLGFVALVVAGVVEWPLGAAVYLFRHRKGRRIMGHPATVVYPRVTGAIPI

SEQ ID NO: 2849 - protein, 359 aa, Glycine max
MLTCIARPKKLVGDSAASEDPSSRGVKSLTGQLKEMALKASGAYKQCGGPCATAPPSRVSRGGGTELDSESSSSSSSRRRWGKELEARLKGISSGEGTPSSSGRRVVLLLEDDEEPKEWVAQVEPGVLITFVSLPRGGNHLKRIRFSREIFNKWQAQRWWAENYDKVMELYNVQRLNRQAFPLPTPPRSEDESSKRESIEDFPVTPPLSRERPPCNLFRAGGGGMGMGYSSSDSFDHHSMQSSRHYYDPNDVNSTPKASSTISAAAKTDISSSMDVDASIRSSSSREADRSGDLSISNASDLDTEWVEQDEPGVYITIRALPGGKKELRRVRFSREKFGEMHARLWWEENRARIHEQYL

SEQ ID NO: 2850 - protein, 112 aa, Bartonella sp. Tm1794nv
NEACLKMLQEMGSVKRIPEFIARAKDKNDPFRLMGFGHRVYKNYDPRAKIMQQTCHEVLKELNIQDDPLLDIAIELENIALNDEYFVEKRLYPNVDFYSGITLKALGFPTEM

SEQ ID NO: 2851 - protein, 117 aa, Phaseolus vulgaris
MATLNSACVVAVLCLVVLTAPTAHAAISCGQVTSSLASCIPFLTKGGAVPASCCSGVRSLNAAAKTTPDRQVCNCLKSAAGAIPGFNANNAGILPGKCGVSIHYNISTSTNCATIKF

SEQ ID NO: 2852 - protein, 420 aa, Schizosaccharomyces pombe
MSGYSPLSSGPADVHIGKAGFFSSVINLANTILGAGILSLPNAFTKTGLLFGCLTIVFSAFASFLGLYFVSQCAARLPRGKASFAAVAKHTFPSLAVVFDASIAVKCFGVAVSYLVIVGDLMPQIAPSLGLSSPMFLRRQTWIVFALFVLTPLSFLKRLDSLRHTSVISLIALCYLVFIVLYHFIIGDTVKGEIRYFVPESGFGYLSVLPVFVFGFTCHQNAFSVINEVRNFSQGFVNFTMFTAIISSTLLYLLVAITGYLSFGSLASGNIIAMYDNTSIWIIGGKLAIVVLVLFSYPLQCHPCRNSVYQAIRRSYSAHDMSDGYHAVITLCILLFTHSLALLLSSLEMVLAFVGSTGSTFISFILPGSLYYFFSHKVASPGNSSPLQLRISRAFAAGLAIYGTVVMILCLNINIAKLSH

SEQ ID NO: 2853 - protein, 169 aa, Synechocystis sp. PCC 6803
MTAQANNTIYGFSANALDGSPVALRDFEGKVLLIVNTASQCGFTPQYQGLQALYNRFGDRGFTVLGFPCNQFGQQEPGGSGEIKNFCETRYGVTFPLFEKVEVNGPNAHPLFKFLTAASPGMAIPFLGGAEDIKWNFTKFLVDRQGKVVKRYGSIAKPDEIAADIEKLL

SEQ ID NO: 2854 - protein, 456 aa, Oryza sativa (japonica cultivar-group)
MTPPASTGKCTGAAAGEVEEPLLPEFSGGGHGASVSGAVFNVSTSIIGAGIMSIPAAMRVLGVLPALLLIATVAALSDASVEFMLRYTGWDSGPPSYAGIMGDAFGRAGAKALNVCIAFTTTGTLVVYLIIIGDVLSGSAGAGDEHAGVLQELFGAQWWTARELVILVTAIVVLLPLVLRRRVDSLKFTSAVSILLAVVFMFISLGIAVYALFTGTAKMPRMLPDFSRLSSPFELFTAVPIVVVAFTFHFNVHPIRTELSKTSDMKAAVRISLVLCAAIYAAVGFFGFLLFGDATMADVLANFDRSSGAGVPQALNDAARLSYALHLVLVFPLLHFSLRVNVDELLFPGRRPLATDTRRFVALTAVLMAVLYALAIAIPSIWTLFEYSGSTFAVCISLIFPGAIVLRDAHGIAKTKDKALAATMIALAVITSSIAIASNVMSSISGKVEGGHAAGR

SEQ ID NO: 2855 - protein, 423 aa, Lactococcus lactis subsp. lactis
MTLLIKNGRLVDPKSNRDEVLDILIENDKIVKIGLNLSVENAEIVDARGLVVAPGLIDVHVHFREPGQTHKETIHSGAKSAAAGGFTRVVMMANTKPILSTPKVLTETLEIADKEDIKIDAVGSITQDFDGEHLTDFDELIKAGAIGFSDDGIPLTDAGVLRKALQKAKLTDSLISIHEEDPNLIGTLGVNDGEVAHKCGFTGAPTVSEYSMMARDSMIAYETGARLHIQHLSAGESVEVVRFAKNLGAKITAEVTPQHFSITEQMIFEQGTNAKLNPPLRSTTDIGKIIEGLKDGTIDVIATDHAPHTREEKNVSLDKAPSGMIGLETSLQLGLTNLVAKGHLTLSELLTKMTVNPAKLYNFDAGYLAENGPADLVIFDAENDYQVGETFDSKATNSPFIKQKVQGQVKYTICDGKIVYQAK

SEQ ID NO: 2856 - protein, 452 aa, Glycine max
MEECHTVFGKYEMGRLLGKGTFAKVYYGKQISTGESVAIKVINKEQVRKEGMMEQIKREISVMRLVRHPNVVEIKEVMATKTKIFFVMEYVRGGELFAKISKGKLKEDLARKYFQQLISAVDYCHSRGVSHRDLKPENLLLDEDENLKISDFGLSALPEQLRYDGLLHTQCGTPAYVAPEVLRKKGYDGSKADIWSCGVVLYVLLAGFLPFQHENLMTMYNKVLRAEFEFPPWFSPDSKRLISKILVADPSKRTAISAIARVSWFRKGFSSLSAPDLCQLEKQEDAVTVTVTEEENNSKVPKFFNAFEFISSMSSGFDLSGLFESKRKTATVFTSKCSAAAIVAKIAAAARGLSFRVAEVKDFKIRLQGAAEGRKGRLAVTAEVFEVAPEVAVVEFSKSAGDTLEYAKFCEEDVRPALKDIVWTWQGDATCAANFPACHGEECQKQVVVSTI

SEQ ID NO: 2857 - protein, 201 aa, Aspergillus awamori
MNPEYDYLFKLLLIGDSGVGKSCLLLRFADDTYTESYISTIGVDFKIRTIELDGKTMKLQIWDTAGQERFRTITSSYYRGAHGICVVYDVTDMDSFNNVKQWLQEIDRYATEGVNKLLVGNKSDMEDKKVVEYTVAKEFADSLGIPFLETSAKNASNVEQAFLTMARQIKERMGTATVNNKPTVQVGQGQGVQSGSAGGCC

SEQ ID NO: 2858 - protein, 316 aa, Petunia x hybrida
MEQENHNNNNCTNDKESACISSVLPGWFSEISPLWPGEAHSLKVEKILFQGKSDYQNVMVFQSSTYGKVLVLDGVIQLTERDECAYQEMITHLPLCSIPNPKKVLVIGGGDGGVLREVSRHSSIEQIDICEIDKMVVEVSKQFFPDVAVGYEDPRVNLHIGDGVAFLKAVPAGTYDAVIVDSSDPIGPAQELFEKPFFETVARALRPGGVVSTQAESIWLHMDIIENIVTNCRQIFKGSVNYAWTTVPTYPSGMIGFMLCSTEGLEVDFKNPVNLIENDEIHSKTLPPLKFYNFEIHKASFALPSFAKRVIESKGN

SEQ ID NO: 2859 - protein, 180 aa, Mesembryanthemum crystallinum
MASMMSNAAVVGRTTPAQASMVAPFTGLKSVSAFPVTKKSNDITSIASNGGRVQCMQVWPPLGKKKFETLSYLPPLSEESLMKEVQYLLNNGWVPCLEFEPTHGFVYREHGNTPGYYDGRYWTMWKLPMFGCTDPSQVVAELEEAKKAYPEAFIRIIGFDNVRQVQCISFIAYKPASYDA

SEQ ID NO: 2860 - protein, 193 aa, Ustilago maydis 521
MQTIKCVVVGDGAVGKTCLLISYTTNAFPGEYIPTVFDNYSANVMVDGKPVSLGLWDTAGQEDYDRLRPLSYPQTDVFLVCFSLVSPPSFENVRTKWWPEVSHHAPNIPTILVGTKLDLREDPETIAKLRDRRMQPITYAQGNQMARDIHATKYLECSALTQKGLKGVFDEAIRSVLAPAPVKSKKKNNCMIL

SEQ ID NO: 2861 - protein, 553 aa, Zea mays
  misc_feature (16)..(16): Xaa can be any naturally occurring amino acid
  misc_feature (55)..(55): Xaa can be any naturally occurring amino acid
  misc_feature (84)..(84): Xaa can be any naturally occurring amino acid
MARRAASSLVSRCLPXRGPLAGAAAPLPPSALRRTVPADGMHRLLPGVLQRFSTXAAAVEEPITPSVHVNYTKLLINGNFVDSXASGKTFPTLDPRTGEVIAHVAEGDAEDINRAVAAARKAFDEGPWPKMTAYERSRILLRFADLIEKHNDELAALETWDNGKPYEQAAQIEVPMVARLMRYYAGWADKIHGLIVPADGPHHVQILHEPIGVAGQIIPWNFPLLMFAWKVGPALACGNTLVLKTAEQTPLSALYISKLLHEAGLPEGVVNVVSGFGPTAGAALASHMDVDKIAFTGSTDTGKIILELAAKSNLKTVTLELGGKSPFIIMDDADVDHAVELAHFALFFNQGQCCCAGSRTFVHERVYDEFVEKAKARALKRVVGDPFRKGVEQGPQIDDEQFNKILRYIRYGVDGGATLVTGGDRLGDKGFYIQPTIFSDVQDGMKIAQEEIFGPVQSILKFKDLNEVIKRANASQYGLAAGVFTNSLDTANTLTRALRAGTVWVNCFDVFDAAIPFGGYKMSGIGREKGVDSLKNYLQVKAVVTPIKNAAWL

SEQ ID NO: 2862 - protein, 183 aa, Mesembryanthemum crystallinum
MASSLMSNAATTMAAATTTAQANMVAPFNGLKSVSAFPVTRKNNDITSVASNGGRVQCMQVWPPLGKKKFETLSYLPPLSEESLIKEVQYLLNNGWVPCLEFEPTHGFVYREHGNTPGYYDGRYWTMWKLPMFGCTDPSQVVAELEEAKKAYPEAFIRIIGFDNVRQVQCISFIAYKPASYDA

SEQ ID NO: 2863 - protein, 293 aa, Glycine max
  misc_feature (52)..(52): Xaa can be any naturally occurring amino acid
  misc_feature (65)..(65): Xaa can be any naturally occurring amino acid
  misc_feature (71)..(71): Xaa can be any naturally occurring amino acid
  misc_feature (102)..(102): Xaa can be any naturally occurring amino acid
  misc_feature (165)..(165): Xaa can be any naturally occurring amino acid
MVLIRLWFVLLGFFGGFGSAAEQRRWTLNDFDIEKPLGRGKFGHVYLAREKXDNHIVALKVLFKXQLQQSXVVHQLRREVEIQSHLRHPHILRLDGYFYDQXYAPKGDLYKELQKCKYFSERRVTTYVASLARALIYCHGKHVIHRDIKPENLLIEWIYVIFTNXKKKKKNFGWSVHTFNRRRTMCGTLDYLPPEMVESVEHDASVDIWSLGVLCYEFLYGVPPFEAKEHSDTYRRIIQVDLKFPPKPIVSSAAKDLISQMLVKDSSQRLPLHKLLEHPWIVQNAEPSGVYRS

SEQ ID NO: 2864 - protein, 239 aa, Triticum aestivum
YNGVKVTTEDGTSYFADACIISVPLGVLKANVIKFEPELPSWKSSAIADLGVGVENKIAMHFDRVFWPNVEVLGMVGPTPKACGYFLNLHKATGNPVLVYMAAGRFAQEVEKLSDKEAVSLVVSHLKKMLPDASEPTQYLVSRWGSDPNSLGSYSCDLVGKPADVCARFSAPVDNLYFAGEAASAEHSGSVHGAYSSGIAAAEECRKRLLTLKGIPDLVQVAAWEEMAGAVAPLQICRT

SEQ ID NO: 2865 - protein, 273 aa, Ustilago maydis 521
MSSNDPAAPPSYTAPAPKGYQAVPQHDSPSYGAAETSTTPRNVDEEGDPDDFKFGVTVEQSSPEIRAMFLRKVYTVLFFQILGTTAIAAIMTTRGIAGWVQQNQWAFIVPLVGSLVTMGFLYFKRHSHPTNMILLGLFTVLESLSLGTVITYVDQKIVLQAMIITAFTFFGLTLFTLQSKWDFGSMGGWLFGALMVLVGVGFVGVFLPYNQTFDLIMAVAGCVVFSLYIVYDTWLIQRRLSAEEWVLANISLYLDIVNLFINILRILNNQSRD

SEQ ID NO: 2866 - protein, 237 aa, Saururus chinensis
MGRGRVQLKRIENKINRQVTFSKRRTGLLKKAHEISVLCDAEVALIVFSTKGKLYDYSTNAGMARILERYERYCYAEREVAVTSPDSEGSWWLEYGKLKARIEAQQRIQRQLMGEDLDALTPKELQQLENQLESALKHVKSRKNQVIYDSMVELRRKEKLLRDENTMMEKKIQEKKKERVQQAQWEQQIQSQNSPSFLPTLNIGYHQGTATETGEKEEAHPGHNTVMLAWLLRSSNN

SEQ ID NO: 2867 - protein, 490 aa, Arabidopsis thaliana
MESRKNSDRQMRRANCFSAGERMKTRSPSVIVIGGGFGGISAARTLQDASFQVMVLESRDRIGGRVHTDYSFGFPVDLGASWLHGVCKENPLAPVIGRLGLPLYRTSGDNSVLYDHDLESYALFDMDGNQVPQELVTQIGVTFERILEEINKVRDEQDADISISQAFSIVFSRKPELRLEGLAHNVLQWYVCRMEGWFAADAETISAKCWDQEELLPGGHGLMVRGYRPVINTLAKGLDIRVGHRVTKIVRRYNGVKVTTENGQTFVADAAVIAVPLGVLKSGTIKFEPKLPEWKQEAINDLGVGIENKIILHFEKVFWPKVEFLGVVAETSYGCSYFLNLHKATGHPVLVYMPAGQLAKDIEKMSDEAAANFAVLQLQRILPDALPPVQYLVSRWGSDVNSMGSYSYDIVGKPHDLYERLRVPVDNLFFAGEATSSSFPGSVHGAYSTGLMAAEDCRMRVLERYGELDLFQPVMGEEGPASVPLLISRL

SEQ ID NO: 2868 - protein, 196 aa, Triticum aestivum
AGRLREDVARRYFRQLISAVDFCHGRGVYHRDLKPENLLLDEAGNLKVADFGLSALAGHARPDGLLHTACGTPAYVAPEVLGGNGYDGAKADIWSCGVILYVLLVGALPFQDENLMSMYRKMQRGGFLCPSWVSKDARKLIGRLLDPNPSSRITIASLVESPWFKKTSPIPSPLLEPVPPSTPPLLPLSVTVAIRP

SEQ ID NO: 2869 - protein, 301 aa, Asarum caudigerum
AGLSSPPRERKRVRENLIFSLAFKFARFQNFRFSFSFAGGFIFFEFSSLFFFGLQEMGRGRVQLKRIENKINRQVTFSKRRTGLLKKAHEISVLCDADVALIVFSAKGKLYEYATNSSMETILERYERYSFAERELVADPESEGGWCLEYGKLKARVDALQKSHKHIMGEDLDSLSIKELQHLEQQLDVALKHIRSRKNQVMLDTISELQRKEKMLLEQNKALQKTMREKENAMVRQAQWEQDNQPQASRPSFMLSRPLPTLHIGSNYHQTRNTETEKQGDRPHSRSNSGIPAWMLSHMND

SEQ ID NO: 2870 - protein, 193 aa, Zea mays
MASPAGGESPAKPVLLHGDLDLWILEARLLPNMDMFSEHVRRCFAACRPPSSCGTKHPPPAAAGRRHHHHHRNIITSDPYVTLSVSGAVVARTAVIPNSQDPVWEERLAVPLAHRAADLEFQVKDNDTFGAQLIGTVAVPADRVVSGDEVEDWFPVIGTNGKPYKPDTALRLRFQFQPIADNPAYRHGIPGDP

SEQ ID NO: 2871 - protein, 284 aa, Arabidopsis thaliana
MALADSSCAGLETTESRLSCFFNKAIVNVGGDLVKLVPGRVSTEVDARLAYDTNGIIRKVHDLLRLYNEIDVPHDRLLFKIPATWQGIEAARLLESEGIQTHMTFVYSFAQAAAASQAGASVIQIFVGRLRDWARNHSGDTEIESAIKSGEDPGLALVKRSYNYIHKYGYKSKLMAAAVRNKQDLFSLLGVDYVIAPLKVLQSLKDSPAIPDDEKYSFVRKLTPETATHYHFTNKELVKWDQLSLASSMGPASVELLSAGVEGYANQAKRVEELFGKIWPPPNV

SEQ ID NO: 2872 - protein, 160 aa, Medicago sativa
MDFRLMGLMLQCYTALHQMMDLSDENVEKSSSHNAPTRSYVRDAKAMAATPADVKENPNSYVFVIDMPGLKSGDIKVQVEDDNVLVISGERKREEEKEGGAKYLRMERRVGKFMRKFVLPENPNTDAVSPVCQDGVLTVTVQKLPPPRPKKPRTIEVQIA

SEQ ID NO: 2873 - protein, 250 aa, Zea mays
MTSASELFSTRRSRPGRSDPALESDTSSYRHHSHHHHRRHGVHHHNQRHDSDGCDPLRRPTPRIRRFFHHPIQERSRPIRDVQGTSQYLNTDSTDTETQSSSFVNLNGSERLPGAVLLARDRLFERLRGVSLSSNSRSNRVSLDDQRESSFHSIDGDPIFQLAGLQVTYECNKKPQGLTQDAINCLHRQTFSSAEVKSEMRDCSICLESFTKGDMLISLPCTHSFHSSCLNPWLRACGDCPCCRRAIAKE

SEQ ID NO: 2874 - protein, 247 aa, Chlamydomonas reinhardtii
MAEANSRELALYSAKIAEQSERYQDMVEEMKKVAVLANEQELSVEERNLLSVSYKNLVGSRRASWRILQSIEQSEQAKGNEKRVGMIKRYRAVVEGELDKICHEILDLLDKYLVPSASTTEAAVFYLKMKADYHRYLSEYKTDEAKAAAAELTLAAYKVAQEKADELPTTNPIRLGLALNFSVFYYEVMNQPALACSLAKKAFDEAISDLDSLGEDSYKDSALIMQLLRDNLTLWTSEMQDDDKNRA

SEQ ID NO: 2875 - protein, 347 aa, Thermococcus kodakaraensis
MYRVAVIPGDGIGPEVIDGAVRVLKAVTGRVRFEYYEGGVDVFQECGSPIREEDLEEIRRSDAVLFGATTTPFDLPGYRSLILTLRKELGLYANLRIIPDLRTGREIVIVRENSEGLYFGIGAVVNGRAVDVRLITREGAERIARFAVEQAKARGSFITFVHKANVLTGDKFFRRIVREVAGEEGVEVRDAIIDSFTIKLVRNPWEHGVILSENLFGDILSDLATVHAGSIGIVPSGNYGDGIALFEPVHGSAPDIAGKGIANPIGAILSGAMLLDYLGLDGSLIRAAVRGYVVNGELTPDMGGRARTEDVVRGIIGEIEDLLSMDEVWRDEIRLSRLESDISRMAG

SEQ ID NO: 2876 - protein, 221 aa, Arabidopsis thaliana
MDSLATDPAFIDSDVYLRLGLIIEGKRLKKPPTVLSRLSSSLERSLLLNHDDKILLGSPDSVTVFDGRSPPEISIAHYLDRIFKYSCCSPSCFVIAHIYIDHFLHKTRALLKPLNVHRLIITTVMLAAKVFDDRYFNNAYYARVGGVTTRELNRLEMELLFTLDFKLQVDPQTFHTHCCQLEKQNSDGFQIEWPIKEACRANKETWQKRTPDSLCSQTTAR

SEQ ID NO: 2877 - protein, 462 aa, Glycine max
MTSRSGQGSGGGGSSRTRVGKYELGRTLGEGNFAKVKFARHVETRENVAIKILDKEKLLKHKMIAQIKREISTMKLIRHPNVIRMYEVMASKTKIYIVLEFVTGGELFDKIARSGRLKEDEARKYFQQLICAVDYCHSRGVFHRDLKPENLLLDANGVLKVSDFGLSALPQQVREDGLLHTTCGTPNYVAPEVINNKCYGGAKADLWSCGVILFVLMAGYLPFEETNLSALYKKIFKAEFTCPPWFSSSAKKLINKILDPNPATRITFAEVIENDWFKKGYKPPVFEQANVSLDDLDSIFSDSTDSQNLVVERREEGPMAPVAPVTMNAFELISKSQGLNLSSLFEKQMGLVKRETRFTSKCSADEIISKIEKAAGPLGFDVKKNNCKLKIQGEKTGRKGHLSVATEILEVAPSLYMVELRKSEGDTLEFHKFYKNLATGLKDIVWKAEPIDEEKDGANPSK

SEQ ID NO: 2878 - protein, 214 aa, Clostridium tetani
MKFFIDTANVEEIKKVAKWGVLDGVTTNPTLIAREGRDLKEVIEEICSIVDGPISAEVISLESEKMVEEAKELIKIHKNIVIKVPMCEEGLKAVSELTKLGIKTNVTLIFSAQQALLAAKAGATYVSPFLGRIDDIGSFGIQLVEDIVTIFTNFGIESEIICASIRTPIHVLECARVGGDIATVPYKVFAQMLKHPLTDRGIEQFLEDYKSMNK

SEQ ID NO: 2879 - protein, 1142 aa, Saccharomyces cerevisiae
MAINGNSIPAIKDNTIGPWKLGETLGLGSTGKVQLARNGSTGQEAAVKVISKAVFNTGNVSGTSIVGSTTPDALPYGIEREIIIMKLLNHPNVLRLYDVWETNTDLYLVLEYAEKGELFNLLVERGPLPEHEAIRFFRQIIIGVSYCHALGIVHRDLKPENLLLDHKYNIKIADFGMAALETEGKLLETSCGSPHYAAPEIVSGIPYQGFASDVWSCGVILFALLTGRLPFDEEDGNIRTLLLKVQKGEFEMPSDDEISREAQDLIRKILTVDPERRIKTRDILKHPLLQKYPSIRDSKSIRGLPREDTYLTPLSESNSSIDATILQNLVILWHGRDPEGIKEKLREPGANAEKTLYALLYRFKCDTQKELIKQQQVKKRQSISSVSVSPSKKVSTTPQRRRNRESLISVTSSRKKPISFNKFTASSASSSNLTTPGSSKRLSKNFSSKKKLSTIVNQSSPTPASRNKRASVINVEKNQKRASIFSTTKKNKRSSRSIKRMSLIPSMKRESVTTKLMSTYAKLAEDDDWEYIEKETKRTSSNFATLIDEIFEYEKYEQIRKEKEELERKVREAKAREELERRRRKQEEKERARKLLEKEDLKRKQEELKKQIEIDISDLEQELSKHKEEKLDGNIRSISAPMENEEKNINHLEVDIDNILRRRNFSLQTRPVSRLDPGIMFSSPTEEVSPVEPKRTENERLTTEKKILETIRRSKFLGSSFNIDKELKLSKMEYPSIIAPQRLSEERVVSDSNDGYESLILPKDGNGVSQLKDSTATTAPVSDGRLRKISEIRVPQFTRKSRHFSESNKRLSVLSMYSTKESFTNLVDILKNGNLDVNNQQSQRIPTPRSADDSEFLFETVNEEAEYTGNSSNDERLYDVGDSTIKDKSALKLNFADRFNGSNEAKQTDNLHLPILPPLNGDNELRKQNSQEGDQAHPKIKSMIPESGSSSHTEKEEENEEKEEKKPEQHKQEEDQEKREKVVDDMEPPLNKSVQKIREKNAGSQAKDHSKDHLKEHKQDKNTAIGNGSFFRKFSKSSDKTMELYAKISAKQLFNGLEKLLRGWTQYGLKNIKSHPNNLTLTGKLSSDNIFSLRSTLFEVNIYPRGKMSVVQFKKVSGSFKAVKKLVNEVENVLNKEGVLQK

SEQ ID NO: 2880 - protein, 160 aa, Zea mays
MSDSEEHHFESNADAGASKTYPQQAGTVRKNGFIVIKNRPCKVVEVSTSKTGKHGHAKCHFVAIDIFNGKKLEDIVPSSHNCDIPHVNRTEYQLIDISEDGFVSLLTSDGNTKDDLRLPTDETLVAQIKEGFESGKDLVVTVQSAMGEEQICALKDVGPK

SEQ ID NO: 2881 - protein, 161 aa, Bacillus sp. KSM-K16
MSVYDFSVKTSNGQDVSLSAYKGNVLLIVNTATKCGFASQFAGLEKLYNDYKEKGFYVLGFPSNQFLNQEPVADEDMEQVCKINFGVTFPLFAKTDVKGKHANPLFNYLKAAKKGMLSEEIKWNFTKFLVNRKGEVIKRYAPATKPETIEADVIEELKADA

SEQ ID NO: 2882 - protein, 491 aa, Azotobacter vinelandii
MGLFSVVVLGKEKQPTALVVGGGLAGLAAAWELQRDGWQVTLLEARSGVGGRSGLAGGEWIGSAKAQPLLNDYLARLKLKTQPAPEAVRGTGYLIDGAYFSAAELASRQPATAEGLKRYEQAIGALAASIKDPLDPASDRKLFALDQGNAARWLDELNLPITARQLVNQRIRSHYDEPSRLSLLYLAQQTRVYHGIDAGELRVARLPGGSQVLAQALAKELKTVKTGVRVSAISQDRAGVTAKVGDVGYSADYLVLAVPLRALGQIQFSPALPERHRGALQSTNYGWRDQLLLKFKSPVWESKARLSGNIYSNQGLGMLWVEPATKGGANVLINLSGDNARLLKAFGDRQVADQLLIRLHEHYPKARGAFAGYEIRRYSGDNGLGGAYLAYGPGQISRYWRLWEQPLERVAFAGEHTDPLYPGTLEGALRSGRRAAEQLRELHAGRPVPAPRITRLDQPAPPPAGAALVAGQPAENERGTGFFSRLTRLFR

SEQ ID NO: 2883 - protein, 448 aa, Zea mays
  misc_feature (401)..(401): Xaa can be any naturally occurring amino acid
MSAAATKVKRRVGKYELGRTIGEGTFAKVRFAKNTETGEPVAVKILDKEKVLRHKMAEQIKREISTMKLIKHPNVVRIYEVMGSKTKVYIVLEYVTGGELFDTIANQGRMREGEARSYFQQLINAVDYCHSRGVYHRDLKPENLLLDSYGNLNVSDFGLSALSQQIKDDGLLHTTCGTPNYVAPEVLEDQGYDGAMADLWSCGVILFVLLAGYLPFEDSNLMTLYKKISNAEYTFPPWTSFPAKRLLTRILDPNPMTENSCDFRITIPEILEDEWFKKGYKRPEFDEKYDTPLDDVDAVFNDSEEHHVTEKKEEEPVALNAFELISRSAGLNLGNLFDSEQEFKRETRFTSKCPPKEIIRKIEEAAKPLGFGVQKKNYKLRLEKVKAGRKGNLNVATEILXVAPSLHMVQVRKAKGDTLEFQKFYKNLSKTLKDVVWKSEDLQMRAAS

SEQ ID NO: 2884 - protein, 468 aa, Azotobacter vinelandii
MSLNADWMQRDLAVLWHPCTQMKDHERLPLIPIRRGEGVWLEDFDGKRYLDAVGSWWVNVFGHANPRINARIREQLESLEHVMLAGFSHQPAIELSERLVAITPAGLSRVFYADNGSSGIEVALKMSFHYWRNCGRTGKKRFVTLTNSYHGETVAAMSVGDVALFTDTYKALLLDTIKVPSPDCYLRPEGMSWEAHSRAMFAHMERTLAEHRDEIAAVIVEPLIQGAGGMRMYHPVYLELLREACDRYEVHLIHDEIAVGFGRTGTLFACEQAGIVPDFLVLSKALTGGYLPMAAVLTTDTVYRAFYDDYASLRAFLHSHTYTGNPLACAAALATLDIFEQDNVIERNKALAARMARATEHLKDHPHVAEVRQTGMALAIEMVAEKAGKVAYPWQERRGLKVYEHALSRGALLRPLGSVVYFLPPYVITPEQIDFLAEVASEGIDLATRDAVGVALPTGGPQTFHDPG

SEQ ID NO: 2885 - protein, 483 aa, Bacillus cereus ATCC 14579
MDKKATFVSIDKKAMYINGEWITLQEQIEVNNPATKEIFATVPKGGVTEAKQAVDAAHEAFKTWSKLTAADRATKLKKWFTLIDENKEEIAAIMTKEQGKPFAEALGEVNYANSFVEWYAEEGKRVYGEMIPAAHPNKRILVMKQPVGVMAAITPWNFPAAMITRKVAPALAAGCTAVVKPASQTPLTALKLAELAHEADIPKGVINIITGSAKAIADTWMEDGRVRKVSFTGSTEIGKELMASAAQTMKKVSLELGGHAPFIVMNDADLDKAVEAVIGSKFRNAGQTCICTNRVFVQEEVYEVFVEKFQKAVGQLKVGDGFGDGTTVGPLIDENAVSKVQEHIEDAIQKGGTVLYGGQKVAELEGHFIQPTVIGLANDTMLCMNEETFGPVAPVAKFKTVDEVIERANNTPYGLAAYIFTKDISQAFQISEALEYGIIGLNDGLPSVAQAPFGGFKESGIGREGGHFGIEEYLEIKYISLGL

SEQ ID NO: 2886 - protein, 250 aa, Brassica napus
MTKNYPAVSEEYQKAIEKCKRKLRGLIAEKNCAPIMVRLAWHSAGTFDCASRTGGPFGTMRFDDELAHGANNGLHIALRLLEPIREQFPTISHADFHQLAGVVAVEVTGGPEIPFHPGREDKPQPPPEGRLPDATKGCDHLRQVFLKQMGLTDQDIVALSGAHTLGRCHKDRSGFEGAWTSNPLIFDNSYFKELLSGEKEGLLQLPSDKALLDDPVFRPLVEKYAADEEAFFADYAEAHLKLSELGFADA

SEQ ID NO: 2887 - protein, 218 aa, Listeria innocua Clip11262
MKFFLDTASVSEIKRISELGLVDGVTTNPTIIAKEGRPFEEVIKEICSIVDGPVSAEVIGLEADKMVEEARILAKWAPNVVVKIPMTEEGLKAVHTLTAEGIKTNVTLIFTVSQGLMAAKAGATYISPFLGRLDDIGTDGMILIKNLKKVLDNYGLKAEIISASIRHIGHLEEAAEAGAHIATIPGSLFPKLWSHPLTDKGIEGFLKDWEAFSQKEGN

SEQ ID NO: 2888 - protein, 124 aa, Borrelia burgdorferi
MALNKEDILTWLEGAKTMEVVDLVTAIEEKFGVTAAVAAGVGGAVSAGSADSEEQTEFDVILMSFGDSKINVIKEVRAITGLGLGEAKALVEAAPKAIKEGLSKSDAEELKKKLEAVGAKVEVK

SEQ ID NO: 2889 - protein, 120 aa, Glycine max
MAPTVMMASSATAVAPFQGLKSAASLPVARRSTRSLGNVSNGGRIRCMQVWPAYGNKKFETLSYLPPLSTDDLLKQVDYLLRNGWIPCLEFSKLGFVYRENSTSPCYYDGRYWTMWKLPM

SEQ ID NO: 2890 - protein, 115 aa, Triticum aestivum
QGLKSTACLPVSRRSNGASLGSVSNGGRIRCMHVWPIEGIKKYETLSYLPPVSTEALLKAVDYLIRSKWEHSLEISRVGFILREHNASSGYYDGRYWTMWKLTMLGCTDATQVIN

SEQ ID NO: 2891 - protein, 354 aa, Agaricus bisporus
MAFKILLSLILALNAVQFIAAVPTRRAQCADGTTVSNEACCVLLPIIADIQPNLFENECGEEVHETLRASFHDAIGFSRAAGGGGADGSLVTFGDVETTFAANAGIDEIVETLRPFINSHNISAGDFIQFATVVGLTNCPGAPRIPFFLGRPDATAASPDGLVPEPFDSVTKILERFDDAGFTPTEVVALLASHTVAASDTIEPGLEGVPFDSTPGEFDRQFFIETMLKGTSFPGTGGNQGEALSPLPGELRLESDGLLARDERTACDWQLFATDQQKMASAFSDAMVKLSLVGQDKSQLIDCSDVIPRTIPLTNEPYFPADLTKDDLEQTCPDEFPDYPSNPSVTSVAPVPTS

SEQ ID NO: 2892 - protein, 503 aa, Mesorhizobium sp. BNC1
MALKQETLEILSRLGVAAELLTGGDLVVRSPVTGEEIAALRTVSAAEANAAIEKADVAFREWRMVPAPKRGELVRLLGEELRAAKADLGRLVSIEVGKIPSEGLGEVQEMIDICDFAVGLSRQLYGLTIATERPGHRMMETWHPLGVVGVISAFNFPVAVWSWNAALALVCGDAVVWKPSEKTPLTALACRAIFEKAAARAGGVPEGLLAVLVGARDVGEALVDHPKVPLVSATGSTRMGRDVGPRLAKRFARAILELGGNNAGIVCPTADLDMALRAIAFGAMGTAGQRCTTLRRLFVHESVYGQLVPRLRKAYESVSVGSPLTTNALVGPLIDKAAYDGMLKALEAARALGGKVVGGQRVENGHADAYYVRPALVEMPEQAGPVLEETFAPILYVMKYSDFNEALRLHNAVGAGLSSSIFTRDIQESERFLSVEGSDCGIANVNIGTSGAEIGGAFGGEKETGGGRESGSDAWKAYMRRATNTVNYSTALPLAQGVSFDIE

SEQ ID NO: 2893 - protein, 309 aa, Triticum aestivum
SPSSTTSSSTEAESRHKSSSKNSHGKKKAKVDWTPELHRRFVQAVEQLGIDKAVPSRILEIMGINSLTRHNIASHLQKYRSHRKHMIAREAEAASWTQRRQMYAAGGPAAAVKRQDSNMWTGPTIGFAPPHPPPPPPPPSPAAMQHYARPLHVWGHPTMDSPRMPMWPRHPMPRAPMPAWAPPPPPPSDPAFWHHPYMRGPAAYMPTHGTPCMAMPMTPKFPAAPVPVAMPCPVYAPPSTPSALASKNQQESQLQLQAQPSNESIDAAIGDVLSKPWLPLPLGLKPPSLGSVMGELERQGVANVPQACG

SEQ ID NO: 2894 - protein, 181 aa, Lycopersicon esculentum
MASSIVSSAAAATRSNVAQASMVAPFTGLKSAASFPVTKKNNNVDITSLASNGGRVRCMQVWPPINMKKYETLSYLPDFSDEQLLSEIEYLLKNGWVPCLEFETERGFVYRENNSSPGYYDGRYWTMWKLPMFGCTDATQVLAEVQEAKKAYPQAWVRIIGFDNVRQVQCISFIAYKPEGF

SEQ ID NO: 2895 - protein, 251 aa, Zea mays
MRKKLGTRFPAARIKKIMQADEDVGKIALAVPVLVSRALELFLQDLIDRTYEITLQSGAKTLNSFHLKQCVKRYSSFDFLTEVVSKVPDLGGADSCGDERVLPRRRKSNGSDPENDESRSSKMAIRNANTSPRGRGRGRGRGRGRPPTKRKEVGYVQFEDESSMFAEQGETLPGEGTVPEINSGNEITPQSTQPPPTAPAQATNSKVEEASTDHQSDWPMPDATGNIGVGPSGFGHLTVQVDEDEDYDNED

SEQ ID NO: 2896 - protein, 456 aa, Issatchenkia orientalis
MSLRNFARSATRAYSTAEPTLKERFAELLPGWQAEVKELKSKHGKTVIGEVLLEQAYGGMRGIKGLVWEGSVLDPVEGIRFRGKTIPDIQKELPKAEGSSEPLPEALFWLLLTGEVPTLAQTKAFSAELASRSALPKHVEDLLDTCPTTLHPMAQFSIAINALESESKFAKAYADGVNKKEYWKYTYEDSIDLLAKLPNVAAKIYRNVFKDGKVAPVNASLDYSHNFANMLGFGDNKEFVELMRLYLSIHSDHEGGNVSAHTTHLVGSALSSPYLSLAAGMNGLAGPLHGRANQEVLEWLVGMKKELGDDIFNKEKIEEYLWKTLNAGRVVPGYGHAVLRKTDPRYTAQREFALKHMPDYDMFKLVSNIYEVAPKVLAEQGKTKNPWPNVDSHSGILLQYYGLTQESYYTVLFGVARAFGVLPQLIIDRGLGMAIERPKSFSTQKYKELVENLNKA

SEQ ID NO: 2897 - protein, 286 aa, Glycine max
MHTLLRSTLRTKTASSLAYAAVSRSAQENLLQAPLLSRSNSTEASLAKDTSSNDVKNGQGFKGHSMLAPFTAGWQTTDLHPLVIEKSEGSYVYDINGKKYLDALAGLWATSLGGSEPRLVDAAIAQLKKLPFYHSFWNRTTLPSLDLAKELLEMFTARKMGKAFFVNSGSEANDTQVKLVWYYNNALGRPDKKKFIARAKSYHGSTLIAASLSGLPALHQKFDLPAPFVLHTDCPHYWRYHLPGETEEEFSTRLAKNLEQLILKEGPETVIHSNACKVHEHLFQWF

SEQ ID NO: 2898 - protein, 423 aa, Pseudomonas fluorescens
MKLSILGARVIDQPAGLDQVTDIHIDACKIVALGAAPAGFVAVETLDAQGLVAAPGLVDLNVALREPGYSRKGSIVSETRAAAAGGVTSLCCPPQTKPVLDTSAVAELILDRAREAGNTKVFPIGALSKGLDGEQLAELIALRDAGCVAFGNGLNSFRNTRTLCRALEYAATFGLTVIFNSQDHDLAEGGLAHEGPTASFLGLPGIPETAETVALARDLLLVEQSGVRAHFSQLTSARGAALIAQAQARGLPVTADVALYQLILTDEALIDFNSVYHVQPPLRTRADRDGLREAVKSGVISAISSHHQPHERDAKLAPFGATEPGISSVELLLPLALTLVEDGLLDLPTLLARLSAGPAQALQLPAGKLAVGAAADLVLFDPAASTVAGEAWRSKGDNCPFLGHSLPGVVRYTLMDGRITHQA

SEQ ID NO: 2899 - protein, 426 aa, Methanopyrus kandleri AV19
MLALRVLLKGKILIGGRVREREVLAEDGWIVKIGKRLNEEADLTLELGKRELAVPAPIDLHVHCRDPHPDYPFGFKTETRRFLLGGVATVVDMPNTRPAPTTPETYYEKEELARENAEIEVIVAGGVRDSQCTKELVEAGAYVLGEVFLATSTDAPAVPWSTLPEIFRELSPDGPLTIFHPELDELVAERPARNLYEHLKNRPPEAETTAVGLLAGLKVRYPSRIHLSHVTLPESVKIAKGADITVDVTPHHLFFDVLRVDPEDPVFKVNPPLRGRHHRLGLLRAVRRGDVDVLASDHAPHILEDEFEDVPSGVTGGEIILPAALTLHRRFGLSLRDAVAMITCRPAKLLGRDDLGEVAVGKRARITVVRMREFVVRAEEFGEEDRKFPYDGMRMFGEPVKLIDGTKVYDLKESRREGKPVILEGE

SEQ ID NO: 2900 - protein, 323 aa, Magnaporthe grisea 70-15
MPATLANKTFKLNNGVEIPAVGFGTFAAEGQPGQTYAATKAALEAGYRHLDCAWFYQNEDEIGNAIADFLKENPSVKREDLFICTKVWNHMHAPEDVKWSLDNSLKALRLDYVDLFLVHWPIAAERTEDRQVKLGPDGKYVINHELTENPEPTWRAMEELYEAKKARAIGVSNWTIDGLKKLFAVAKVKPAVNQIEIHPYLPNEELVRFCLDNDVLPSAYSPLGSQDQVPTTGERVRDDPGLNAVANRSNMTLAQALLGWGVKRGYVVLPKSSTPSRIKSNIEVPDLSEADYQDLWKVANGRKPTRFVDMKDTFGYDLWKESQ

SEQ ID NO: 2901 - protein, 470 aa, Mesorhizobium sp. BNC1
MLIGGEWTKGSGEPKEVINPATEEVIAMLPSATEADLDRALQSAQRGFREWQELSAEQRCDIIMRGCRILRERAAEIAPLITIEQGKPVEEARLEIIRAASIIEWDANEGRRAYGTIVPSDPGFNRYGIKLAIGPVAAFTPWNFPISSPGRKLGGALGAGCSVIIKSSEETPAATCALVQCLLDGGLPPEVINIVSGKSSMISAYLIASPVIRAITFTGSTPVGKHLAKLAAEAMKPVVMELGGHSPVIVFDDVDADKIARQAVAAKFRNAGQICTAPTRFIIQEKAHDAFVESFVKAASAIKVGNGLEADTQMGPLANSRRLRALEELVADARAKGATVATGGKRIGNRGYLFEPTVLTDVPDDADVVNVEPFGPIAPVVRFREFEEAIEIANRLPYGLCSYAFTNSQAYSHELAHRVESGIMSLNHFGTSQADTPFGGVKESGYGREGGYETLDAFMITKFVSQQITA

SEQ ID NO: 2902 - protein, 389 aa, Enterococcus faecalis V583
MSTKDVKELAIEQAKKFGGKLEVCPKVPIETKADLGIAYTPGVAAVSSAIHEKKERAYELTTKKNTVAVISDGSAVLGLGNIGPEAAMPVMEGKAALFKRFAGVDSIPLVLDTQDTEEIIQTVKFLAPTFGGINLEDISAPRCFEIEQRLIDELDIPVFHDDQHGTAIVVLAALYNSLKLINKKIEDIHVVINGGGSAGLSITRKFLAAGVKHIIIVDRAGILSETDTALPPHHAEIAKLTNREHRTGDLATALEGADVFVGVSAPGVLKPEWIQQMNEQPVIFAMANPVPEIFPDEALAAGAYIVGTGRSDFPNQINNVLAFPGIFRGALDARAKKITIEMQIAAAKGIAKLIPDNELTPTNIIPDPFQEGVAKVVAESVRNAVKETN

SEQ ID NO: 2903 - protein, 359 aa, Burkholderia cepacia R18194
MEIDTPRVGPGDVRIAVAYCGICGSDLHEYADGPHAIPVDTPHPLSRRTAPLTLGHEFCGTVVEVGEGVTALRAGDRVAVEPEYRCSQCAYCRSGSYNLCVSMGFAGLMGDGGMADFAVVPAYMLHRLPDGVSLEQAAVMEPAAVALHALRRGELRLGETCAVFGLGPIGLLLIMLAKLQGATTIVAVDVSPERLAAATRFGATHTFDARALGASALQDAIRAATGGLGVDASFEAAGLQTTFESAMHALRKGGRIVMVGLMPHAGFDAFRAVNDELTFTASVGYRHAYEDLLRIVASGALDLTSIVTRTVSLEDAVADGFDALLADRAQIKILVSPAQRPPRRAHTIGSIEHESSVGV

SEQ ID NO: 2904 - protein, 430 aa, Lactobacillus plantarum
MTTLIKNAQVWQAGQLQTTDILIAEGRIKAIGHQLHDQFGPADHVICADHHFVSPGFVDVHVHLRDPGQTAKETIATGTLAAAHGGFTTVGAMPNVDPVPDTPERVATMVARNQQEAHVHVAQYASITTGRTSEQLVDFAGIKAAGAFAVSNDGSGVQTAGTMFAAMQGAAKVGLPLAAHVEDDSLYHHGVMNAGPVADRLGLPGINNVSEAAQVARDVMLAEASGVHYHVCHVSTAESLRVIRNAKAAGINVTCEVSPHHLLLCDEDITMDNPMLKMNPPLRSAKDRAALVAGLLDGTIDMIATDHAPHTDAEKQGSMKTAAFGITGIETAFATLYTALVKTRLLTLGRLIELMSTRPTELFGLNTAGRLVVGAPADLTIIDLDHQYEIEAATMLSKGHNSPFIGWPVYGNVLMTLVDGKLAYGKETQA

SEQ ID NO: 2905 - protein, 85 aa, Glycine max
  misc_feature (37)..(37): Xaa can be any naturally occurring amino acid
  misc_feature (52)..(52): Xaa can be any naturally occurring amino acid
MASSMISSPAVTTVNRAGAGMAAPFTGLKSMAGFPSXKTNDDSTSIATNGGXVQCIHVWPPIGNTKFETPSDLPDLDDAQVAKEI

SEQ ID NO: 2906 - protein, 755 aa, Zea mays
  misc_feature (190)..(190): Xaa can be any naturally occurring amino acid
MRWWKRSSSPSCPASSSSASTPASPARASTPRLIGGWGSGPSSRRDGSGASNDPQPRLIRARRMRYVVDDLEVGVSALGVDSPARRDAAAGFALETVSSAPISWSPSNMEVAPARSSSTPVLLPHPLPLPGEGESPCRGPGRPLPPPVPRMLDGEGKGPAADAPGVLETGSQRMTPLLARRVAVQTLPKXHEHNDFRLNGTTCCQRRKAFKEKFQDKNCDETLNFRLNIPAKSAPSSGFSSPVQSPRRLSNVDFSSAAISIQDTNVWSARSLWSSDAMGSSPPCDSPDKFAGGQERSPLSSPLRSPVLKSRNPSAPPSPMHPKLFPENHVSRPDGNGSASFHPLPLPPASVSPKQTNASHQLVPKAEMPSVAGQWQKGKLLGSGTFGCVYEATNRHTGALCAMKEVNIIPDDAKSVESLKQLEQEIKFLSQFKHENIVQYYGSETIEDRFYIYLEYVHPGSIHKYVHQHCGSLTEAVIRNFTRHILKGLAFLHSQKIMHRDIKGANLLVDINGVVKLADFGMAKHLSTAAPNLSLKGTPYWMAPEVVRATLDKSAGYDLAVDIWSLGCTIIEMFTGKPPWSGLEGPAAMFKVLRTDPPIPDNLSPEGKDFLRCCFKRNPTERPTANKLLEHPFIQTLNHYSPHSVVHSFSGIKSPDTVHSSARDKVPWKSDSYMRGKHANGETSSARSSESLAYRLMTPLPNLGTNSLSPPPLSSASSSGSAAHTPNSMHFSVPYHQPSPLPKPNGKEAINLVSH

SEQ ID NO: 2907 - protein, 124 aa, Borrelia burgdorferi
MALNKEDILTWLEGAKTMEVVDLVTAIEEKFGVTAAVAAGVGGAVSVGSADSEEQTEFDVILMSFGDSKINVIKEVRAITGLGLGEAKALVEAAPKAIKEGLSKSDAEELKKKLEAVGAKVEVK

SEQ ID NO: 2908 - protein, 458 aa, Lycopersicon esculentum
MAKTNGFMGHDMLAPFTAAWMIDMGPLVIDKAEGSYVYGVNGKKYLDSLSGLWCTVLGGSEPRLIEAASKQLNKSAFYHSFWNRTTKPSLDLAKELINMFTANKMGKVFFTSSGSEANDTQVKLVWYYNNAIGRPNKKKIISRKNAYHGSTYMTAGLSGLPSLHLKFDLPPPYILHTDCPHYWNYHLPGETEEEYSTRLANNLENLILKEGPETVAAFIAEPVMGGAGVIIPPATYFEKIQAVLKKYDILFIADEVICGFGRLGTMFGCDKYNIKPDLVSIAKALSGGYIPIGAVLVSEEISKVIMSQSNQLGVFCHGFTYSGHPVACAVALEALKIYKEKNITEVVNKLSPKLQEGLKAFIDSPIIGEIRGTGLVLSTEFVDNKSPNDPFPPEWGVGTYFGSQCQKHGMLVSFSGDHVNMAPPFTLSLEELDEMISIYGKALKDTEKRVEELKSQKK

SEQ ID NO: 2909 - protein, 639 aa, Zea mays
MDKNYGELYNILGWGEEYFAVNTEGHLSVKPFGRWTEPGQEIDVHSVIVEALATQPNDSTSKSQFPMILRFPDVLKNRIETLHNAFNSAMESTGYTSRYQGVFPIKVNQNKHVVQDMVRFGQQWNYGLEAGSKPELLIAMSCLPVTEAEPKPYLICNGYKDADYIALALSARAMGLNPIIVLEMEEELAIVLDQYKKLQQKLPDDDAVRKKFEPVIGIRAKLLTKLPGHFGSTAGKHGKFGMLADQIYEVAETLGKEGKLHWLQLLHFHIGSMIPTTGKVYDAVSEAAGIYCNLVNEHGAKWLATLDCGGGLGVDYDGTRSGDSDMSVAYGIQEYASAVVQAVRLKCDYNGVAHPVVCTESGRAMASHHSMIILETLSAIPEPQDEDTSEQLLNRIQDLSYKQPRAPVGGATAAVYSHAADLKKHGIEMYKLGKKLGKRVVADANTVYNYHMNLSVFSLLPDFWGIGQLFPMMPVSRLNEEPTLKGTLVDITCDSDGKIENFISRENTLPLHLFEPSLGGYYVAVLVSGAYQEAIAGKHNLFSGPTLVRVNSSTTKDGGFEIERVDLGPAADEIIGSMRYSVEEDIITVIEKKAKGTEEEERVWAWEMVEPLMTKALTTMPYLNEYKVPEPEPEPEPIP

SEQ ID NO: 2910 - protein, 171 aa, Zea mays
MYPYTFRAAASSSSSGTALGFALGRIGGTTRSGGVAAPGLVVPAAGVARGRSVSSTPAGSAPVPGDQGVGMDQPKQQQQPKVPPRDAAGGENKRDDMHKHTRDVMTHSFGEGYSTRSDEEGFGGVYGGNDPVEHPGAEIHPSHSEYDTSQGSEVKEKEKARHLKDEKHATA

SEQ ID NO: 2911 - protein, 483 aa, Brucella melitensis 16M
MDMQEELMYPNLTLIVGGEERNKGSAGTLCLTDPADGRELTIAPRAGRAEALQAAAAEKGFAEWSALSALERSKIMRRAADIMRERADAAARIMSMEQGKPLSEARGEWLGSADLLDWFAEEGRRVYGRIVPSRAPNIQIQVLKHPIGPVAAFTPWNFPAWNTMQKVAPALGAGCSVVIKPASDTPGTAWLIGKCLLEAGLPPKAVSVIWGTTSELSDALIKAPEIRKVSLTGSTRVGRIVAAQAGEYLKKVTMELGGHGPVIVAADADLDHLIPLAVQWKFRNCGQVCVSPTRFIVEASIHDEFIRRFSEKARELKVGKGVEEGAQMGPLTSQNQLETVLSMVEDALTKGAKIETGGNRIGDTGNFYEPTILSGMTAEMLAMNEEPFGPLALVMRVHSLDEAIAESNRLPVGLGAYLFTSSMTTAHRVQNHLQAGMLGVNHFALALPETPFGGVRDSGFGSEGGLEGIEAYLTTMTVTTMMV

SEQ ID NO: 2912 - protein, 287 aa, Triticum aestivum
  misc_feature (116)..(116): Xaa can be any naturally occurring amino acid
MSAPPPPASSDDDGKPADEEGVEIREVWANNLEAEFAVIRDVVDDYPYIAMDTEFPGIVCRPLGSFRSNDEYNYATLKANVDMLSLIQLGLTLSDENGALPARGTGGRPCAWQFNXRGFDPRSDPANADSIDLLRNSGIDFDRFTTEGADTGHFAELLMSSGVVLNDAVYWVTFHAGYDFGYLLKILTCNSLPDTQAGFFKLMKIYFPTVYDIKHLMKFCNSLHGGLNKLAELLDVERVGESHQAGSDSLVTSCAFWKLKDSFFAGSTEKYAGVLYGLNAENGVSAH

SEQ ID NO: 2913 - protein, 484 aa, Rubrivivax gelatinosus PM1
MKQFLNFIDGEFVATDKTFANRAPVDNRVLGLVHEAGRAEVDAAVAAARGALKGEWGRMPVAKRVELLYAVADEINRRFDDFLAAEIADTGKPLSLASHIDIPRGAANFKVFADIIKNVPAETFEMATPDGGQALNYAVRTPVGVVGVVCPWNLPLLLMTWKVGPALACGNTVVVKPSEETPATATLLGEVMQKVGMPKGVYNVVHGFGPDSAGAFLTQHPDVDAITFTGETRTGEAIMAAAAKGVRPVSFELGGKNAGIVFADADFDKAVAGITRSAFENCGQVCLGTERVYVQRPIFEKFVQALKAKAEALKIGPSEEPGVGLGPLISAEHRDKVLSYYRKAVEQGATVVTGGGVPKMSGALAEGHWVQPTIWTGLPESAAVIREEIFGPCCHIAPFDTEEEAIALANATDYGLATTVWTQNLGTAHRVARQVEVGICWINSWFLRDLRTAFGGAKASGIGREGGVHSLEFYTELRNVCVKL

SEQ ID NO: 2914 - protein, 456 aa, Zea mays
  misc_feature (322)..(322): Xaa can be any naturally occurring amino acid
  misc_feature (358)..(358): Xaa can be any naturally occurring amino acid
SFNLILEGSITKSHRNLDLVTISAGAKGPRQPWHDLHCRIDGPAAYDVLTNFEQRWRKATKWRDRFRRVSHWKDDALIKLERISWILSPSPNVPNNHPSLWVSKEEDHENWHVQVFPRVRSGSLKGFPSDCKAASKLNLVCRKNLVIDKSIHTAYVRAIRSAQHFIYIENQYFLGSSYAWPSYVNSGADNLVPIELALKIASKIKAGERFAVYVVIPMWPEGVPTAASVQEILFFQAQTMEMMYKIIADELKATDNKDMHPEDYLNFFCLGNREEPPSNGSPESEKSTDKSAAALASKYRRFMIYVHAKGMIVDDEYVILGXQTSTRDPWLVLEILRSQWVHTSLIMHGLQRMDILTXQVYGYRTSLWAEHLGTVDDRFKDPSSLECVRFVNQIAVENWQRFTAEEMSTLQGHLLKYPVKVEADGKISPLSDQECFPDVGGKILGAPTSLPDSLTM

SEQ ID NO: 2915 - protein, 99 aa, Triticum aestivum
  misc_feature (66)..(66): Xaa can be any naturally occurring amino acid
  misc_feature (80)..(80): Xaa can be any naturally occurring amino acid
  misc_feature (84)..(84): Xaa can be any naturally occurring amino acid
HLHPCKKLEDIVPSSHNCDVPHVNRTEYQLIDISEDGFVSLLTDNGNTKDDLKLPTDETLLGQIKXMGFAEGKGPWVVVXSCPXMGEGRIIARPDIGHK

SEQ ID NO: 2916 - protein, 175 aa, Triticum aestivum
MAPTVMASSVTSVAPFQGLKSTAGLPVSRRSNGASLGSVSNGGRIRCLQVWPIDGIKKVEILSYLPPLSTEALLKQVDYLIRSKWVPCLEYSKVGFIFREHNASPGYYDGRYWTMWKLPMFGCTDATQVINEVEEVNKEYPDAYVRIIGFDNMRQVQCVSFIAFKPPGCEESGKA

SEQ ID NO: 2917 - protein, 393 aa, Burkholderia sp. TH2
MLSAEHRAIVKATVPLLESGGEALTTHFYKTMLAEYPSVRPLFNQAHQQSGDQPRALANAVLMYARHIDQLEQLGGLVSQIVNKHVALNILPEHYPIVGACLLRAIREVLGAEIATDAVIEAWGAAYQQLADLLIGLEENVYVEKETATGGWRGTRAFVVARKVKESDEITSFYLRPADGGELLEFHPGQYIGLKLIVDGEEIRRNYSLSAAANGREYRISVKREPNGKASNYLHDSVNEGATLDLLTPSGDFTLEHNDKPLVLISGGVGITPTLAMLNAALQTSRPIHFIHATRHGGVHAFRDHIDELAARHPQLKRFYVYEKPRHDDEAHHAEGYIDEARLIEWLPATRDVDVYFLGPKSFMQAVKRHLKTIGVPEKQSRYEFFGPASALD

SEQ ID NO: 2918 - protein, 330 aa, Yersinia pestis KIM
MPKVHAQTMRNDNMTDKLTSLRQITTVVADTGDIAAMKLYQPQDATTNPSIILNAAQIPEYRKLIDEAIAWAREQSSDHAQQIVDATDKLAVNIGLEILKLIPGRISTEVDARLSYDTVASVAKAKRLIKLYNEAGISNDRILIKLASTWQGIRAAEQLEKEGINCNLTLLFSFAQARACAEAGVFLISPFVGRILDWYKANGDQKEFAPSEDPGVVSVTEIYQYYKKHGYKTVVMGASFRNLGEIIELAGCDRLTIAPSLLKELAESEGPVERKLAYTGEIQAKPAPLTEAEFYWQHNQDPMAVDKLADGIRKFAIDQGKLEKMISDLL

SEQ ID NO: 2919 - protein, 174 aa, Triticum aestivum
  misc_feature (121)..(121): Xaa can be any naturally occurring amino acid
MRTAAAAPLLSAAGEIPPVAPAGSQWASWEVDDWEFADWRSESASEADVAVVGGPRLVFAPPSREEAEEATAELREAIDRVYFKETPVEVVKEHDQELSKLGADALIPAMPGHVVQAFTLXHSSLEAQSVVASLASDKNVWDPVLKNERVMEFSKSPQQTLVNIFLRAPTLLTQ

SEQ ID NO: 2920 - protein, 384 aa, Zea mays
DSVLFDHDLESYALYDTNGREVPQELVEKIGKVFETILEETGKLREGTNEDMSIAKAIAIVMDRNPQLRQEGIAHEVLQWYLCRMEGWFATDADSISLQGWDQEVLLPGGHGLMVRGYRPVINTLAKGLDIRLNHKVVEIVRHRNRVEVTVSSGQTFVADAAVVTVPLGVLKAKTIRFEPRLPEWKEEAIRELTVGVENKIVLHFGQVFWPNVEFIGVVSSSTYGCSYFLNLHKATGHPVLVYMPAGRLARDIEKMSDEAAAQFAFSQLKKILPNAAEPINYLVSRWGSDENTLGSYTFDGVNKPRDLYEKLRIPVDNLFFAGEATSVKYTGTVHGAFSTGVMAAEECKMRVLERFRELDMLEMCHPAMGEDSPVSVPLLISRL

SEQ ID NO: 2921 - protein, 198 aa, Pyrococcus horikoshii OT3
MALITRKSFILVGVPPIMKSLIPIVLATLVILGMGCIGGGEEKMSLKVSSVFGNNEFIPAKYTCEGVDINPPLKIEGLSDNVKSLVIIVDDPDAPMGTFTHWIAWNIPPVTEIPEGIPKQGEVDKPIHIIQGRNDFGRIGYNGPCPPRGHGVHHYHFKVYALDTTLNLKPGASRKELEKAMEGHVIQYGELVGLYERK

SEQ ID NO: 2922 - protein, 213 aa, Triticum aestivum
MGVEVCVKAAVGHPDTLGDCPFSQRVLLTLEEKKVPYEMKLIDVQNKPDWFLKISPEGKVPVFNGGDGKWIPDSDVITQVIEEKYPTPSLVTPPEYASVGSKIFSCFITFLKSKDPNDGSEKALLTELQALEEHLKAHGPFINGQNISAADLSLAPKLYHLQVALEHFKGWKIPEDLTNVHAYTEALFSRESFIKTKAAKEHLIAGWAPKVNA

SEQ ID NO: 2923 - protein, 193 aa, Capsicum chinense
MDGLYWIKSTQDEWVRKYSDLSNVYLFGSSCGGNIAYHAGLRVAAGAYKELEPVKIKGLILHQPYFSGKNRTESEEKLKDDQLLPLHAIDKMFDLSLPKGTLDHDHEYSNPFLNGGSKHLDDVIAQGWKILVTGVSGDPLVDNARNFANFMEEKGIKTFKLFGDGYHAIEGFEPSKAAALIGAPKDFICATTN

SEQ ID NO: 2924 - protein, 494 aa, Bordetella bronchiseptica RB50
MTIGARLQHVIDGGPWPSIHCNGRVGSLIGGDIVPGNGAMIEVLDASTGEPLFRYLDGSDGLVRRAAESAAAAQVRWAVMPADGRAAVLLAVSAAIRANLARLAELEAVTAARPIRDCRAQVDRVADMFQYYAGWCDKFYGDVIPVPNQYLNYTMREPIGVLLHIVPWNSPLFMAAWHLAPSLATGNAVLLKPSELTPLSAIALVRIAESAGLPTGLVAVLAGLGHTMGNAAIEHPLVRKIGFVGSPETGAKVAGAAARVVKPCVLELGGKSANIVFPDADLDQLCEATVKSMFIGAGQTCVAPSRLIVHRSLEQQVVERLLDAASTLEMGLPELDSTAIGPIHNRRQFDHVNRMIEQGRRDGARCRQAGNAVPQRGLYVPPTIFTGVARDGALARQEVFGPVMACLPFDTEQEAIDLANDTEFGLAGAVWTHDVKRAHRVAAAINAGTVWINTYKSTDIRSPFGGIGLSGYGRSSGHEALQEYTRLKSIWVAT

SEQ ID NO: 2925 - protein, 261 aa, Persea americana
QVHPNSYALVVSTENMTLNWYSGNNRAMLVTNCLFRMGGAAILLSNRWSDRRRSKYQLVHTVRTHIGADDRAFNCVSQEEDEAGKVGVSLSKDLMVIAGEALKSNITTLGPMVLPMSEQLLFFATLAARKVFKMKIKPYIPDFKLAFEHFCIHAGGRAVLDELQKNLELSDWQMEPSRMTLYRFGNTSSSSLWYELGYSEAKGRVMKGDRMWQIAFGSGFKCNSAVWRALRSVNPAKEKSPWMDDIDSFPVHVPKVTTIQS

SEQ ID NO: 2926 - protein, 443 aa, Ralstonia eutropha JMP134
MDAAKTVIPDLDALWMPFTANRQYKAAPRLLASASGMYYTTHDGRQILDGCAGLWCVAAGHCRKEIAEAVARQAATLDYAPPFQMGHPLSFEAATKVAAIMPQGLDRIFFTNSGSESVDTALKIALAYHRARGEGQRTRFIGRERGYHGVGFGGMAVGGIGPNRKAFSANLMPGTDHLPATLNIAEAAFSKGQPTWGAHLADELERIVALHDPSTIAAVIVEPLAGSAGVLVPPVGYLDKLREITTKHGILLIFDEVITAFGRLGTATAAERFKVTPDLITMAKAINNAAVPMGAVAVRREVHDTVVNSAAPGAIELAHGYTYSGHPLAAAAAIATLDLYQRENLFGRAAELSPVFEAAVHSVRSAPHVKDIRNLGMVAGIELEPRPGQPGARAYEAFLKCLERGVLVRYTGDILAFSPPLIISEAQIAELFDTVKQALQEVQ

SEQ ID NO: 2927 - protein, 381 aa, Zea mays
  misc_feature (47)..(47): Xaa can be any naturally occurring amino acid
AGRNKYDAEEAISLVEALAVQLTQREGELIYEKAEVKKLANFLKQAXLKNARKVAEEERALALAEIEKARAAIEKVEKAWRVLSLAEPPCGIIPPARHDLSSREKSEIEELRKEVREARRIKMLHQPSKVMDMEFELQALRTLISEKTQLCNQLKKELAMIKRLEDDSSGLFELEGSNTLGSQLCIIPRVDGASNITNCPIQWYRVISGGTRELISGATKFMYAPEPFDVGRLLQAEIVLNADKIIVQTDGPVDNAAGLERYVDSLMKRTDIEFNVVVTQMNGKDYSSNSVHVFHIGKLRIKLRKGWSTKARESYSTTMKLCGSRGGGNAAARAVFWHPRKGSSYTLAFETDRDRNAAIMIARKFASNCNIALAGPGDQGT

SEQ ID NO: 2928 - protein, 362 aa, Saccharomyces cerevisiae
MTTAVRLLPSLGRTAHKRSLYLFSAAAAAAAAAATFAYSQSHKRSSSSPGGGSNHGWNNWGKPAALASTTPLVHVASVEKGRSYEDFQKVYNAIALKLREDDEYDNYIGYGPVLVRLAWHISGTWDKHDNTGGSYGGTYRFKKEFNDPSNAGLQNGFKFLEPIHKEFPWISSGDLFSLGGVTAVQEMQGPKIPWRCGRVDTPEDTTPDNGRLPDADKDAGYVRTFFQRLNMNDREVVALMGAHALGKTHLKNSGYEGPWGAANNVFTNEFYLNLLNEDWKLEKNDANNEQWDSKSGYMMLPTDYSLIQDPKYLSIVKEYANDQDKFFKDFSKAFEKLLENGITFPKDAPSPFIFKTLEEQGL

SEQ ID NO: 2929 - protein, 156 aa, Corynebacterium diphtheriae NCTC 13129
MSILDTEVTLINGEKASMDQWAGHCLLIVNTASECGYTPQLETLEELYEDYAMRGFFVIGVPCNQFGEEEPGKDAQVARRYEEKFGVRFPLLAKSDVNGPNTIELYKKLKGDGPDIEWNFEKFIVAPSGEVVGRFAPSLDPDDMKIINVLEEYLPI

SEQ ID NO: 2930 - protein, 424 aa, Saccharomyces cerevisiae
MANPTTGKSSIRAKLSNSSLSNLFKKNKNKRQREETEEQDNEDKDESKNQDENKDTQLTPRKRRRLTKEFEEKEARYTNELPKELRKYRPGKGFRFNLPPTDRPIIYADGVFDLFHLGHMKQLEQCKKAFPNVTLIVGVPSDKITHKLKGLTVLTDKQRCETLTHCRWVDEVVPNAPWCVTPEFLLEHKIDHVAHDDIPYVSADSDDIYKPIKEMGKFLTTQRTNGVSTSDIITKIIRDYDKYLMRNFARGATRQELNVSWLKKNELEFKKHINEFRSYFKKNQTNLNNASRDLYFEVREILLKKTLGKKLYSKLIGNELKKQNQRQRKQNFLDDPFTRKLIREASPATEFANEFTGENSTAKSPDDNGNLFSQEDDEDTNSNNTNTNSDSDSNTNSTPPSEDDDDNDRLTLENLTQKKKQSAN

SEQ ID NO: 2931 - protein, 476 aa, Bacillus cereus ATCC 14579
MQNKIIVMFQKDFRLYDNPALFEAVQSGEVLPVYIQDETFSIGSASKWWLHHAVIDVKKQLEALGSTLIIRKGRTEEEILSLIEQLDITAVYWNICYDPDRLQSNQKMKMMLEDKGIICKEFNSHLLLEPWIIKKKDNTEYKVFTPFYNAFQKQVIPKPFSRVQSIKWGNSLPASLSVSELQLLPIIPWTSHMEVIWDPTEEGAYKTFKKFFSSKLVSYSEGRDFPGQNVHSMLAPYLSFGQISVKLMFHYLINKSTERQCSLFEKQVNSFIRQLIWREFSYYLLYHYPFTVYKPLNKSFENFPWDKEEELLRVWQKGKTGYPFIDAGMRELWQTGFMHNRARMAVASFLVKHLLIPWQEGAKWFMDTLLDADIANNTMGWQWVAGSGADASPYFRIFNPITQGEKFDKNGEYIRRWVPELRDIPNKYIHKPWEAPEHILQKSNIKLGDTYPFPIVDHKAARERALCAYKSMKEFV

SEQ ID NO: 2932 - protein, 158 aa, Guillardia theta
MDQEQYNIINDNGASETTPIKAGNCKKGGLLVIKGNPCKIIDISTSKTGKHGHAKAIITAVDIFTGKKYQESAPTSHNLDQPNLTKTEYQLIHIEEDGFVSLMDEDGNIREDLSLDLKNDEIHVKIKNEFDQSKEIVVTVMKCLQKEKIISFKENNKI

SEQ ID NO: 2933 - protein, 433 aa, Neisseria meningitidis Z2491
MPSEHQHISSLLDFDRTHLLHPYTSMTDPLPVYPVKRAEGVFIELADGTRLIDGMSSWWCAIHGYNHPVLNQVVETQIKQMAHVMFGGLTHESAVELGKLLVGILPQGLDRIFYADSGSVSVEVALKMAVQYRQARGLMAKQNIATVRRGYHGDTWNAMSVCDPETGMHHIFGSTLPQRYFVDNPKSRFDDEWDGADLQPVRALFEAHHADIAAFILEPVVQGAGGMYFYHPQYLRGLRDLCDEFDIVLIFDEIATGFGRTGKMFACEHAEVVPDIMCIGKGLSGGYMTLAAAITSQKVTETISRGEAGVFMHGPTFMANPLACAVACASVKLLLSQDWQANIRRIESILKGRLKAAWDIRGVKDVRVLGAIGVIELDKGVDMARFQADCVAQGIWVRPFGRLVYLMPPYIISDGLLTELADKTVQILKEHSK

SEQ ID NO: 2934 - protein, 333 aa, Saccharomyces bayanus
MSEHEDKKQKVGGSSLDQLKNAGTHVVADSGDFESISKYEPQDSTTNPSLILAASKLEKYEKLIDAAVEFGRKHGKTDHEKVENAMDKILVEFGSQILKIVPGRVSTEVDARLSFDKKATVKKALHIIKLYKDMGVPKERVLIKIASTWEGIQAAKELEAKHGIHCNMTLLFSFTQAVACAEANVTLISPFVGRIMDFYKERSGEDYTGETDPGVLSVRKIYSYYKRHGYKTEVMAASFRNLDELKALAGIDDMTLPLNLLQQLHESTDPIENKLNAETAKQEGVEKVSFINDEPHFRYVFNEDQMATEKLSDGIRKFSVDIEALYELVEKKM

SEQ ID NO: 2935 - protein, 335 aa, Saccharomyces bayanus
MSEPAQKKQKVANNSLEQLKAAGTVVVADTGDFNSIAKFQPQDSTTNPSLILAAAKQPAHAKLIDVAVAYGKKHGKTTAEQVESAVDRLLVEFGKEILKIVPGRVSTEVDARLSFDTQATIDKARHIIKLYEQEGVSRERVLIKIASTWEGIQAAKELEEKDGIHCNLTLLFSFGQAVACAEAQVTLISPFVGRILDWYKASTGKEYAGETDPGVVSVKSIYNYYKKYGYKTIVMGASFRSTDEIKNLAGVDYLTISPQLLDTLMNSTEPFPRVLDPATAKKEAGDKISYINDEPKFRFDLNEDAMATEKLSEGIRKFSADIVTLFDLIEKKVTA

SEQ ID NO: 2936 - protein, 117 aa, Zea mays
  misc_feature (71)..(71): Xaa can be any naturally occurring amino acid
SVLPAPDGPYAPVPPNGVNACPGAAHASAHASAHASSLSSAVPPRSPNLSPRPLPVPHHGHGSAKVPLWKXPLSPSKWKEEHFVLASLSMWGALFYGGFKFFGGKKEDKIEVASGQT

SEQ ID NO: 2937 - protein, 285 aa, Oceanobacillus iheyensis HTE831
MAIQWFPGHMAKAKREVEEKLKLVDFVIELVDARAPLSSQNPMLKQVLNNKPKLIVLMKKDLADQEVTKRWVDKFNEDGTQAIDVNVNHKGDIQKVIQQAKLLGQDKMEKLKRKGIQPRPARAMIVGIPNVGKSTLINRLANKKIAKTGDRPGITKQQLWIKVKKDFELLDTPGILWPKFEEEVVGYRLAAIGTIKDQLLPLPDVTAFIIRYMSEHYPNQLKDRYQLEEIEDMVEVFESIGRIRGALESGGQVNYDKVADIVIRDLRVGRLGTITLEQPEDSSNS

SEQ ID NO: 2938 - protein, 109 aa, Brassica napus
MSGVWVFKNGVIRLVENPNQSGGVTHGRRNVLVYLPTGEVVSSYSSLEQILMSLGWERYFSGDSDLIQYHKRSSIDLISLPRDFSKFNSVYMYDIVIKNPNTFHVREFH

SEQ ID NO: 2939 - protein, 483 aa, Pseudomonas stutzeri
MNTKLFINNVWVNSSDQQTFERKHPVSGEVMTECANSTVMDALKAAQAAQEAFQTWKTVGPSERRRLLLRVAEVMESKTPEFIEVMAKEVGASALWAGFNVQMSANVFREAASLATQIQGETIPTDKSDTLSMTLRQPVGPILSIVPWNGTAVLAARAIAYPLVCGNAVVFKGSEFSPATHALITQRVQEAGLPAGVLNYLNSSPDRSPEIADALISAKEIRRINFTGSTRVGSIIAQKAAQHLKRCLLELGGKSPLIVLDDADIDAAVKAAVFGSFLVQGQICMSTERLVVDEKIADEFAAKFAEKAKRLSAGDPCVTGDCIIGPMVSPNSGERINGLFKDAIDKGATVACGGMAQGAVMPATILDHVKSNMRIYDEETFGPITVVIRCSGEAEAIRIASDSAYGLSSGVFGRDINRALRVGMSIEYGSVHINGSTVQSEAQAPYGGTKNTGYGRFDGRAVIDEFTELKWLTIEPFEQQYPF

SEQ ID NO: 2940 - protein, 370 aa, Clarkia breweri
MGSTGNAETQLTPTHVSDEEANLFAMQLASASVLPMVLKAAIELDVLEIMAKSIPHGSGAYISPAEIAAQLPTTNPDAPVMLDRVLRLLASYSVVTCSLRELPDGKVERLYGLAPVCKFLTKNEDGVSLAPLCLMNQDKVLMESWYYLKDAILDGGIPFNKAYGMTAFEYHGTDPRFNKVFNRGMSDHSTITMKKIFEMYTGFEALNTIVDVGGGTGAVLSMIVAKYPSIKGINFDLPHVIEDAPIYPGVEHVGGDMFVSVPKGDAIFMKWICHDWSDEHCLKFLKNCYAALPEHGKVIVAECILPLSPDPSLATKGVIHIDAIMLAHNPGGKERTEKEFEALAIGAGFKGFKVACCAFNTYVMEFLKTA

SEQ ID NO: 2941 - protein, 437 aa, Glycine max
MKVAKGRILVGKYELGKTIGEGSFAKVKFARNVQNGNYVAIKILDRKHVLRLNMMEQLMKEISTMKLINHPNVVRILEVLASKTKIYIVLEFVDGGELFDKIAANGRLKEDEARNYFQQLINAVDYCHSRGVYHRDLKPENLLDSNGVLKVSDFGLSTYSQKEDELLHTACGTPNYVAPEVLNDRGYVGSTSDIWSCGVILFVLMAGYLPFDEPTHMALYKKIGRAEFSCPSWFSPQAKKLLKHILDPNPLTRIKIPELLEDEWFKKGYKPTSFTEEEDLNVDDVVVAFNESNENLVTERKEKPVSMNAFELICRSQSFNLDSLFEKQTGQVKQETSFTSQCPANEIMFKIEEAAKPLGFNVYKRNYKMKLQGDKSGRKGHLSVATEVFEVAPSVHMVELRKTGGDTLEFHKFYKIFSSGLQDIVWHDTEGKKNMKN

SEQ ID NO: 2942 - protein, 168 aa, Triticum aestivum
  misc_feature (158)..(158): Xaa can be any naturally occurring amino acid
MAAASSATSVHDFTVKDASGKDVDLSVYKGKVLLIVNVASQCGLTNSNYTELSQLYPKYKDQGFEILAFPCNQFGGQEPGTNDEIVQFACTRFKAEYPIFDKVDVNGSNVSPLYKFLKSSKGGLFGDSIKWNFSKFLVDKEGHVVDRYAPTTSPLSIXKDIKKLLGSS

SEQ ID NO: 2943 - protein, 499 aa, Mesorhizobium sp. BNC1
MKSLEGSRQELFIGGRFRAPSSGRFIPSFDPTTGEVWYEFAEADAADVDAAVTSATKAFHNPAWRRMTQTDRGKLIRRLAELVLEHADELALMETRDNGKLIKEMMAQMRAMPDSYIYFAGMADKLQGDTIPVNKLDSLNYSQREPLGVVGMITPWNSPLMLLTGTLAPCLAIGNTVVVKPSEHATASTLALAELVVEAGIPEGVVNVVTGTGAVTGEALTRHPGLAKIVFTGSTATGRRIAANAAENLIPCQMELGGKSPHVVFSDVDIERAVNGVVSGIFAAAGQTCVAGSRCFVEANIYDRFLEALVERTRHIRVGHPMEESTDVGPLAMKSQLEKIEGYVASGARDGAKIAVGGRRPKDGDLARGWYFEPTVMADARNDMKFMRDELFAPVVGVMPFRDEAEMITLANDTEYGLASGIWTRDIDRAMRFASQIDAGTVWINTYRSAAYMSANGGFKNSGYGRRGGFDVMREFSRSKNVLIDYSGAMQDPFVIRLK

SEQ ID NO: 2944 - protein, 439 aa, Pyrococcus horikoshii OT3
MIREKALEFHKNNFPGNGKIEVIPKVSLESREELTLAYTPGVAEPCKEIARDPGKVYEYTSKGNLVAVVSDGSRILGLGNIGPLAGLPVMEGKALLFKRFGGVDAFPIMIKEQEPNKFIDIVKAIAPTFGGINLEDIASPKCFYILERLREELDIPVFHDDQQGTAAVVLAGLLNALKVVGKKISEITLALFGAGAAGFATLRILTEAGVKPENVRVVELVNGKPRILTSDLDLEKLFPYRGWLLKKTNGENIEGGPQEALKDADVLISFTRPGPGVIKPQWIEKMNEDAIVFPLANPVPEILPEEAKKAGARIVATGRSDYPNQINNLLGFPGIFRGALDVRARTITDSMIIAAAKAIASIVEEPSEENIIPSPLNPIVYAREARAVAEEAMKEGVARTKVKGEWVEEHTIRLIEFYENVIAPINKKRREYSKAITRA

SEQ ID NO: 2945 - protein, 484 aa, Burkholderia cepacia R18194
MTAEYTLQHRIAGEACDAAQGEWFEKFEPCTGHLLARVAAGTGADVDRAVRAARAEFDGGHWSRLPGAARAKLLHRLADLLEHDAERFVELLVREQGRPALEVRMMDLPMSIDTLRYFAGWADKLEGRQIPTGGFMGRPTVNYTVREAVGVAGLIVPWNAPLMIACWKLAPALAAGCTVVIKPSEDAPLAVGALADLAAQAGFPPGVVNLVHGIGASVGAALVNHPGVDKISFTGSTEVGRTIAREAGARFKRLTLELGGKAPQIIFDDANLEQAIAGVAMGLFVNQGQTCAAGTRVLVQRRHYDDVVGALAHAARSVKVGTPFDPDTQMGALISARHADRVKTHIAAALRDGATMVAGDEPVPSQGFFVRPTVFANVDPAMRIARDEVFGPVGTIIPFDTEDEAVALANDTVYALSASLWTRDLTTAHRTAARLRVGAVAVNAWSPLDARLPWGGFKESGVGRDLSQSGLDAYLEEKVVTIAM

SEQ ID NO: 2946 - protein, 362 aa, Rickettsia sp. RDa420
WQDVIDISKVYSEADCFTYDPGFMSTASCRSTITYIDGDQGILRHRGYDIKDLAEKSDFLEVAYLLIYGELPNSKQYNDFTKKVAHHALVNERLHYLFQTFCSSSHPMAIMLAAVGSLSAFYPDLLNFFKEADYELTAIRMIAKIPTIAAMSYKYSIGQPFVYPDNSIDFTENFLHMMFATPCEKYKVNPVIKNALNKIFILHADHEQNASTSTVRIAGSSGANPFACVSTGIASLWGPAHGGANEAVINMLKEIGSVENIPKYIAKAKDKNDNFRLMGFGHRVYKNYDPRAAVLKETCKEVLKELGQLDNNPLLQIAIELEAIALKDEYFIERKLYPNVDFYSGIIYKAMGIPPQMFTVLF

SEQ ID NO: 2947 - protein, 537 aa, Glycine max
  misc_feature (127)..(127): Xaa can be any naturally occurring amino acid
TRPQKFGWVSLVSHLRLSVLLLSVSLGNSASLQENFVQCLNLNSDRTFPFNPLIYTPKSPSFTSVLDSSGKNQRLLVPSTPKPKFIFTPTRDSHVQAAVICSKKLGIHLRVRSGGHDFEGVSYVSEXESPFIVVDLIKLRDINVDIKSNTAWVQAGATTGELYYRIYEKSSLHGFPAGICTSLGIGGHITGGAYGSMMRKYGLGVDNVLDAKIVDANGRILDREAMGEDLFWAIRGGGGGSFGILLWWKIKLVPVPPTVTVFTVKKTLEQGATKILHRWQEVAPYIDENLFIRVIIQPSSDARNKTQRTIATSYNALFLGGARTLLQVMKTSFPELGLTIKDCLETSWIKSVLYIAGFPSDTPPEVLLKGKSTFKFFFKGKSDFVREPIPETGLEGLWQRLLVEDSPLMIWNPYGGRMSQFSESDTPFPYRNGTLYKIQYLSLWQEGDKNAAKHIDWIRKLYNYMGPYVSSLPREAYVNYRDLDLGINTKNSTSYIQASAWGYRYYKNNFDRLVKIKTKVDPQNVFRHEQSIPPLPK

SEQ ID NO: 2948 - protein, 235 aa, Zea mays
  misc_feature (200)..(200): Xaa can be any naturally occurring amino acid
MKTSVVVAALAAVLFAAQSYASLAGASGPRVIIVGAGMSGISAGKTLWEAGVRDLLILEATGRVGGRMHKHNFGGINVEIGANWVEGLGGDQLNPIWPLVNSTLKLRNFYSDFDSVVGNVYKENGGGLYDEEYVQKRMDRAYEVEELGANLTKKMHPSGRDDISVLAMQRLFNHQPNGPTTPVDMALDYFIYDYEFAEPXRVTSLQNTQPTPTNADFGEDNYFAADQRGYESIIH

SEQ ID NO: 2949 - protein, 369 aa, Rickettsia sp. RDla440
DSEFAELKIRGKIFKLPILKASIGEDVIDISRVSAEADCFTYDPGFMSTASCQSTITYIDGDKGILRHRGYDIKDLAEKSDFLEVAYLLIYGELPSGEQYNNFTKQVAHHSLVNERLHYLFQTFCSSSHPMAIMLAAVGSLSAFYPDLLNFKEADYELTAIRMIAKIPTIAAMSYKYSIGQPFIYPDNSLDFTENFLHMMFATPCTKYKVNPIIKNALNKIFILHADHEQNASTSTVRIAGSSGANPFACISTGIASLWGPAHGGANEAVINMLKEIGSFEYIPKYIAKAKDKNDPFRLMGFGHRVYKNYDPRAAVLKETCKEVLKELGQLDNNPLLQIAIELEAIALKDEYFIERKLYPNVDFYSGII

SEQ ID NO: 2950 - protein, 313 aa, Neisseria meningitidis Z2491
MAIQWFPGHMNKAKKAIAERAKSVDMVIEMLDARMPASSENPLLAQLSKGKPKLKILNKQDLADPERTKIWLEHYNSRPDTCAIALDSSETGAHGKITQACRAMIPHRQGIDKPLRVLICGIPNVGKSTLINGMIGKKSAKTGNEPGITKAEQRLFLADDFWLYDTPGMLWPKIIVEESGYNLAAGGSVGRNALDEEEVALELLDYLRRHYLPMLQERYQADKDPSSHWDENVWLEWIAKKRGAVLSGGRINYQKAAENILTDFREGKIGRITLETPNQWETWLKKARQKEAELKAIREARKAERKGQKPSEA

SEQ ID NO: 2951 - protein, 378 aa, Leuconostoc mesenteroides
MVNMDEVLSIHQAHTGVLDIESCFDITTPTDLSEAYTPGVAGLAKLIAKDTSKKRDYTMSGKLIPVITDGSAVLGLGNIGPAAGLPIVEGKALIYKNFANVDALPMALNQMSVDQFVDTVKAIAPSFAGIHLEDISAPKVFEIERRLSNELDIPVYHDDQTGTAIVVLAGIMNAAKVVGKNVHDLKIVVNGIGRCTAGVATTKILIAAGICNITLVDINGVINLGDANSNSYQQELVREVTQVDGKTLDDVIANQDVFIGLSDANVLSGKQVARMNENPIIFALANPVPEISPDDAKKAGAAVIATGSSQWPNQVNNVLVFPGLFKGLLESGIKHVDMALQLNVAHALANMISEPDATHIVPAVFDDDVGELGRNSSS

SEQ ID NO: 2952 - protein, 345 aa, Bacillus sp. KSM-K16
MRAIEVRKPGDIHVVEVQKPELETDKDVLVKVQAVGICGSDMHIYHGSNPFTVYPRIIGHEVGGIVEEVGSGVHGLRRGDRVALEPISSCGVCYACKKGRPNVCAKLEVFGVHRDGGMREWMVAPEANWHKVNGDLPFEAAALVEPMTIGAQAAYRGNIEPGDTVFIMGAGPTGIACLIMAKQKGATVFISDLQANRLDYAKQVGADFTIHLPHEKPEAVLFEKTDGEFANVVIDAVGTSTTFAEAVKLASVAGTVVTLGFNETPSDIPSLLLTKKELTVAGSRLQTNQFPDVIRQVNEQKVDPASIISHRFDFDEVKKAIELLEKEPAHVRKAVLIFEREDESK

SEQ ID NO: 2953 - protein, 377 aa, Zea mays
IGYLEAGQVHEVMATRSKIYLALELVRGGELFARIVRAGRVKEDVARRYFRQLIHAVDFCHARGVYHRDLKLENLLLDDAGNLKVVDFGLSALADHARSDGLLHTLCGTPGYVAPEVFRNKGYDGAKADIWSCGVILYVLLAGSLPFPDDNVAAMFRKMSRGDYRCPPWLSTEARRLIPKLLDPDPDTRITIAQLVETPWFNKPSVSRSVRAAAGATEPPAEPASSAKDGGDKDEPPETMNAFHLISLSAGFDLSPLFDVEGGPARGPREGGMRFATREPASGVVSRLEEVAARGGGRMRVTKSGARGVRLEGAERGGRKGRLAVAADIFCVAPSVLVVDVKKDGGDSLEYRSFCSEELRPALKDIVWAADPQPAVV

SEQ ID NO: 2954 - protein, 510 aa, Callistephus chinensis
MSILSLLVYFCISLLVIIALVNMFITRHTNRLPPGPAPWPVVGNLPHLGAIPHHTLAALATKYGPLVYLRLGFVHVVVASSPSVAAQFLKVHDLKFASRPPNSGAKHIAYNYQDMVFAPYGPQWTMFRKICKDHLFSSKALDDFRHVRQEEVAILARGLAGAGRSKVNLGQQLNMCTANTLARMMLDKRVFGNESGGDDPKANEFKEMATELMFLAGQFNIGDYIPVLDWLDLQGIVKKMKKLHTRFDKFLDVILDEHKVIASGHIDMLSTLISLKDDTSVDGRKPSDIEIKALLLELFVAGTDTSSNTVEWAIAELIRQPHLLKRAQEEMDSVVGQNRLVTEMDLSQLTFLQAIVKEAFRLHPSTPLSLPRIASESCEVDGYYIPKGSTLLVNIWAIGRHPEVWTDPLEFRPTRFLPGGEKPGIVVKVNDFEVLPFGAGRRICAGMSLALRTVQLLMGTLVQAFDWELANGIKPEKLNMDEAFGLSVQRAEPLVVHPRPRLPPHVYKSG

SEQ ID NO: 2955 - protein, 215 aa, Clostridium perfringens
MKIFIDTANVEEIRKASKLGVLAGVTTNPSLIAKEGRDIKEVIEEICSIVDGPISAEVMALECDEMVREGRELAKIHKNIVIKIPMCEEGLKAVKVLASEGIRTNVTLIFSPLQALLAARAGASFVSPFLGRLDDIGNPGIEIVTQIAEMFALHGIDTEIISASVRNPMHVLDSAMAGSHIATIPYNVILQMVKHPLTDAGMKKFIEDYNKAFNK

SEQ ID NO: 2956 - protein, 221 aa, Triticum aestivum
MTRASTLDFRRKTQGQNNWSGPLRPVNVIRNKFPTYKNGSNGIVIKFADEPETPSLKESVAKETADLLDRRQRLSVRELAMKFEKGLSTATLLSNEVKCKQVALLERDILLKNLKSVLESLRGQVAGKYKDEFEESVSMVDILAVQLSKRENELRQQKTEVTRIATSLKLASEDARRIVDEERTNARAEIENARAAVQRVQKVLQEKENSSQRIGKQVDID

SEQ ID NO: 2957 - protein, 117 aa, Glycine max
  misc_feature (73)..(73): Xaa can be any naturally occurring amino acid
MAAENVVEFTDLPVKRPREEEEGTNGVSNDAVSALPNDPQYPGISAVIPGEAHSLKMEKILFQGKSDYQNVMXFQSSTYGKVLVLDGVIQLTERDECAYQEMITHLPLCSIPNPKKV

SEQ ID NO: 2958 - protein, 511 aa, Lycianthes rantonnei
MVLLLISELCASAIIFIIVHIIISKLIATGWGRRQRLPPGPMGWPVIGALPLLGTMPHVALAKMAKKYGPIMYLKVGTCGMVVASTPNAAKAFLKTLDINFSNRPPNAGATHLAYDAQDMVFAHYGPRWKLLRKLSNLHMLGGKALEDWANVRANELGHMLKSMFDASRVGGRVVVADMLTFAMANMIGQVILSKRVFVEKGAEVNKFKDMVVELMTVAGYFNIGDFIPQLAWMDLQGIEKGMKCLHKKFDDLLTKMFDEHKATTNERKGKPDFLDVVMANRDNSEGERLSTNNIKALLLNLFTAGTDTSSSAIEWALAEMMKNPQILKKVQQEMDQIIGKNRRLIESDIPNLPYLRAVCKETFRKHPSTPLNLPRISNEPCMVDGYYIPKNIRLSVNIWAIGRDPDVWENPLEFNPERFLSGKNVKIDPRGNDFELIPFGAGRRICAGTRMGIVMVEYILGTLVHSFDWKFSNDVKEINMEESFGLALQKAVPLEAMVTPRLPFDVYYTN

SEQ ID NO: 2959 - protein, 80 aa, Glycine max
MLEFNFMQHILYRQKEQFSDGVGYGWIDGLKAHAEKHVTDRMMLNAANIFPFNTPTTKEAYYYRMIFERFFPQVNLINHA

SEQ ID NO: 2960 - protein, 419 aa, Pseudomonas syringae pv. phaseolicola
MRAISNTPRLYWPPYTPMKMDDCRPSIVRGEGVYLYDDTGRRYIDGISGSYNHCLGHSHFGLIEAVKEQVDTLVHACNISSNTVLPEALAERISGKLVKARLVHTFLVMSGSEGVEAALKMAWQYQINRGCPQRTKVVAIDGAYHGCTLGAMIATRREFINEGAAPLLAAHAIAMPIPSGLEDISHWRALLAEQETTIAAIVIEPVMAMAGTRQFPDGFLRELSALAKKYDIPFICDEVYCGVGRTGAFCESINQGASPDIVILSKCLGGGFPITAVVTTADMTDSFAAQSMPLFRHGHTQSGNLLGCRAALFILDYLDSHRSYEVVAAGGSRLLQGIRENLQTTNSIVSVQGKGLMLSITFETSQACTRAQLAVRRQGVIVGAADRHLKLAPSFLISEPEADELTDRLVSSIRSVSQQ

SEQ ID NO: 2961 - protein, 390 aa, Chlorobium tepidum TLS
MHIGVLTGGGDAPGINACIKTIVTISTEKGYRVTGIRRGWNGLLAFDPDDPASRTEHIVDLDSELVRRIDRTGGTLLHTSRINPGNLKKKEIPPFLRNSPHLLRTGLHHSGNFDLTDHVLRSIDALGLDVIIVIGGDDTIGYADHLAKAAVKVIGVPKTMDNDVYGSDYCIGFGTAVTRSVQYIHQLRTSSGSHERITIVELFGRSTGETCLVSAYLAGVDRALIPEVPFDPETLADYVIQDKAANPSQYAMIAISEGARMIGSKMIEYCGRRYDEDGHEPAGIGQLTRETISMLTGQDVICQQLGYLMRSGIPDALDLMVGFNFAQLAVELIAEGTFGVMVALQKGIYTCLPLAEVSSNTKQVDISELYDPRYYRPKMRSVMGKPMFLY

SEQ ID NO: 2962 - protein, 242 aa, Nicotiana tabacum
MGRGKVQLRRIENKINRQVTFSKRRGGLAKKAHEISVLCDAEVALIVFSHKGKIFEYSSDSCMEQILERYERYSYAERRLLSSNSESSVQENWSLEYAKLKAKIDLLQRNHKHYMGEDLDSLNLKDLQNLEQQLDTSLKLIRSRKNQLMHESISMLQKKEKAIQEENNMLSKKIKEKDKTVGKQAEWHQQNQVPNSASFLLQPHPCLNIGGNYQEEAEEARRNELDLNLDSLYPCHMGCFAT

SEQ ID NO: 2963 - protein, 422 aa, Pyrococcus abyssi GE5
MDPLKFHKGGKIGVISKVPLKTREHLSLAYTPGVAEPCKAIAKDPEKVYEYTSKGNSVAVVSDGSRILGLGNIGPLAGLPVMEGKALLFKRFGGIDAFPIMIGEQDPDKFIEVVKAISPTFGGINLEDIASPKCFYILDKLREELDIPVFHDDQQGTAAVVLAGLINALEVVGKRLDEISVALFGAGAAGFATLRILVKAGVKPGNVRVVELVNGKPMVLTKDLDLEKLFPYRGWLLEKTNDEGIEGGPEEALKGADVLISFTRPGPGVIKPEWIREMSDDPIVFPLANPVPEILPDEAKKAGARIVATGRSDYPNQINNLLGFPGIFRGALDVRARSITDDMIIEAAKAIASVVEEPSEENIIPSPFNPIVYAKEARAVAEEAMKEGVARVKVKGEEIEERTLKLISLWDDILGEVADKLS

SEQ ID NO: 2964 - protein, 245 aa, Nicotiana sylvestris
MGRGRVQLKRIENKINRQVTFSKRASGLLKKAHEISVLCDAEVGLIVFSTKGKLFEYSTDSCMERILERYERYSYAERQLTATDDETPGSWTLEHAKLKARLEVLQRNQRHYAGEDLDSLSMKELQNLEHQLDSALKHIRSRKNQLMHESISELQKKDKALQEQNNNLSKQVKEREKELAQQTQWEQQSHDHLNSSSFVLTQPLSSLHLGEAYPTAGDNGEVEGSSRQQQQNTVMPPWMLRHLNG

SEQ ID NO: 2965 - protein, 242 aa, Nicotiana sylvestris
MGRGKVQLRRIENKINRQVTFSKRRGGLVKKALEISVLCDAEVALIVFSHKGKIFEYSSDSCMEQILERYERYSYTERRLLASNSESSVQENWSLEYAKLKAKIDLQQRNHKHYMGEDLDSLSLKDLQNLEQQLDTSLKLIRSRKNQLMHESISMLQKKEKAIQEENNMLSKKIKEKDNTVGQQVEWHQQNQVPTSASFLLQPHPCLNIGGNYQEEREERRRNELDLNLDSLYPCHMGCFAT

SEQ ID NO: 2966 - protein, 165 aa, Glycine max
  misc_feature (56)..(56): Xaa can be any naturally occurring amino acid
  misc_feature (64)..(64): Xaa can be any naturally occurring amino acid
MAERFEEALGTSSVITEGTHVGALNSLRPGIFGKLQQMMLKEKETDMDFWKKLQAXLGQIWLCXFTYNVKIISRYRDGKLTVCHCSFSKSTENFLLQDNSKGMGCGGRKSSQSTIIFSPRVCNNVDLEVGNLIQIHPPWKEAQVGNDNIIVCTYFSEILFQFDSL

SEQ ID NO: 2967 - protein, 119 aa, Rickettsia canadensis
GGANEAVINMLKEIGSSENIPKYIAKAKDKDDPFRLMGFGHRVYKNYDPRAAVLKETCNEVLKELGQLENNPLLQIAIELEAIALKDEYFIERKLYPNVDFYSGIIYKAMGIPSQMFTV

SEQ ID NO: 2968 - protein, 499 aa, Rubrivivax gelatinosus PM1
MTTATIDWHARSAALTLDGRAVIGGERHPARAGESFDCISPIDGRVLGRVARGQSADIDDAVASARAAFDDGRWSRRPPAARKRVLQAFAEKILSAKEELALLETLDMGKPIQYSLSVDVPSTARCIAWYAEAIDKVYDEIAPTGPGALALIRREAMGVIGAIVPWNYPMIMAAWKLGPALAAGNSVVLKPSEKSPLTALRLAELALAAGLPPGVFNVVPGYGHEAGEALALHPQVDAIGFTGSTRVGRKMLEYAGRSNLKRVYNELGGKSAFLVFPDFDDLDRCAATVAGSMFFNQGESCNAPSRLLVHESIADDFARRVAAEAPQYRPADPLDAKTVMGALVDDGQLRTVMGYIDAGRSEGATVLAGGTQARTDSGGYYVEPTVFDGVRNDMKIAREEIFGPVLSIIRFKDEAEAIRLANDSPYGLQASVWSSHIDRAHRVAASLRAGTVHVNQYDEDDITVPFGGFKQSGNGRDKSLHAFDKYTELKTTWLRINAA

SEQ ID NO: 2969 - protein, 507 aa, Streptomyces coelicolor A3(2)
MTRYAAPGTEGAIVSYQSRYDHFIGGEYVPPARGQYFENPSPVNGLPFTEIARGTADDVERALDAAHEAAPGWGRTSVTERSDILLKIADRMEANLERLAVAESWENGKPVRETLAADIPLAIDHFRYFAGAVRAQEGSLGEIDDDTVAYHFHEPLGVVAQIIPWNFPILMATWKLAPALAAGNAVVLKPAEQTPASIHYWLSLVADLLPPGVLNVVNGFGVEAGKPLASSPRVAKVAFTGETTTGRLIMQYASENIKPVTLELGGKSPNIFFEDVWARDDDFRDKALEGFTMFALNQGEVCTCPSRALVQRGVYAEFMEAAVARTELIKPGHPLDTDTMIGAQASNDQLEKILSYLDIGRQEGAKVLTGGERIEHDGELKGGYYVQPTIFEGHNRMRIFQEEIFGPVVSVTSFDDFDDAVKTANDTLYGLGAGVWTRDMNTAYRAGRAIQAGRVWTNCYHAYPAHAAFGGYKQSGIGRENHKMMLEHYQQTKNILCSYSPKKLGFF

SEQ ID NO: 2970 - protein, 117 aa, male-killing Rickettsia from Adalia bipunctata
HGGANEAVINMLKEIGSSENIPKYIAKAKDKNDPFRLMGFGHRVYKNYDLRAAVLKETCKEVLKELGQLDGNPLIQIAIELEAIALKDEYFIERKLYPNVDFYSGIIYKAMGIPSQM

SEQ ID NO: 2971 - protein, 472 aa, Daucus carota
MVFFRSVSLLNKLRSRAVQQSNLSNTVRWFQVQTSASDLDLRSQLKELIPEQQERIKKLKAEHGKVQLGNITVDMVLGGMRGMTGLLWETSLLDPEEGIRFRGLSIPECQKLLPGAKPGGEPLPEGLLWLLLTGKVPTKEQVDALSAELRSRAAVPEHVYKTIDALPVTAHPMTQFATGVMALQVQSEFQKAYEKGIHKTKYWEPTYEDSITLIAQLPVVAAYIYRRMYKNGQSISTDDSLDYGANFAHMLGYDSPSMQELMRLYVTIHTDHEGGNVSAHTGHLVASALSDPYLSFAAALNGLAGPLHGLANQEVLLWIKSVVSECGENVTKEQLKDYIWKTLNSGKVVPGYGHGVLRNTDPRYICQREFALKHLPDDPLFQLVSNLFEVVPPILTELGKVKNPWPNVDAHSGVLLNHYGLTEARYYTVLFGVSRAIGICSQLVWDRALGLPLERPKSVTMEWLENHCKKSS

SEQ ID NO: 2972 - protein, 486 aa, Pseudomonas stutzeri
MKEIKHFINGAFVDSASGRTFEDINPVNGQVIGRVHEAGRAEVDAAVRAARAALKGPWGKMTVAERAEILHRVADGVTARFDEFLEAECLDTGKPKSLASHIDIPRGAANFKVFADLIKNVPTEAFEMATPDGAGALNYGVRRPKGVIGVISPWNLPLLLMTWKVGPALACGNCVVVKPSEETPLTATLLGEVMQAAGVPAGVYNVVHGFGGDSAGAFLTEHPDVDAYTFTGETGTGETIMRAAAKGVRQVSLELGGKNAGIVFADCDLDKAIEGTLRSAFANCGQVCLGTERVYVERPIFDAFVARLKAGAEALKIGEPNDPEANFGPLISHKHREKVLSYYQQAVDDGATVVTGGGVPEMPAHLAGGAWVQPTIWTGLTDDSAVVTEEIFGPCCHIRPFDSEEEAIELANSLPYGLASAIWTENASRAHRVAGQIEAGIVWVNSWFLRDLRTAFGGSKQSGIGREGGVHSLEFYTELKNICVKL

SEQ ID NO: 2973 - protein, 277 aa, Lotus corniculatus var. japonicus
MCEALKSQYQLCEEIGRGRFGTIFRCFHPISTDTFAVKLIDKSLLADSTDRHCLENEPKYMSLLSPHPNILQIFDVFEDDDVLSMVIELCQPLTLLDRIVAANGTSIPEVEAAGLMKQLLEAVAHCHRLGVAHRDVKPDNVLFGGGGDLKLADFGSAEWFGDGRRMSGVVGTPYYVAPEVLMGREYGEKVDVWSCGVILYIMLSGTPPFYGDSAAEIFEAVIRGNLRFPSRIFRNVSPAAKDLLRKMICRDPSNRISAEQALRHPWFLSAGDTVNVT

SEQ ID NO: 2974 - protein, 119 aa, Rickettsia conorii
AHGGANEAVINMLKEIGSSEYIPKYIAKAKDKNDPFRLMGFGHRVYKNYDPRAAVLKETCKEVLKELGQLDNNPFLQIAIELEAIALKDEYFIERKLYPNVDFYSGIIYKAMGIPSQMF

SEQ ID NO: 2975 - protein, 198 aa, Zea mays
  misc_feature (169)..(169): Xaa can be any naturally occurring amino acid
MATSFQGTTTKCTACDKTVYLVDKLTADNRIYHKACFRCHHCKGTLKLANYNSFEGVLYCRPHFDQLFKRTGSLDKSFEGTPKVVKPERNVGNENATKVSSAFAGTREKCVGCSKTVYPTERVTVNNTMYHKSCFKCCHGGCTISPSNYIAHEGKLYCKHHHIQLIKEXRGTSASLRMTTRRHHRLGHWRRMNKSIDH

SEQ ID NO: 2976 - protein, 330 aa, Glycine max
MGEQLRQANPPVKTSEYDEERVMEWEAGLPTANDLTPLSQPLIPPELASAFSILPEPHRTLLDVNRASRNTLSTLRGGGGSVHQAFSSSNNNHNYDGDGDGGVEEEEEEDDDRDGSGPDSRKQRKIDCGAAEEADSAVQTETSAERTAVKRPRLVWTPQLHKRFVDVVAHLGIKNAVPKTIMQLMNVEGLTRENVASHLQKYRLYLKRMQGLSNEGPSASDQLFASTPVPQSLHDSAPPSNHSNGHGHGHGHSNGRGHGHGHGHGHLSVPMMSMPYPPPLMSMPYPPPMMSGMPHGHMGIPMPNSSATSAYHPYNMLHQRDWPHLAPNDK

SEQ ID NO: 2977 - protein, 444 aa, Arabidopsis thaliana
MVRRQEEEKKAEKGMRLGKYELGRTLGEGNFGKVKFAKDTVSGHSFAVKIIDKSRIADLNFSLQIKREIRTLKMLKHPHIVRLHEVLASKTKINMVMELVTGGELFDRIVSNGKLTETDGRKMFQQLIDGISYCHSKGVFHRDLKLENVLLDAKGHIKITDFGLSALPQHFRDDGLLHTTCGSPNYVAPEVLANRGYDGAASDIWSCGVILYVILTGCLPFDDRNLAVLYQKICKGDPPIPRWLSPGARTMIKRMLDPNPVTRITVVGIKASEWFKLEYIPSIPDDDDEEEVDTDDDAFSIQELGSEEGKGSDSPTIINAFQLIGMSSFLDLSGFFEQENVSERRIRFTSNSSAKDLLEKIETAVTEMGFSVQKKHAKLRVKQEERNQKGQVGLSVTAEVFEIKPSLNVVELRKSYGDSCLYRQLYERLLKDVGTSSPEQEIVT

SEQ ID NO: 2978 - protein, 116 aa, Glycine max
  misc_feature (25)..(26): Xaa can be any naturally occurring amino acid
ESGRAIVSHHSVLIFEAVGTSSTTXXGASPALSAQYLAEELSEDYRNLSELAFRGEYETCLVYTEEMKERCVEQFKQGTVFPIIPIHRLDEKPSVRGILSDLTCDSDGKIDKFING

SEQ ID NO: 2979 - protein, 485 aa, Bacteroides thetaiotaomicron VPI-5482
MDKTYKRHSFTKLWIATAMFIFCCFATSAFAQEAVDADTFMTTTETITEVKTTPEIAETATASAETTPDTIGELALGLNTVWMLLAAMLVFFMQPGFALVEAGFTRVKNTANILMKNFVDFMFGSLLYWFIGFGLMFGAGGLIGMPHFFDLSFLDSDLPREGFLVFQTVFCATAATIVSGAMAERTKFSMYLVYTIFISVLIYPISGHWTWGGGWLMNGEEGSFMMNLFGTTFHDFAGSTIVHSVGGWIALVGAAILGPRIGKYGKDGKSRAIPGHNLTVAALGVFILWFGWFGFNPGSQLAASTEADAMAISHVFLTTNLAACAGGFFALAMSWMKYGKPSLSLTLNGVLAGLVGITAGCDAVAPSGAVLIGAICGVVMIFAVDFIDKVLKIDDPVGASSVHGVCGFLGTVLTGLFSTSEGLFYGHGAGFLGAQLFGAVVVGVWAAGMGFIIFKVLDKIHGLRVPARVEEEGLDIYEHGESAYN

SEQ ID NO: 2980 - protein, 236 aa, Rickettsia conorii str. Malish 7
MIDYTKTLTAASKHKTFDEGLRQYMLKVYNYMALALLLTGVAAVTTISVEPIYNLMFQTGFGTIIMFAPLGIALYFFMGFGQMNLPTAQILFWVYAGLTGMSLAYLALIYTGASIARTFFICSSVFGAMSLYGYSTSRDLTSMGSFFAMGLIGLIIASLVNLFLKSSALSFATSLIGIVIFMGLIAWDTQKIKSMYYMAGNDEVGQKLSIMAAFTLYLDFINLFLYLMRFLGNRRD

SEQ ID NO: 2981 - protein, 304 aa, Guillardia theta
MNENTKFLEEVIKKLTQSKKIKNIFLTEKEIGKLCYLSRKVFNNENSMLYLNSPIKICGDIHGQFYDLLRLFEFNGYPPTEKYLFLGDYVDRGKQSIEVISLLFAFKVRYPTKIFILRGNHESSKINRIYGFYDECKKKYNIKIWKIINETFNYLPLAAIIEKKIFCIHGGLSPFLNSIKQIEDIARPVEIPEKGLLCDLLWSDPNEDKQGWNLSDRGISYTYGDNIVKEFIEKFDFDLICRAHQVVDKGYKFFSNRMLVTIFSAPNYCGEFSNAGAVMNVDKLLVCSFQILKPYFGKKINSSK

SEQ ID NO: 2982 - protein, 495 aa, Neurospora crassa
MLTPTTLLLLSPLLYLLTLLFRTALYRLRARSLGCSPVAVYPHKDPILGLDLFRESLRAMNTHALLPLWDARFKRYGNTHYTLTLGKWVLMTNEPENVKVILGTKMAEWPIDGPRLHASVAVLGKKSIFTTNGAQWREARGMIRPSFVRDQVADLHCFAKHVGNFLNAIPKDGSTFDMQELLLSMTMDSSTDFLLGCSTNSLLQPSPEAKQFLEDFEYTSREAAKKSRLGTLLNWLPNGEFQATVTRVREYVRAYIRKSQAEKTDKKERDYVFLHEILKSGADEEHAIDQVLSVIIAGRDTTAAAMTACFYYLARNPEAVKKLRKEIFDMEDEMPTWEQLKNMKYLNMIIKEGLRLFPPASTNSRAPIKDTVLPRGGGPDGKQPILVPKGQVVRWSLYSLHRRKDIWGEDAHEFRPERWDENLRVGWEYIPFSGGPRICLGQQFALTQIEYALFKFFRAFKSIEPRDDNGPLLLRTNLTVTFAKGCLVSATPDSN

SEQ ID NO: 2983 - protein, 509 aa, Bordetella bronchiseptica RB50
MTTVHSATPEETRRLLQQLGVDPARYDGGTLEVRSPIDGQAIARLPELTAEQARARVADARQAFLAWRKVPAPRRGELVRLLGEELRAAKAELGRLVSIETGKILSEGEGEVQEMIDICDFATGLSRQLYGLTIATERAEHRMMETWHPAGPVAIISAFNFPVAVWAWNAAIALVCGDSLLWKPSEKAPLTALATQALLERALARFGDAPAHLSQVLIGGREVGEALVDDPRIPIVSATGSTAMGRKVGPKVAERFGRSILELGGNNAAIICPSANLDLALRGIAFSAMGTAGQRCTSLRRIFVHEQIADDLVARLKQVYESVAIGDPRDSGTLIGPLRDQAAFDAMQRSLADARAAGGRVTGGAREPVGGHDQAYYARPALVEMPAQSEVVERETFAPILYVMRYRDLDEAIALQNDVPQGLSSSIFTNDLREAERFVSAEGSDCGIANVNIGPSGAEIGGAFGGEKETGGGREAGSDSWKAYMRRTTNTVNYGNALPLAQGVKFDVA

SEQ ID NO: 2984 - protein, 297 aa, Brassica napus
MGVMVNHHLLAIIFGILGNAISFLVFLAPVPTFYRIYKNKSTESFQSLPYQVSLFSCMLWLYYALTKQDAFLLITINSFGCVVETIYIAMFFTYATKEKKMAAIKLFLTMNVAFFSLIIMVTHFAVKRPSLQVSVIGWICVAISVSVFAAPLMIVARVIKTKSVEFMPFTLSFFLTISAVMWFAYGAFLHDICIAIPNVVGFILGLVQMVLYGVYRNSGEKLDIGKRNNSSSEQLKTIVVMSPLGLSEMHPVDVTVTEPVIPLSYTVHHEDPSKITKEEEPSTEAGQSHVETAPSRI

SEQ ID NO: 2985 - protein, 342 aa, Burkholderia cepacia R18194
MKALAKLERGPGLTLTRVKRPEVGHNDVLIKIRRTAICGTDIHIWKWDDWAQKTIPVPMHVGHEYVGEIVEMGQEVRGFAIGDRVSGEGHITCGFCRNCRAGRRHLCRNTVGVGVNREGAFAEYLAIPAFNAFKIPPEISDDLASIFDPFGNATHTALSFNLVGEDVLITGAGPIGIMAVAIAKHVGARNVVITDINDYRLELARKMGATRAVNVARESLRDVMSDLHMTEGFDVGLEMSGVPSAFTSMLEAMNHGGKVALLGIPPAQTAIDWNQVIFKGLEIKGIYGREMFETWYKMVAMLQSGLDLSPIITHRFAADDYEKGFAAMLSGESGKVILDWTA

SEQ ID NO: 2986 - protein, 444 aa, Brucella suis 1330
MAATFDTILKGATIVNHDGIGQRDIGIRNGRIAAIGSLAGNSAGEVIDCTGLHILPGVVDSQVHFREPGLEHKEDLETGSLAAVLGGVTAVFEMPNTKPLTTSAEMLEDKIRRGRHRMHCDFAFWVGGTRDNAKDVAELERLPGAAGIKVFMGSSTGDLLVEDDDGVRSILRNTRRRAAFHSEDEFRLKEREGLRVEGDPSSHPVWRDEIAALQCTQRLVRIARETGARIHVLHISTAEEIDFLKDYKDVATCEATPHHLTLSADDYKALGNLIQMNPPVRDKRHREGVWKGIDQGIVDVLGSDHAPHTLEEKQKSYPASPSGMTGVQTLVPIMLDHVNAGKLSLERFVDLSSHGPNRIFGMARKGRIAVGYDADLTIVDMKRRETITHEQAGSKAGWTPYHGKTVTGWPVGTFVRGIKVMWEAEIVNPHKGEPVEFLEALPRR

SEQ ID NO: 2987 - protein, 201 aa, Glycine max
  misc_feature (164)..(164): Xaa can be any naturally occurring amino acid
MSGRVSGKVKWFNDQKGFGFISPDDGSDDLFVHQSQIKSDGFRSLAEGESVEFAIESESDGRAKAVDVTGPDGASVQGTRRGGDGGRSYGGGRGGGGGGYGGGGGYGGGGGYGGGGGYGGGGRGGGGGACYNCGESGHLARDCSGGGGGDRYGGGGGGGRYGGXGGGGRYGGGGGGGGGGGSCYSCGESGHFARDCPSSAR

SEQ ID NO: 2988 - protein, 126 aa, Rickettsia prowazekii
GPAHGGANEAVINMLKEIGSSENIPKYVAKAKDKNDPFRLMGFGHRVYKSYDPRAAVLKETCKEVLNELGQLDNNPLLQIAIELEALALKDEYFIERKLYPNVDFYSGIIYKAMGIPSQMFTVLFA

SEQ ID NO: 2989 - protein, 296 aa, Bacillus cereus ATCC 14579
MVIQWFPGHMAKARRQVTEKLKLIDVVIELVDARLPLSSRNPMIDEIITHKPRLVVLNKADMADDRLTKQWIAYFKEKGHMAISINAQAGQGMKEIAAACKVLVKEKFDKMVAKGIRPRAIRALIVGIPNVGKSTLINKLAKKNIAKTGDRPGVTTAQQWIKVGKEMELLDTPGILWPKFEDQLVGLRLATTGAIKDSILNLQDVAVYALRFMEKHYPERLKERYNLNEIPEDIVELFDAIGKNRGCLMGGGMIDYDKTSELVLRELRGGKLGKMTFETPEEFGEQVEDVEKIEEV

SEQ ID NO: 2990 - protein, 459 aa, Rubrivivax gelatinosus PM1
MSRTTQDWQAADAAHFLHPFTDFDALAKKGSRIIERAENIYLWDSEGHKILDAMSGLWCVNVGYGRQELIDAATAQLKQLPFYNAFFQTATPPAIELAELLSEVTPPQFRHVFFSGSGSEGNDTVVRMVRRYWDVLGQPERKVIISRNNAYHGSTMAGASLGGMSGMHAQGGLPIPDITHIEQPYWYELGRPQGLSRDDFGRLAASWLEKKILEVGPERVAAFIGEPVQGAGGVIIPPATYWPAIQAICDKYGILLVSDEVICGFGRTGRWWGCETMGTRPDLMTFAKGVTSGYIPLGGVMVGERVARVLIEQGGEFNHGYTYSGHPVACAVALANIRLIQRERLVDRVRDDLGPYLAQHFEALKAHPLVGDAETCGLMGAVVLARDKASGTPFASDLEVGMVCRGHCFGNGLIMRAVGDRMIIAPPLVMTRDQIDEMMVLIKRCLDLTWADVKARGWV

SEQ ID NO: 2991 - protein, 119 aa, Rickettsia typhi
GGANEAVINMLKEIGSSENIPKYVAKAKDKNDPFRLMGFGHRVYKSYDPRAAVLKETCKEVLNELGQLENNPLLQIAIELEALALKDEYFIERKLYPNVDFYSGIIYKAMGIPSQMFTV

SEQ ID NO: 2992 - protein, 287 aa, Neurospora crassa
MSGPKYTPAPQEDPDAHLYYPQPPPSYQATAESSAANAVLGDQARLFSGAPRSSQDDDHDIPDDFKFGGSVAEATVEIRHQFIRKVYTILTVQLIATGAVSALSFLSDGYRNWIQSHPAMIWVSFAGALVFMLLTFWKRQSYPTNLLFLSGFTLLEAYTISVCVSFFDSTTVLLAVVITAGIFVFLTAFACQTKYDFTSWMPYLGGALWGLIITGFIYAFLPHTSTSELVYGGVAALVFSGYILVDTQLVMRKYHVEEEIAAAISLYLDILNLFLAILRILNSQSDN

SEQ ID NO: 2993 - protein, 531 aa, Zea mays
  misc_feature (452)..(452): Xaa can be any naturally occurring amino acid
MEAVGVTPAPVAAPEKKKLLDLKDPFPAAANGGTKASPASKWAMKKKLVGGDAGYVLEDVPHLTDYMPQLPTYPNPLQDNPAYSVVKQYFVNPDDTVTQKIVVHKTSARGTHFRRAGPRQRVYFQSDEVNAAIVTCGGLCPGLNTVIRELVCGLYDMYGVSSVVGIEGGYKGFYSKNTVALTPKSVNDIHKRGGTVLGTSRGGHDTAKIVDCLQDRGINQVYIIGGDGTQKGASVIYEEVRRRGLKCSVVGVPKTIDNDIAVIDKSFGFDTAVEEAQRAINAAHVEAESAENGIGVVKLMGRNSGFIAMYATLASRDVDCCLIPESPFYLEGKGGLLEFVERRLKDNGHMVIVVAEGAGQDLIARSMNFVDTQDASGNKLLLDVGLWLSQKIKDHFKKKPSFPITLKYIDPTYMIRAVRSNASDNVYCTLLAHSALHGAMAGYTGFTVAPVXGRHAYIPFYRITEKQNKVVITDRMWARVLCSTNQPCFLSHEDVENMKHDDDEHHHMHNTQLLEGGSSPVSKCNGSAAAV

SEQ ID NO: 2994 - protein, 177 aa, Campylobacter jejuni
MKHNLTIWLTGLAGSGKSYIAQALYRKLKEKYDNVIYLDGDELRELLGYFSYDKKGRMDVSFKRSDFARFLSNQGMIVIVSAISMWNEIYEYNRKYLKNYFEIYIKCEFEELKRRDKKNLYTQALKGEISNVVGVDIPYDEPKADLVIDNTQMTALDDKVCLILTALSQNLDNSKRE

SEQ ID NO: 2995 - protein, 116 aa, Triticum aestivum
PTVMASSATSVAPFQGLKSTAGLPVSRRSNGASLGSVSNGGRIRCMQVWPIEGIKKFETLSYLPPLSTEALLKQVDYLIRSKWVPCLEFSKVGFIFREHNASPGYYDGRYWTMWNC

SEQ ID NO: 2996 - protein, 506 aa, Rhodospirillum rubrum
MLYAAPGTADAIFAFKPRYDNFIDGTWQPPVRGEYFDNVTPITGKVFCKAARSTEEDITLALDAAHAAADRWGRTTAAERALILNRIADRLQDNLETLAYVESIDNGKPIRETLAADIPLAIDHFRYFAACIRAQEGSLSQIDETTIAYHFNEPLGVVGQIIPWNFPILMATWKLAPALAAGNCIVLKPAEQTPISILVLTELIADLLPPGVLNVVNGFGLEAGKPLASSKRIAKIAFTGETATGRLIMQYASQNLIPVTLELGGKSPNVFFDDIASADDSFFDKAVEGFVMFALNQGEICTCPSRALIHESLYDRFIERALARVAVIKQGSPLDTETMIGAQASTEQMDKILSYMDIGREEGATVLAGGARAELGGELDGGYYVQPTVFKGNNSMRIFQEEIFGPVVAVTTFKDEDEALHLANDTHYGLGSGVWTRDGNRAFRFGRGIKAGRVWTNCYHLYPAHAAFGGYKQSGIGRENHHMMLDHYQQTKNLLVSYDPKAMGFF

SEQ ID NO: 2997 - protein, 213 aa, Oryza sativa (japonica cultivar-group)
MGVEVCVKAAVGHPDTLGDCPFSQRVLLTLEEKKVPYEMKLIDVQNNPDWFLKISPEGKVPVFNGGDGKWIPDSDVITQVIEEKYPTPSLVTPPEYASVGSKIFSCFTTFLKSKDPNDGSEKALLTELQALEEHLKAHGPFINGQNISAADLSLAPKLYHLQVALEHFKGWKIPEDLTNVHAYTEALFSRESFIKTKAAKEHLIAGWAPKVNA

SEQ ID NO: 2998 - protein, 505 aa, Oryza sativa (japonica cultivar-group)
METIQEGDVVPGSPPPPVASAAASSGAAGDHRTYSNPAFQGWVGLRAWLGIGIGIGIGMVSGSIEEAWYDSFAMSESDGEDDFHSVQDDAFSLNGFENDAALSTRDANGGSFNGSSHSSEQHYRKPRSSELSRGNLENGVRSSVSHEDVASVSAEDSAHGGGGRILDDCGLLPNNCLPCIASAVGVNEKKRPLSTSPTHSMKMPSLKLSFKKKSGEAHPSSTLLSTKDFLERPLAGSQVQLCLLEKKILNSWSHIDPGTFRVRGSNYFRDKKKELAPNYAAYYPFGVDVYLSPQKLNHISRYVQLPDVQISSKLPPLLVVNVQVPLYPASLFQNEIDGEGMSFVLYFRLSDAYSKELPPSFIENIRKLVDDHVEKVKAFPMETTIPFRERLKILGRVANLEDLPLSAAERKLMHAYNEKPVLSRPQHEFYLGDNYFEVDIDMHRFSYISRKGFETFLDRLKICMLDVGLTIQGNKAEELPEQILCCVRLNGIDYTQYKPLMTHGA

SEQ ID NO: 2999 - protein, 488 aa, Listeria innocua Clip11262
MADVRKLKNYINGEWVESKADKYEDVINPATGEVLCQVPISTRAELDQAAVIAEQAFEKWSQVAVPRRARVLFSFQQLLIQHKEELARLITLENGKNLSEARGEVQRGIENVEFAAGAPTLMMGDSLASIATDVEAANYRYPVGVVGGIAPFNFPMMVPCWMFPMAIALGNSFILKPSERTPLLMEKLVELFSEAGLPKGVFNVVYGAHDVVNGILENETIKAVSFVGSKPVGEYVYKTGSANLKRVQALTGAKNHTIVLNDADLEDTVTNVISAAFGSAGERCMACAVVTVEEGIADDFLAALRTAAQNVKIGNGLDDGVFLGPVIREENQKRTIAYIEKGVEEGAKLTVDGRETGLSEGYFVGPTILEDVTTDMTIWKDEIFAPVLSVIRVKNLQEAVRVANQSEFANGACIFTNNAKAIRYFREKIDAGMLGVNLGVPAPMAFFPFSGWKSSFYGTLHANGKDSVDFYTHKKVVTARYSLKGYEE

SEQ ID NO: 3000 - protein, 350 aa, Coffea canephora
MAEEEACLFAMSLASASVLPMVLKSAIELDLLELIAKAGPGAYVSPSELAAQLPTHNPEAPIMLDRILRLLATYSVLDCKLNNLADGGVERLYGLAPVCKFLTKNADGVSMAPLLLMNQDKVLMESWYHLKDAVLDGGIPFNKAYGMTAFEYHGTDPRFNKVFNQGMSNHSTITMKKILEVYRGFEGLKTVVDVGGGTGATLNMIISKYPTIKGINFELPHVVEDAPSHPGVEHVGGDMFVSVPKGDAIFMKWICHDWSDDHCRKLLRNCYQALPDNGKVILAECVLPEAPDTSLATQNVVHVDVVMLAHNPGGKERTEKEFEALAKGAGFKEFRKVCSAVNTWIMELCK

SEQ ID NO: 3001 - protein, 80 aa, Triticum aestivum
MAPTVMGSKDTYDAPFQGLKSTDGLPVRRRSNGASLGSVSNGGRIRCMQVWPMEGIKKFETLSYLTPLSTEALLKQVEYL

SEQ ID NO: 3002 - protein, 350 aa, Coffea canephora
MAEEEACLFAMSLASASVLPMVLKSAIELDLLELIAKAGPGAYVSPSELAAQLPTHNPEAPIMLDRILRLLATYSVLDCKLNNLADGGVERLYGLAPVCKFLTKNADGVSMAPLLLMNQDKVLMESWYHLKDAVLDGGIPFNKAYGMTAFEYHGTDPRFNKVFNQGMSNHSTITMKKILEVYRGFEGLKTVVDVGGGTGATLNMIISKYPTIKGINFELPHVVEDAPSHSGVEHVGGDMFVSVPKGDAIFMKWICHDWSDDHCRKLLKNCYQALPDNGKVILAECVLPEAPDTSLATQNVVHVDVVMLAHNPGGKERTEKEFEALAKGAGFKEFRKVCSAVNTWIMELCK

SEQ ID NO: 3003 - protein, 121 aa, Brassica napus
  misc_feature (107)..(107): Xaa can be any naturally occurring amino acid
  misc_feature (118)..(118): Xaa can be any naturally occurring amino acid
GRVGFEQRWNRQGGRDILVKIRDLDDIIIPPSPVLFSEDHDSWNVQLFRSIDGGAAAAFPDSPEAAAEAGLVSGKDNIIDRSIQDAYIHAIRRAKDFIYIENQYFLXSSFAWSADGIXPDE

SEQ ID NO: 3004 - protein, 163 aa, Brassica napus
  misc_feature (127)..(127): Xaa can be any naturally occurring amino acid
MVGAKPVKMVENGSDGTSLLNGRYEIGRLLGHGTFAKVYHARNVTTGKSVALKVVAKEKVAKAGMEEQIKREISVMKMVKHPNIVELHEVMASKTKIYFAMELVRGGELFAKVAKGRLREDAARVYXKQLISAVDFCHSRGVTTRDLKPENLLLDEQGNLKIT

SEQ ID NO: 3005 - protein, 188 aa, Saccharum hybrid cultivar
SSVVTAAAAIQADPAEKPRAPKAQVVGWPPVRSFRKNIMSVQSDKGAGGSKDADKSSPPPAAAAAVGGAAFVKVSLDGAPYLRKVDLKMYKMYKSYQELSKALEKMFSSTIGSCGSQGMNGMNESKLVDLLNGSEYVPTYEDKEGDWMLVGDVPWEMFVESCKRLRIMKGSEAIGLAPRAMEKCKNRS

SEQ ID NO: 3006 - protein, 279 aa, Pyrococcus abyssi GE5
MEFIEWYPRGYGVAFKVKEKIFEGHSKFQKIEVYETEGFGRLLALDGTVQLVTEGEESYHESLVHPVMLAHPNPRRVLVIGGGDGGTIREVLRHEEVEEAIMVEIDEEVIEVAIKFIGIDGGLLDKMMKGECKRAKLIIGDGVEFIKENSGFDVVIVDSTDPVGPAKMLFSREFYERAYEALNDPGIYVTQAGSVYLFTDELVTAYENMSRVFDKVYAYSFPVIGYASPWAFLVGIKGDLDFRKIDLERAKKLNLKYYDPENHETIFQMPRYVREMLKP

SEQ ID NO: 3007 - protein, 396 aa, Escherichia coli CFT073
MLDAQTIATVKATIPLLVETGPKLTAHFYDRMFTHNPELKEIFNMSNQRNGDQREALFNAIAAYASNIENLPALLPAVEKIAQKHTSFQIKPEQYNIVGEHLLATLDEMFSPGQEVLDAWGKAYGVLANVFINREAEIYNENASKAGGWEGTRDFRIVAKTPRSALITSFELEPVDGGAVAEYRPGQYLGVWLKPEGFPHQEIRQYSLTRKPDGKGYRIAVKREEGGQVSNWLHNHANVGDVVKLVAPAGDFFMAVADDTPVTLISAGVGQTPMLAMLDTLAKAGHTAQVNWFHAAENGDVHAFADEVKELGLSLPRFTAHTWYRQPNEADRAKGQFDSEGLMDLSKLEGAFSDPTMQFYLCGPVGFMQFAAKQLVDLGVKQENIHYECFGPHKVL

SEQ ID NO: 3008 - protein, 114 aa, Triticum aestivum
  misc_feature (74)..(74): Xaa can be any naturally occurring amino acid
  misc_feature (84)..(84): Xaa can be any naturally occurring amino acid
  misc_feature (91)..(91): Xaa can be any naturally occurring amino acid
  misc_feature (108)..(108): Xaa can be any naturally occurring amino acid
MSDTDEHHFESKADSGASKTYPQQAGAIRKGGHIVIKARPCKVVEVSTSKTGKHGHAKCHFVAIDIFNGKNLRXYVPSSHNCDXPHVDRQXYQLIDITDDGIHLLTEXGNTKDD

SEQ ID NO: 3009 - protein, 372 aa, Bacillus cereus ATCC 10987
MKAEEKFSPGLDGIVAAETKISFLDTVKGEIVIQGYDLIELSKTKEYLDIVHLLLEEHLPNEDEKAKLEKKLKEEYAVPEGVFNVLKALPKETHPMDGLRTGVSALAGYDNDIENRSLEVNKSRGYKLLSKVPNIVANSYHILNNEEPIEPLKELSYSANFFYMLTGKKPTELEEKIFDRSLVLYSEHEMPNSTFTARVIASTQSDLYGALTGAVASLKGSLHGGANEAVMYMLLEAGNVEKFEELLQKKLYNKEKIMGFGHRVYMKKMDPRALMMKEALKQLCDVKGDYTLYEMCEAGEKIMEKEKGIYPNLDYYAAPVYWMLGIPIQLYTPIFFSSRTVGLCAHVIEQHANNRLFRPRVNYIGERHVLSK

SEQ ID NO: 3010 - protein, 157 aa, Candida albicans
MAEEDTFETADAGAALTFPMQCSALRKNGHVVIKNRPCKIVDMSTSKTGKHGHAKVHLVAIDIFTGKKLEDLSPSTHNMEVPNVSRQEFQLLDIDDGYLSLMTADGDTKDDVKVPEGELGDKLQSEFDEGKDLIVTIISAMGEEAAISYKEAPKGSA

SEQ ID NO: 3011 - protein, 62 aa, Zea mays
ACLQNTQPTPTNADFGEDNYFVADQRGYESIIHSIGSSYLSTDGNGKLKDRRILLNKVLADM

SEQ ID NO: 3012 - protein, 507 aa, Zea mays
MASNGCNGNGNGKAAPAGVVVPEIKFTKLFINGEFVDAASGKTFDTRDPRTGDVLAHVAEADKADVDLAVKSARDAFEHGKWPRMSGYERGRIMSKLADLVEQHTEELAALDGADAGKLLLLGKIIDIPAATQMLRYYAGAADKIHGDVLRVSGRYQGYTLKEPIGVVGVIIPWNFPTMMFFLKVSPALAAGCTVVVKPAEQTPLSALYYAHLAKMAGVPDGVINVVPGFGPTAGAALASHMDVDSVAFTGSTEVGRLIMESAARSNLKTVSLELGGKSPLIIFDDADVDMAVNLSRLAVFFNKGEVCVAGSRVYVQEGIYDEFVKKAVEAARSWKVGDPFDVTSNMGPQVDKDQFERVLKYIEHGKSEGATLLTGGKPAADKGYYIEPTIFVDVTEDMKIAQEEIFGPVMSLMKFKTVDEVIEKANCTRYGLAAGIVTKSLDVANRVSRSVRAGTVWVNCYFAFDPDAPFGGYKMSGFGRDQGLAAMDKYLQVKSVITALPDSPWY

SEQ ID NO: 3013 - protein, 275 aa, Escherichia coli CFT073
MANPTVIKLQDGNVMPQLGLGVWQASNEEVITAIQKALEVGYRSIDTAAAYKNEEGVGKALKNASVNREELFITTKLWNDDHKHPREALLDSLKKLQLDYIDLYLMHWPVPAIDHYVEAWKGMIELQKEGLIKSIGVCNFQIHHLQRLIDETGVTPVINQIELHPLMQQRQLHAWNATHKIQTESWSPLAQGGKGVFDQKVIRDLADKYGKTPAQIVIRWHLDSGLVVIPKSVTPSRIVENFDVWDFRLDKDELGEIAKLDQGKRLGPDPDQFGG

SEQ ID NO: 3014 - protein, 435 aa, Rubrivivax gelatinosus PM1
MTTDLDAYWMPFTANRQFKKAPRLLSKASGMHFWTPEGREVLDGIAGLWCVNAGHARPKIVEAIRAQALELDFAPPFNMAHPKAFELAERLVQLTPAGLNKVFYTNSGSESVETALKMAIAYHRARGEGSRTRLIGRERGYHGVNFGGISVGGMVANRKMFGSMLTGVDHIRHTHDPARNAFSIGQPQHGAELADDLERLVALHDASTIAAVIVEPVAGSTGVLLPPQGYLERLRAICDKHGILLIFDEVITGFGRTGAPFAAQRFGVTPDLMTVAKGLTNGCVPMGAVFAKQHIHDVFMNGPEHLIEFFHGYTYSGHPLACAAALGTLDTYAEEGLLTRASEMEAYFADALHSLKGLPHVIDIRNIGLVGGIELAPIDGSPGKRAFDIFLECWERGVLIRTTGDTVALSPPLIISKTHVDQIVGTLADALKRAG

SEQ ID NO: 3015 - protein, 327 aa, Synechocystis sp. PCC 6803
MQSFNRINSMKYFPLSNGEQIPALGLGTWKSSPQVVGQAVEQALDLGYRHLDCAAIYGNEAEIGATLANAFTKGVVKREELWITSKLWSNAHHPDAVLPALEKTLQDLGLDYLDLYLIHWPVVIQPDVGFPESGDQLLPFTPASLEGTWQALEKAVDLGLCHHIGVSNFSLKKLEMVLSMARIPPAVNQVELHPYLQQSDLLTFANSQNILLTAYSPLGSGDRPAAFQQAAEPKLLTDPVINGIAAEQGCSAAQVLLAWAIQRGTVTIPKSVNPERLEQNLRAADITLTDSEMAKIALLDRHYRYVSGDFWTMPGSPYTLQNLWDEI

SEQ ID NO: 3016 - protein, 292 aa, Photorhabdus luminescens subsp. laumondii TTO1
MDNQPIIRLADGNHMPQLGLGSWASDDQQIAETIHAALDIGYRAIDTAAIYNNEKGVGNALQETDIPREDIFVTTKLWNDRHLDARAALTESLEKLQLDYVDLYLIHWPAPPQDQYVGAWQQLIELQKEGLIRSIGVSNFQPEHIQRLINETGVHPVINQIELHPLLQQRQLHAWNATHNIVTESWSPLAQGGENVFDNQLVQHLTQKYGKTPAQVVIRWHIDNGMIVIPKSTTLSRIKENFDVFDFKLEKEDLTAMTTLDIGKRLGPTPEIFVDFSEFIQLLEQNSANNQC

SEQ ID NO: 3017 - protein, 396 aa, Triticum aestivum
MALSISAPTSSPFLPAPRQVGRWSSSPSSAKPAVFSLRRPVVVARAAAGNAPSSPAGAVVTELDVVSSFSEIVPDTVVFDDFEKFAPTAATVSSSLLLGIAGLPDTKFKSAIDTALVDGECNTMEKPGDRMSCYLTKALGNVGAELAHQVPGRVSTEIDARLAYDTQGIVQRVHELLQIYNEHDIPSERLLFKIPATWQGIEASRLLESEGTQTHLTFVYSFAQAAAAAQAGASVVQIFVGRIRDWAKNHSGDPEIDEALKKGEDAGLALVKKAYVYIHKNGYKTKLMAAAVRNKQDVFSLLGIDYIIAPLKILQSLDESVTDSDEKYGYVQRLTPSLDKMYNFSQEELVKWDQLSLAAAMGPAAEELLASGLEGYANQARRVEELFAKIWPPPNV

SEQ ID NO: 3018 - protein, 192 aa, Glycine max
  misc_feature (72)..(72): Xaa can be any naturally occurring amino acid
MADSDNDSGGAHNGGKGSEMSPREQDRFLPIANVSRIMKKALPANAKISKDAKETVQEVRVKVSSAFITGEXADKCQREKRKTINGDDLLWAMTTLGFEDYVEPLKGYLQRFREMEGEKTVAARDKDAPPLTNATNSAYESANYAAAAAVPGGIMMHQGHVYGSAGFHQVAGGAIKGGPVYPGPGSNAGRPR

SEQ ID NO: 3019 - protein, 310 aa, Anabaena variabilis ATCC 29413
MDELGHPPISELKPEASRFFYQEAIKLYHLTNEEGVTIEDRWIKRLEDISIPIRVYTPRDEVDNINSIQEKSTLYPILVYFQGGGWIFGNLDSADAPCSFLCKHINCIVVSVQYRQAPEYKCPIPVIDALEAIKWVHKNSQSLGGDAQKIAVGGESAGANLAAVAAIKLRDEGNISLEAQLLITPVTQYGFNTQSYQAGYTKGLSLETMKWFWNHYLENDLQGEEYYASPLKVQDARNLPPCLIVTAEHDPLRDDGLLYAQYLQSFQVKVKILHYESFIHSFIRMIRVIEDTRQALYEIAINFREMLYFY

SEQ ID NO: 3020 - protein, 502 aa, Novosphingobium aromaticivorans DSM 12444
MASSEGQLSKLGEAARTFLATRPGLLIAGRNTPAASGARRDVLDPSTGLVVTDVAEGGAADVDAAVAAARATFQSAEWRDMRPLARERLLHRLADLIERDADILAELEVIDTGKILPMARHGDLVIALDSLRYMAGWTTKIEGTTIDPSFSYIPPIRFSARTVRQPVGVVGQIIPWNFPLVMAIWKIAPALAAGCTVVLKPAEDTPLTALYLGRLIAEAGFPAGAVNIVTGGREVGMAIVEHPGIDKIAFTGSTAAGQDIQRRAAATMKRLSLELGGKSPVVILEDCPVPMAVEGAAGAIFFNHGQVCTAGSRLLVHRSIYEDVVQGLAHAANGMVLGEGMDPAGQMGPLISARQRDRVAGYVQGALDQGARLLAGGEAPDRDGFFYRPTVLADGTPSMTIFQEEVFGPVVIAMPFDTEEEALALANDSCFALGASVWTQNLAAANRFAGALRSGNVWINAHNILDPAVPFGGWKMSGYGRELGHSAVELYTEAKSITMPLL

SEQ ID NO: 3021 - protein, 477 aa, Rubrivivax gelatinosus PM1
MRDYLKFYIDGHWVDPVKAKSLDVVNPATEASAGRISMGTAADVDRAVKAARKAFASYSQTSVAERASLLERIIVEYKKRYADMAAAITEEMGAPVALSKDAQAAMGIAHLQIALDVLKNYKFQELRDTTLMVKEPIGVCGFITPWNWPVNQIACKVAPALAVGCTMVLKPSEIAPFSAYLWTEILHAAGVPAGVFNLVNGDGPTVGAALSSHPDVDMVSFTGSTRAGVEVARNAAPTVKRVHQELGGKSPNIILPDADFKHAITAGVQGVMLNSGQSCNAPTRMLVPNARLDEALAIAKEAAEATTVGDPASGAALGPVISATQWDKIQTLIHKGIEEGATVVAGGPGKPKGLETGYYVKPTVLGHVNNQMTVAREEIFGPVLTILGYDTVDQAVEIGNDTPYGLAAYVSGTDPEATRKVASRLRAGQVNINSVPLDFKAPFGGFKQSGNGREWGDHAFGEFLEVKAVLGYAPKAA

SEQ ID NO: 3022 - protein, 280 aa, Glycine max
MGVFSENPNPDPVVIRQVWASNLESEFQLIRELIDHYPFISMDTEFPGVVFRPHLDPTKPYNHRNNNRNRHSDHYRLLKSNVDALNLIQVGLTLTDAAGNLPDLAGNRSIWEFNFRDFDVARDAYALDSIDLLRRQGIDFARNATDGVDSTRFAELMMSSGLVCNDSVSWVTFHSAYDFGYLVKILTRRNLPTRLEEFLKTVKVFFGDNVYDVKHMMRFCDTLYGGLDRVARTLNVERAVGKCHQAGSDSLLTWHAFQKIVDIYFVKDEHRKHAGVLFGL

SEQ ID NO: 3023 - protein, 438 aa, Rubrivivax gelatinosus PM1
MSQPTREQQIAALEKDWAENPRWKGLKRGYSAADVVRLRGSLQPEYTIAKRGAEKLWAQCNGASKKGYVNAFGAITAGQAMQQAKAGVEAVYLSGWQVAADGNTSETMYPDQSLYAYDSVPTMVRRINNTFKRADEIQWSRGTGPGDKDFIDYFLPIVADAEAGFGGVLNAFELMKNMIAAGAAGVHFEDQLAAVKKCGHMGGKVLVPTQEACEKLIAARFAADVMGVSTIVLARTDAEAANLITSDHDANDKPFLTGERTQEGFYRVKNGLEQAISRGVAYAAYADLVWCETGTPDLGFAREFAQAVHAKHPGKLLSYNCSPSFNWKKNLDDKTIAVFQEKLSELGYKYQFITLAGIHINWYNTFQFAQAYAKGEGMKHYVEMVQEPEFKAREQGYTFVSHQQEVGAGYFDDVTTVIQGGSSSVKALTGSTEEEQFH

SEQ ID NO: 3024 - protein, 334 aa, Clostridium acetobutylicum ATCC 824
MKKNHTITLIPGDGIGPEVTGAAKKVIEAAGVSITWDIVEAGAKVMDEYGTPLPEYVLESIKKNKIALKGPITTPVGSGFRSVNVALRQTFNLYANVRPIKTYEGIPTRYKDVDLIIVRENTEDLYAGIEHKIGDYAAESIKIITREASERIADFAFDMAVKQNRKKVTAVHKANIMKFSDGLFLDCARKVAEGYKEKEFEDMIVDAMSMKLVQNPEKYDVLVMPNLYGDILSDMAAGLVGGLGVAPGANIGKEISIFESIHGSAPDIAGKNIANPTAAILSGVMMLRYIGELEAADKIDNAIKVVLKEGTKVTSDLGGNATTDEFANEVIKNI

SEQ ID NO: 3025 - protein, 1351 aa, Salmonella typhimurium LT2
MSQEYTEDKDVTLTKLSSGRRLLEALLILIALFAVWLMAALLSFNPSDPSWSQTAWHEPIHNLGGAPGAWLADTLFFIFGVMAYTIPVIIVGGCWFAWRHQSTDDYIDYFAVSLRLIGVLALILTSCGLAAINADDIWYFASGGVIGSLLSTTLQPLLHSSGGTIMLLCIWAAGLTLFTGWSWVSIAEKLGGWLLNILTFASNRTRRDDTWVDDEEYDDEYDEETDGVQRESRRARILRGALARRKRLAEKFSNPRGRQTDAALFSGKRMDDDEDIQYSARGVAADPDDVLFSGNRATQPEYDEYDPLLNGHSVTEPVAAAAAATAVTQTWAASADPIMQTPPMPGAEPVVAQPTVEWQPVPGPQTGEPVIAPAPEGYQPHPQYAQPQEAQSAPWQQPVPVASAPQYAATPATAAEYDSLAPQETQPQWQPEPTHQPTPVYQPEPIAAEPSHMPPPVIEQPVATEPEPDTEETRPARPPLYYFEEVEEKRAREREQLAAWYQPIPEPVKENVPVKPTVSVAPSIPPVEAVAAAASLDAGIKSGALAAGAAAAAPAFSLATGGAPRPQVKEGIGPQLPRPNRVRVPTRRELASYGIKLPSQRIAEEKAREAERNQYETGAQLTDEEIDAMHQDELARQFAQSQQHRYGETYQHDTQQAEDDDTAAEAELARQFAASQQQRYSGEQPAGAQPFSLDDLDFSPMKVLVDEGPHEPLFTPGVMPESTPVQQPVAPQPQPQYQQPQQPVAPQPQYQQPQQPVAPQPQYQQPQQPVAPQPQYQQPQQPVAPQPQYQQPQQPVAPQPQYQQPQQPVAPQPQYQQPQQPVAPQPQYQQPQQPTAPQDSLIHPLLMRNGDSRPLQRPTTPLPSLDLLTPPPSEVEPVDTFALEQMARLVEARLADFRIKADVVNYSPGPVITRFELNLAPGVKAARISNLSRDLARSLSTVAVRVVEVIPGKPYVGLELPNKKRQTVYLREVLDNAKFRENPSPLTVVLGKDIAGDPVVADLAKMPHLLVAGTTGSGKSVGVNAMILSMLYKAQPEDVRFIMIDPKMLELSVYEGIPHLLTEVVTDMKDAANALRWSVNEMERRYKLMSALGVRNLAGYNEKIAEAARMGRPIPDPYWKPGDSMDVQHPVLEKLPYIVVLVDEFADLMMTVGKKVEELIARLAQKARAAGIHLVLATQRPSVDVITGLIKANIPTRIAFTVSSKIDSRTILDQGGAESLLGMGDMLYSGPNSTMPVRVHGAFVRDQEVHAVVQDWKARGRPQYVDGITSDSESEGGGGGFDGGEELDALFDQAVNFVTQKRKASISGVQRQFRIGYNRAARIIEQMEAQGIVSAQGHNGNREVLAPPPFE

SEQ ID NO: 3026 - protein, 304 aa, Brucella melitensis 16M
MCWHKFARYWDVEIREIPMEPGRLFMGPEQMLEAVDENTIGVVPTFGVTYTGNYEFPEPLQDALDKLQKTKGLDIDIHVDAASGGFLAPFCAPDIPWDFRLPRVKSISASGHKYGLAPLGCGWVVWRDKEALPEELIFNVDYLGGQVGTFAINFSRPAGQVISQYYEFMRLGREGYTKVQQAAYRVAQYIAREIEPLGPYEFICAGEEKGGIPAVCFRIREGEDPGYSLYDLSERLRLTGWQVPAFALSGKASDITVMRVMCRRGFEMDLAALFIRDFKAGIEFFKSHPSPKITPSMGTGFHHT

SEQ ID NO: 3027 - protein, 80 aa, Glycine max
  misc_feature (53)..(53): Xaa can be any naturally occurring amino acid
  misc_feature (67)..(67): Xaa can be any naturally occurring amino acid
  misc_feature (72)..(72): Xaa can be any naturally occurring amino acid
NTTSSNRNASFTSLKSIAGYPTIKTNKHITFIASNGGRMQCMHVWPQFGKKKXENIYYLPDLEDAHXANEVXYLLTKGWI

SEQ ID NO: 3028 - protein, 167 aa, Brucella melitensis 16M
MKITLEVIMTGSNYPARDLIASVFGTEALQEIAASRGFREKEMQANAVYQIIHDELFLDGNARQNLATFCQTWDDDYVHKLMDLSINKNWIDKEEYPQSAAIDLRCVNMVADLWNAPKFADNATGTNTIGSSEACMLGGMAMKWRWRKKMQEMGKPTDKPNFVCGPV

SEQ ID NO: 3029 - protein, 178 aa, Zantedeschia aethiopica
MASSMMVSTAAVSRTSPAQSNMVVPFAGLHSSAAFPVTRKFADSSKLPSNGLRVRCMQVWPPEGKKKFETLSYLPPLTREQLGQEVDYLIRNGWIPCIEFCKVGFVYREYHNSPGYYDGRYWTMWKLPMFGCTDSSQVLKEVDECSKAYPDYFNRIIGFDNTRQVQCISFLTYKPEGN

SEQ ID NO: 3030 - protein, 478 aa, Mycobacterium avium subsp. paratuberculosis str. k10
MREYLKFYIDGQWVDPVRPNTFDVENPATEQVCGKISLGSAADVDVAVGAARRAFGRWSQSSREDRLDLLQAILAEYQKRADDLAAAVTEEIGAPPSLAAGPQVFLGIGHLTTAIEVLKNFPFTEQRGATLIAREPIGVCGLITPWNWPINQVAVKVYPALATGCTVVLKPSEVAPFSSYIFAEILAAAGVPAGVFNLVNGDGPGVGAALASHPDIDLVSFTGSTRAGVEVARNAAPTVKRVTQELGGKSPNIVLDDGGFADAVRAGVANMMPNSGQSCNAPSRMLVPASRMAEAISIAREVAEQVQVGDPDDATAIGPVASRAQFEKVQRLIQQGIDEGATVVAGGPGRPAGLDQGYYVKPTVFADVTNDMTIAREEIFGPVLCILGYDDLDHAVRLANDTDYGLAGYVSGADLDTAREVAGKIRAGWVTINHAFDLNAPFGGYKRSGNGREWSDFGFHEYLEVKSILGYAPAQGDQ

SEQ ID NO: 3031 - protein, 119 aa, Bacteroides thetaiotaomicron VPI-5482
MVKANATAPAINVFETEKEYKVELAAPGMTKEDFNVRIDEDNNLVISMEKKTENKEEKKEGRYLRREFSYSKFQQTMILPDNVDKEKISAAVENGVLSVQLPKISEEEVKKAEKQIEVK

SEQ ID NO: 3032 - protein, 447 aa, Glycine max
  misc_feature (18)..(18): Xaa can be any naturally occurring amino acid
VLASLHHLSNYMTNLTTXLNRLQDFPCYSVLEEHSVDVHDTIAVVVHKNSPRETHFRRAGPRQKVYFESEDVYACIVTCGGLCPGVNTVIREIVCGLYHMYGVHKVLGIEGGYRGFYSCNTIPLTPKVVNDIHKRGGTILGTSQGEGGNDTLKIVDSIQDRGINQVYILGGDGTQRGASVIFEEIRRRGLKVSVVGIPESVDNDIPVIDKSFGFDTAVEEAQRAINAAHVEAESTENGIGVVKLMGRHSGFISMYATLASRDVDCCLIPESPFYLEGPGGLFEFIRKRLAENGHMVIVISEGAGHELISESLSATNKQEASGNKLLQDVGLWLSQKIKDHFTKSQKMDITLKYIDPTYMIRAVPSIASDNVHCTLLAQSAVHGAMAGYTGFAVGTVNGKHAYIPFYRINEIEKKVVITDRMWARLLSSTNQPSFLNPKDITTHQTGN

SEQ ID NO: 3033 - protein, 298 aa, Triticum aestivum
NPFPPPVPTLLCLNINIVSEAAMKRSVRTIDDFVYTVIDKKIEQMGRDGQEFAKKQDILSRFLLEREKDPGCFDNKYLRDIILNFMIAGRDTTAGTLSWFLYVMCRDQRIQDKIAREVREATTGDRQNVGGLQEFTACLTEDAISSMHYLHAALTETLRLYPAVPTDVKCCFSDDTLPDGHAVRRGDMVNYQPYAMGRMKFLWGDDAEEFRPDRWLDDDGVFVPESPYKFTAFQAGPRICLGKEFAYRQMKIFAAVLVYLFRFETWEHDSRVGHRPMLTLKMDGPLYVRASPRRSTGN

SEQ ID NO: 3034 - protein, 250 aa, Zea mays
MYFRPPPKGPEWYASDAETGQAARPLYPMMLEDPRLRWAFIRKVYSILSIQMLLTVAVAAVVVFVRPVALFFVSTPGGFGLYIFLLILPFIVLCPLYYYYQHHPVNLLLLGLFTVAISFAVGLTCAFTKGEVILESAVLTAAVVLSLTAYTFWAAKRGHDFSFLGPFLFAAVMILMLFALIQLFFPLGRISLMIYGGLAALVFCGYIIYDTDNLIKRYSYDEYVWAAVALYLDVINLFLSLLTLFRAADS

SEQ ID NO: 3035 - protein, 441 aa, Mycobacterium smegmatis
MCMLKQSQPTRRPTRPQRTFTYPGGKLELPILKATEGTDSVALGKFLAETNLTTFDSGFMNTASTKSAITYIDGEQGILRYRGIPIEQLAEKSTFIEVSYLLIYGELPTPTQLEEFTTKIQRHTLLHEDLKRFFDGFPRNAHPMPVLSSAVNALSAYYQDSLDPKDDEQVELSTIRLLAKLPTIAAYAYKKSAGQPFLYPDNSLSLVENFLRMTFGFPAEPYEVNPDVAKALDMLFILHADHEQNCSTSTVRLVGSSQANLFTSISGGINALWGPLHGGANQAVLEMLDAIKADGGDTKKFMERVKNKEAGVKLMGFGHRVYKNYDPRAAIVKKTADQILETLGVQDDLLEIAKGLEEVALNDDYFIERKLYPNVDFYTGVIYRAMGFPTRMFTVLFALGRLPGWIAHWREMHEDPTTKIGRPRQLYTGYTERDYVPMSDR

SEQ ID NO: 3036 - protein, 431 aa, Mycobacterium smegmatis
MWLRRDLRLGDLPALQAARGTDDSSVLLCFVVDPRLARSSGERRLAFLFDSLRELDDKLDGRLLVVRGRPDEEIPRLARAVDAEAVHISADFTPFGRRRDEAVAEALGEVPLEATGSPYLVSPGRITKDDGEPYKVFTPFFRRWRDHGWRRPAESSVPSSAVVDPADIANSGRIAVPTAPVKLSFPAGEDAARQRWAEFVDADLADYDEIRDDPAADATSRMSAYLKYGNIHPRTLAVDLGKGKGAQAYLRELAFRDFYADVLWHWPHSLWHNWNRRFDAIELDTDDAAYERFEVWKAGRTGFPLVDAGMRQLNETGWMHNRVRMITASFLVKDLHLPWWWGAEYFLEQLVDGDMASNNHGWQWAAGTGTDAAPYFRVFNPQTQAKKFDPKGEYVRRWVGDVEADDYPGPIVDHSAERAEALRRYGEIGEA

SEQ ID NO: 3037 - protein, 148 aa, Pseudomonas syringae pv. syringae
DVIDVRGLTATGRFTFDPGFMSTASCDSKITYIDGDNGILLHRGYPIEQLAEQSDYLETCYLLLNGELPTVEQKAQFVAVVKNHTMVHEQLKTFFNGFRRDAHPMAVMCGVVGALSAFYHDSLDINNPQHREISAVRLVAKMPTLAAM

SEQ ID NO: 3038 - protein, 56 aa, Zea mays
MSDGTATCIDIILAIILPPLGVFFKFGCGVEFWICLILTFFGYLPGIIYAVWAITK

SEQ ID NO: 3039 - protein, 181 aa, Pringlea antiscorbutica
PGTRGILSDLTCDSDGKIDKFIGGESSLPLHELDSNGGGGRYFLGMFLGGAYEEALGGVHNLFGGPSVVRVSQSDGPHSFAVTRAVPGQSSADVLRAMQHEPEIMFQTLKHRAAELMHTKGGEEEEDDDEFNNAAACLDRSFHNMPYLANEPASLSNSLSAAINNLGFYYCDEDGFDYLSA

SEQ ID NO: 3040 - protein, 479 aa, Burkholderia cepacia R1808
MEQAKHFIAGEWTLPAQLEPIAVVDPSDGRPFATIARGTAPDIERAVAAARDAFAGPWGAASAAERGRVLMRLSARVTDCIEELATIEARDTGKPLKQARADAAALARYFEFYAGAADKLHGETLPYQAGYTVLTVREPHGVTGHIVPWNYPMQIFGRSVGAALAAGNACVVKPAEDACLSVLRVAELAIEAGLPAGALNVVTGYGHEAGAALARHPGIDHISFTGSPATGKLVAQMAAENHVPVTLELGGKSPQIVFADADLDAALPVLVSAIVQNGGQTCSAGSRVLIEHAAYEPLVERLATAFNALRVGPSRADLDCGPLINAKQQQRVWDFLSDAQHDGIPMAAQGQVVADAPESGFYQAPALLRDVPPSHRLAQEEVFGPVLAAMRFVDEEEAVALANGTPYGLVAGIWTRDGARQLRLARRVRAGQVFINNYGAGGGVELPFGGVGHSGHGREKGFEALYGFTALKTIAIRHG

SEQ ID NO: 3041 - protein, 268 aa, Archaeoglobus fulgidus DSM 4304
MDLLELIDDAAAMMPKERMVVVEEDVITVVGDVHADIEALRKIEREIEGLAIFLGDYADRGDYPVECYEKVLRLFLEGKALLLRGNHESTGVYPHQLPYQLREKFGERGEEVYESLIRMWNKMPLSAIVEGEIWMAHGGVPTKQCRIHAEGISRKEIERPDDITALEIMWNDPWEREECGENYNRGVMYFFGKKNSEMLLKELGVKVIIRAHEPQKVLKAEQDGRVVTIGSCALPYSISEFALLKIDFSRGFKNGVDLIRKFGSIYNV

SEQ ID NO: 3042 - protein, 557 aa, Glycine max
EAEVAEVQAWWNSERFRLTKRPYTARDVVSLRGNLRQTYASNEMAKKLWCLLKNHQANGTASRTFGALDPVQVTQMAKHLDTIYVSGWQCSATHTTSNEPGPDLADYPYDTVPNKVEHLFFAQQYHDRKQREERMRMSREERARTPYVDYLRPIIADGDTGFGGTTATVKLCKLFVERGAAGIHIEDQSSVTKKCGHMAGKVLVAISEHINRLVAARLQFDVMGVETVLVARTDAEAANLIQSNIDTRDHQFILGVTNPNLKGKSLATLMQQGMAAGKSGAELQALEDEWLSKAQLKTLSEAVVEAIERQNIGEEEKRRKLNEWMHHSSYERCLSNEEGREIAEKLGVRNLFWDWDLPRTREGFYRFKGSVIASVVRGWAFSPHADVIWMETASPNVIECTQFSEGVRSKHPQMMLGYNLSPSFNWDASGMSDEQMRDFIPKIAKLGYVWQFITVGGLHSNALITSTFARDFANRGMLAYVERIQREERNNGVDTLAHQKWAGANYYDRYLKTVQGGVASTAAMGKGVTEEQFKESWTRPGAVEIDRGSIVVAKARM

SEQ ID NO: 3043 - protein, 110 aa, Quercus suber
SLDIWDPFEGFSAVASVPPSARETTAFATARIDWKETPEAHIFKADLPGLKKEEVKVEVEDGNVLQISGERSKEHEEKNDKWHRVERSCGKFMRRFRLPENAKVDQVKAN

SEQ ID NO: 3044 - protein, 347 aa, Escherichia coli K12
MKNSKAILQVPGTMKIISAEIPVPKEDEVLIKVEYVGICGSDVHGFESGPFIPPKDPNQEIGLGHECAGTVVAVGSRVRKFKPGDRVNIEPGVPCGHCRYCLEGKYNICPDVDFMATQPNYRGALTHYLCHPESFTYKLPDNMDTMEGALVEPAAVGMHAAMLADVKPGKKIIILGAGCIGLMTLQACKCLGATEIAVVDVLEKRLAMAEQLGATVVINGAKEDTIARCQQFTEDMGADIVFETAGSAVTVKQAPYLVMRGGKIMIVGTVPGDSAINFLKINREVTIQTVFRYANRYPVTIEAISSGRFDVKSMVTHIYDYRDVQQAFEESVNNKRDIIKGVIKISD

SEQ ID NO: 3045 - protein, 262 aa, Schizosaccharomyces pombe
MSIVNILSVNVLNNPAKFSDPYKFEITFECLEPLKSDLEWKLTYVGSATSQSYDQILDTLLVGPIPIGINKFVFEADPPNIDLLPQLSDVLGVTVILLSCAYEDNEFVRVGYYVNNEMEGLNLQEMDDAEIKKVKVDISKVWRSILAEKPRVTRFNIQWDNPDFDDAPPVQPDADEEEEEEEADEMEEEFDEEGEGDEEEEEEDDGDGDGEGDGDGEGENDGKGSEEEEEEEIDIEEEEEESALANASAAEEKPEEKPETSQ

SEQ ID NO: 3046 - protein, 489 aa, Bordetella pertussis Tohama I
MTQLTQPLSRAELLRDACYIDGKWVGAGNGPSIPVDNPSTGKTIISVPKLGRKEAEQAIDAAEAALPAWSARTGKERAAILLKWAQLMMENQQDLAVIMTSEQGKPVPEAAGEIAYAASFLEWFAEEAKRIDGDILQSPKGGQRLMVLKQPIGVTAAITPWNFPAAMITRKVGPALAAGCTMVVKPAQQTPLTALALAVLAVLAGVPAGVFQVVTGSSREIGAALCESEVVRKLSFTGSTEVGRTLMEQCAPTIKKLSLELGGNAPFIVFDDADLDRAIDGILASKYRNAGQTCVCANRIYVQAGVYEEVAKRLVEKVNAMKVGDGFEQGVTQGPLIDTAAVAKVQEHIADATAHGAKVIAGGEPHALGGSFFQPTVVRDVTQSMRFAVEETFGPVAPLFKFDSEDEVIGMANNTIFGLAAYFYTRDYARIWRVSEALEYGIVGINTGIISNEVGPFGGVKQSGLGREGSKYGIEDYLELKYLCVDLGA

SEQ ID NO: 3047 - protein, 444 aa, Bacillus cereus ATCC 14579
MKQTKLTGRIVVPTDPDYDVARMNLNLSIPKLPCIIVFCQNNKDVCNALKWARERHIPFRLRSGRHSYENFSLLNRGLIIDVSEMHRITVNTEKLTATIEAGANLGTVYKELWNYGVTIPAGTSASVGVVGLALGGGIGMLSRLFGLTCDQLMEVEMVQACGKFGAKLIRANEQENSNLFWACRGGGGGSFGIVTSLTFRVHPIKNVSIFSITWEWEDFIAAFQAWQNWAPYIDERLTSSIELFAKQRNKIEAQGEFVGSPSELHSLLSPLLETGSPSLFIEEVPYIKAVEFFNGGNIPENFKRSGSYVYKPIPLKGIQIMQSFLSHAPNKDASIWHQSLIGAVENISPNETAYFHRKAIIAQEYITSWKCDDEENRNIRWVKGLRESLDPYTLGDYVNWPDIDIKNWQTSYYGSNFHRLRKVKTMYDPCDVFHFQQSIPPFHT

SEQ ID NO: 3048 - protein, 454 aa, Arabidopsis thaliana
MVIKGMRVGKYELGRTLGEGNSAKVKFAIDTLTGESFAIKIIEKSCITRLNVSFQIKREIRTLKVLKHPNIVRLHEVIILLVLASKTKIYMVLECVTGGDLFDRIVRFLLAPVTVLLVSKRLVSKGKLSETQGRKMFQQLIDGVSYCHNKGVFHRDLKLENVLLDAKGHIKITDFGLSALSQHYREDGLLHTTCGSPNYVAPEVLANEGYDGAASDIWSCGVILYVILTGCLPFDDANLAVICRKIFKGDPPIPRWISLGAKTMIKRMLDPNPVTRVTIAGIKAHDWFKHDYTPSNYDDDDDVYLIQEDVFMMKEYEEEKSPDSPTIINAFQLIGMSSFLDLSGFFETEKLSERQIRFTSNSLAKDLLENIETIFTEMGFCLQKKHAKLKAIKEESTQKRQCGLSVTAEVFEISPSLNVVELRKSHGDSSLYKQLYERLLNELGSSSQVQELLA

SEQ ID NO: 3049 - protein, 440 aa, Sorghum bicolor
MSTTKVKRRVGKYELGRTIGEGTFAKVRFARDTVTGEAVAIKILDKDKVLKHKMVEQIKREISTMKLIKHPNVVRIYEVMGSKTKIYIVLEFATGGELFQRIVNHGRMREDEARRYFQQLINAVDYCHSRGVYHRDLKPENLLLDSYGNLKVSDFGLSALSQQMKDDGLLHTTCGTPNYVAPEVLEDQGYDGAMADLWSCGVILFVLLAGYLPFEDSNLMTLYKKISNAEFTFPPWTSFPAKRLLTRILDPNPMTRITIPEILEDEWFKKGYKRPEFDEKYDTTLDDVDAVFNDSEEHHVTEKKEEEPVALNAFELISMSAGLNLGNLFDSEQEFKRETRFTSKCPPKEIVRKIEEAAKPLGFDVQKKNYKLRLEKVKAGRKGNLNVATEILQVAPSLHMVEVRKAKGDTLEFHKFYKNLSKTLKDVVWKSDDTQMLHAA

SEQ ID NO: 3050 - protein, 342 aa, Zea mays
  misc_feature (186)..(186): Xaa can be any naturally occurring amino acid
MDPNGLKTGGLLLPTIERRCTSPPSVIVIGGGISGVAAARALSNSSFKVTVLESRDRIGGRIHTDNSFGCPIDMGASWLHGVCNENPLAPLISYLGLRLYRTSDDNSVLYDHDLESYALFDKDGNQVPKETVDKVGETFERILEETVKVRDEQEHDMPLLQAISIVFERHPHLKLEGLDDQVLQWXCVCRLDPRVRADADEISLKNWDQERVLTGGHGLMVNGYYPVIEALAQGLDIRLNQRVTEITRQHNGVKGTTEDGTSYLADACIISVPLGVLKANVIKFEPELPQWKSSAIADLGVGTENKIAMHFDRVFWPNVEVLGMVGPTPKACGYFLILHKAT

SEQ ID NO: 3051 - protein, 440 aa, Sorghum bicolor
MSATKVKRRVGKYELGRTIGEGTFAKVRFAKNTETGEPVAIKILDKEKVLRHKMVEQIKREISTMKLIKHPNVVRIYEVMGSKTKIYIVLEYVTGGELFDTIANHGRMREDEARRYFQQLINAVDYCHSRGVYHRDLKPENLLLDSYGNLKVSDFGLSALSQQIKDDGLLHTTCGTPNYVAPEVLEDQGYDGAMADLWSCGVILFVLLAGYLPFEDSNLMTLYKKISNAEYTFPPWTSFPAKRLLTRFLDPNPMTRITIPEILEDEWFKKGYKRPEFDEKYDTPLDDVDAVFNDSEEHHVTEKKEEEPVVLNAFELISRSAGLNLGNLFDSEQEFKRETRFTSKCPPKEIVRKIEEAAKPLGFGVQKKNYKLRLEKVKAGRKGNLNVATEILQVAPSLHMVEVRKAKGDTLEFQKFYKNLSKTLKDVVWKSEDLQMQPAS

SEQ ID NO: 3052 - protein, 315 aa, Triticum aestivum
  misc_feature (172)..(174): Xaa can be any naturally occurring amino acid
  misc_feature (248)..(248): Xaa can be any naturally occurring amino acid
LQYEVLQWCICRLEAWFATDVDNISLKNWDQEHVLTGGHGLMVNGYDPVIKALSRDLDVHLNHRVTKIIQRYNKVIVCVEDGTSFVADAAIITVPLGVLKANIIKFEPELPYWKLSAISDLGVGLENKIALRFNTVFWPNVEVLGRVAQTSNACGYFLNLHKATGHPVLVCXXXAGRFAYEMEKLSDEESVNFVMSQLRRMLPGATEPVQYLVSRWGTDPNSLGSYSCDLVGKPADLYERFCAPGGQXLSFAGEAACIDHSGSVHGAYSSGIDAAEDCRRRLSTQLGISDLFQVGKIVMREEMTEVMVPLQISRL

SEQ ID NO: 3053 - protein, 442 aa, Ralstonia eutropha JMP134
MTAADVQAAIAAADRALPAWRATSSRERSRLLRRWFDLCMAHQEDLATILTLEQGKPLKESRGEIAYGSGFIEWFSEEARRIYGDVIPAPSSDRRIIVIKQPVGVVAAITPWNFPNAMITRKAGAALAAGCTIVIKPASATPFSALALAALAKEAGIPDGVLNVVTGSASVVGGELTSSPVVRKLSFTGSTDVGKTLLEQCAGTVKKVSMELGGNAPFLIFDDADLDAAVAGVMASKFRNAGQTCVCANRIFVQDGVYDAFAEKLRIAVEAQVVGDGMAPGVDLGPLIDDAAIEKVREHIYDAVSLGAQVFTGGRAHALGGRFFKPTILTDVSPKAKLMNEETFGPLAPLIRFKTEEEAVAMANDTPFGLAAYFYTTNYARSWRVAEALECGIVGLNEGLISTEVAPFGGVKESGVGREGSKYGIEDYVEVKYICAGGLALR

SEQ ID NO: 3054 - protein, 148 aa, Triticum aestivum
HLMFLSARNESSESEDIQELINSSLKCNASTPADDMESGRGGAGAAGSTSSSPSPPVVLPSEQKARYSREEDPGRCSCSDSFFGKYFSFLLLMFVTASLVILPLVLPPLPPPPSMLMLVPVAMLLMLLVLAFMPTSGGRGATGPTAYL

SEQ ID NO: 3055 - protein, 267 aa, Yersinia pestis KIM
MSIPVFGLGTFRLQDQIVIDSVSQALTLGYRAIDTAQIYENEAPVGQAIQESGINRDELFITTKIWIANLSKDKLIPSLRESIQKLKTDYVDLTLIHWPSPNDEVSVAEFMSELLKAKGLGLTRQIGISNFTIDLMKQAIAAVGAEEIATNQIELSPLLQNRNVVDFAKQNGIAVTSYMTLAYGKALAEPVIKTIAEQHGATPAQVILSWAMQLGYGVIPSSTKAANLASNLLAQKLCLNAADMALIATLDRNERLVSPDGLAPKWD

SEQ ID NO: 3056 - protein, 591 aa, Zea mays
MCGILAVLGVAEVSLAKRSRIIELSRRLRHRGPDWSGLHCHEDCYLAHQRLAIIDPTSGDQPLYNEDKTVVVTVNGEIYNHEELKAKLKTHEFQTGSDCEVIAHLYEEYGEEFVDMLDGMFSFVLLDTRDKSFIAARDAIGICPLYMGWGLDGSVWFSSEMKALSDDCERFITFPPGHLYSSKTGGLRRWYNPPWFSETVPSTPYNALFLREMFEKAVIKRLMTDVPFGVLLSGGLDSSLVASVASRHLNETKVDRQWGNKLHTFCIGLKGSPDLKAAREVADYLSTVHHEFHFTVQEGIDALEEVIYHIETYDVTTIRASTPMFLMSRKIKSLGVKMVISGEGSDEIFGGYLYFHKAPNKKEFHEETCRKIKALHLYDCLRANKATSAWGVEARVPFLDKSFISVAMDIDPEWKMIKRDLGRIEKWVIRNAFDDDERPYLPKHILYRQKEQFSDGVGYSWIDGLKDHASQHVSDSMMMNAGFVYPENTPTTKEGYYYRMIFEKFFPKPAARSTVPGGPSVACSTAKAVEWDASWSKNLDPSGRAALGVHDAAYEDTAGKTPASADPVSDKGLRPAIGESLGTPVASATAV

SEQ ID NO: 3057 - protein, 122 aa, Citrullus lanatus var. lanatus
LSRLPGGPEVPFHPGREDKPEPPPEGRLPDATKGSDHLRDVFYTMGLSDQDIVALSGGHTLGRAHKERSGFEGPWTSNPLIFDNSYFTELLSGEKEGLLQLASDKALLSDPVFRPLVEKYAR

SEQ ID NO: 3058 - protein, 403 aa, Streptomyces coelicolor A3(2)
MLSSQSAQIVRDTLPTVGASLGTITDLFYRRMFEERPELLRDLFNRANQASGVQREALAGAVAAFATALVKHPDERPDAVLGRIANKHASLGITSDQYTLVGRHLLAAVAEVLGDAVTPAVAAAWDEVYWLMANALIAMEARLYARSDVEDGSVWQSMEIVERHEETPDTASFVLRPADGSPTRPFVPGQYVSVRAELPDGAHQIRQYSLSSAPGGGTWRFTVKRERSLDGQVPDGEVSTWLHTHARPGDVLRVSLPFGDLLLPEGDGPLLLASAGIGVTPMLAMLEHLATAAPDRPVTVVHADRSPALHAHRLELTALVERLPHASLHLWYEDTADHPDASADHVNEGWADLTGLSPVPGTTAFLCGPLSFMKAVRTDLLAHGLSPRAIHYEVFGPDLWLSK

SEQ ID NO: 3059 - protein, 121 aa, Zea mays
  misc_feature (42)..(42): Xaa can be any naturally occurring amino acid
  misc_feature (65)..(65): Xaa can be any naturally occurring amino acid
  misc_feature (84)..(84): Xaa can be any naturally occurring amino acid
MSASQSSMSGAGEPGARAVVWFRWDLRVEDNPALAAAARAAXGEVVPAYVWAPEEDGAYYPRRLXPRWWLSQSLKHLDASLRRXGAARLVTRRSNDAGAALLDLVRCTGATHLFFNTSTVR

SEQ ID NO: 3060 - protein, 258 aa, Oryza sativa
MRKKLGTRFPAARIKKIMQADEDVGKIALAVPVLVSRALELFLQDLIDRTYEITLQSGAKTLNSFHLKQCVRRYSSFDFLTEVVNKVPDLGGADSCGDDRALPRRRKALPNGSDPENEESRSSKMAVRSANISPRGRGRGRGRGRGRPPTKRKEVGYVQFEDESSMFADQGEALPGEETVPETIHGTESVPPSTHPPAEAPSAAEIPAPNPKVEEAKNDDHQPDWPMPDAIGNIGVGPSGFGHLTVQVDEDEDYDNED

SEQ ID NO: 3061 - protein, 339 aa, Salmonella typhimurium LT2
MKSIVIEKPNTLTIETRALPQPAPGEVRIKVKLAGICGSDSHIYRGHNPFAKYPRVIGHEFFGVIDAVGDNVNHDRIGERVSVDPVISCGHCYPCSVGKPNVCTSLVVLGVHRDGGFSEYAVAPARNAHRIPDNIADHHAVMVEPFTIAANVTGQVNPTEQDVALIYGAGPMGLTTVQALKGVYQVKTVIVVDRIEERLAMAKQSGADWTLNNGQHSLAEFLQQKALKPTLIVDAACHPAILQEAITLASPAARIVLMGFSSDPCEIVQQGITGKELAIYSSRLNANKFPVVIDWLNKGLIDPDKLITHTFDYQHVTDAIELFEKDQRQCCKVLLTFAK

SEQ ID NO: 3062 - protein, 373 aa, Candida maltosa
MSVKTKTITILPGDHVGTEIVNEAIKVLEAIEAATPYQKIHFDFKHHLIGGAAIDATGVPLPDDALESAKKSDAVLLGAVGGPKWWTGALRPEQGLLKIRKELNLYANIRPCNFASDSLLELSPLRPEVVKGTNLIIVRELVGGIYFGDREEQEESEDKQTAWDTEKYTVDEVTRITRMAAFMPLQDNPPLPIWSLDKANVLASSRLWRRTVDKVISEEFPTLSVQHQLIDSAAMILIQNPTKLNGIIITSNMFGDIISDEASVIPGSLGLLPSASLASLPDTNTAFGLYEPCHGSAPDLPANKVNPIATILSAASMLRLSLDCVKEAEALEEAVKQVLDKGIRTADLRGTRSTTEVGDAIVEAVTKILKEKA

SEQ ID NO: 3063 - protein, 608 aa, Glycine max
MDTKIGSLDAPKPNSNDVVSCNLTSSAAIQPCLPATVINGAGCSDSTLGGHLARRLVEIGVTDVFSVPGDFNLTLLDHLIAEPALHLVGCCNELNAGYAADGYARARGVGACVVTFTVGGLSVLNAIAGAYSENLPLICIVGGPNSNDYGTSRILHHTIGLPDFSQELRCFQTITCFQAVVNNLEDAHELIDTAISTALKESKPVYISISCNLPGIPHPTFSRDPVRFSLSPRLSNKMGLEAAVEAAAEFLNKAVKPVLVGGPKLRVATASDAFVELADACGYALAVMPSAKGQVPEHHPHFIGTYWGAVSTAFCAEIVESADAYLFAGPIFNDYSSVGYSLLLKKEKAIIVQPDRVVIANGPAFGCVLMKDFLKALAKRLKHNNTAYENYHRIFVPDGHPLKAAPREPLRVNVLFQHIQNMLSGETAVIAETGDSWFNCQKLKLPKACGYEFQMQYGSIGWSVGATLGYAQAVPEKRVIACIGDGSFQVTAQDVSTMLRCGQKTIIFLINNGGYTIEVEIHDGPYNVIKNWNYTGLIDAIHNGEGKCWTAKVFCEEELVEAIATATGPKKDSLCFIEVIVHKDDTSKELLEWGSRVSAANSRPPNPQ

SEQ ID NO: 3064 - protein, 358 aa, Escherichia coli K12
MKALARFGKAFGGYKMIDVPQPMCGPEDVVIEIKAAAICGADMKHYNVDSGSDEFNSIRGHEFAGCIAQVGEKVKDWKVGQRVVSDNSGHVCGVCPACEQGDFLCCTEKVNLGLDNNTWGGGFSKYCLVPGEILKIHRHALWEIPDGVDYEDAAVLDPICNAYKSIAQQSKFLPGQDVVVIGTGPLGLFSVQMARIMGAVNIVVVGLQEDVAVRFPVAKELGATAVVNGSTEDVVARCQQICGKDNLGLVIECSGANIALKQAIEMLRPNGEVVRVGMGFKPLDFSINDITAWNKSIIGHMAYDSTSWRNAIRLLASGAIKVKPMITHRIGLSQWREGFDAMVDKTAIKVIMTYDFDE

SEQ ID NO: 3065 - protein, 497 aa, Aspergillus nidulans FGSC A4
MTPSLQRQLFYDGKPQHASSGRTFQSINPADATLLAEIPVASQSDIDAAITAAERAFPSWAQTPPIARARILQKAAALLRERNDEIARVETLDSGKAYSETSTVDVVTGADVLEYYANLVGGGGLNGETTQLREEAWVYSKKAPLGVCVGIGAWNYPIQIALWKSAPCLAAGNTMVYKPSEFTSLHGQTLAEIYKEAGLPDGVFNVVYGAGDVGSYLTSHPTVAKVSFTGQVSTGMKVSGAAAGNMKYVTMELGGKSPLLILPDADLENAVDGAMMANFYSTGQVCTNGTRVFIPKSMKKDFESRLVEKMQYIRPGPLFDENTNFGPLSSAVHQEKVTAYIRHGIEQDKATLLYGGLGKPSLPKDLEAGFWVRPTIFTDCTDDMRIVKEEIFGPVMSILTYDSVEEAVKRANTTELGLAAGVFTKDLNLAHRIIDQLEAGITWVNTWGESPAEMAVGGWKKSGLGVENGRRGIEAWVRNKSTLVDMGNAVATVFAKL

SEQ ID NO: 3066 - protein, 292 aa, Helicobacter hepaticus ATCC 51449
MAKNNKTQVILNEFFTLNNGNKIPKLGLGTWRIDDNVVEAAVREAFKVGYRHIDTAQAYGNERGVGEAVRKSKIKREELFITSKIRAEYKDYKSASASIDTSLKTMKLDFIDLMLIHSPQPWNSFRKGDYFKENVEVYNALEDAQKAGKVRSIGVSNFLQKDLENILKNCKTKPAANQILCHIGNTPFTLLDYCKKQNILAEAYSPIAHGELLKDPRVIELAKKYNVSPAQICIRYTLELGLVSLPKSKTPKYIAENAQVDFTFSKADLQTLKKLTFKDYGEHSYFPVFGGK

SEQ ID NO: 3067 - protein, 250 aa, Lycopersicon esculentum
MGKSYPTVSAEYLKAVDKCKRKLRALIAEKNCAPIMLRLAWHSAGTYDVCSKTGGPFGTMRFKAEQAHGANNGLDIALRLLEPIREQFPTLSHADFHQLAGVVAVEVTGGPDVPFHPGREDKPEPPVEGRLPDATKGCDHLRDVFVKQMGLSDKDIVALSGAHTLGRCHKERSGFEGPWTANPLIFDNSYFTELLSGEKEGLLQLPSDKALLSDPAFRPLVEKYAADEDAFFADYAKAHLTLSELGFAEA

SEQ ID NO: 3068 - protein, 368 aa, Oryza sativa (japonica cultivar-group)
MGSTAADMAAAADEEACMYALQLASSSILPMTLKNAIELGLLETLQSAAVAGGGGKAALLTPAEVADKLPSKANPAAADMVDRMLRLLASYNVVRCEMEEGADGKLSRRYAAAPVCKWLTPNEDGVSMAALALMNQDKVLMESWYYLKDAVLDGGIPFNKAYGMTAFEYHGTDARFNRVFNEGMKNHSVIITKKLLDLYTGFDAASTVVDVGGGVGATVAAVVSRHPHIRGINYDLPHVISEAPPFPGVEHVGGDMFASVPRGGDAILMKWILHDWSDEHCARLLKNCYDALPEHGKVVVVECVLPESSDATAREQGVFHVDMIMLAHNPGGKERYEREFRELARAAGFTGFKATYIYANAWAIEFTK

SEQ ID NO: 3069 - protein, 126 aa, Zea mays
MTRVIHDSGDDMQKEALDLVSSDVNFPKGHFPDYRIGPNNQIIDPEETHEAVPLKEIVAKETAQLLEQHKRLSVRDLKEKFEKGLSGASKLSEEVDFFPETALQQPIVEKKMYKHMGSEMQSLWAA

SEQ ID NO: 3070 - protein, 401 aa, Chloroflexus aurantiacus
MQAVIAVLPGDGIGPEVVAEGVKVLQAIARRFGHQFTFHEALIGGCAIDATGEPLPAATITLCQSADAVLLGAVGGPKWDDPQARVRPEQGLLGIRKALGLFANLRPVRIYPQLINASPIRPERLQGVDLIVVRELTGGIYFGEKRRERTADGEWASDLCIYTEEEIVRVVRVAARLARQRRGKVTLVDKANVLETSRLWRSITTRLMQTEFPDLQFETMLVDACAMHLIRRPADFDVIVTENMFGDILTDEASMLAGSMGMLPSASLADGRLGLYEPIHGSAPDIAGQGKANPLATILSVAMLLRYSLDLTAKRLCRSGSGSGSTANVTAFAFRTAGSAEPRIRILDALMADATRPSHHLTEGPRNCCGPPENWQSATFSKNSAPQFGKRPICDHKNGGD

SEQ ID NO: 3071 - protein, 95 aa, Brassica napus
MTMDDATPSQRRSSGSSSNDAAAPLLPKSQGEEVAAYDEFNGASFSGAVFNLSTTIIGAGIMALPATMKILGLVLGIAMIVVMAFLTDASIEFLL

SEQ ID NO: 3072 - protein, 132 aa, Chloroflexus aurantiacus
MSKIDSIIEMIEGLNVLELVELKKKMEEKWGVTAAAPVMAMGAAMPVAAAGDGAAAAAPVEEKTEFDVILKEAGPNKIQVIKVVRELTSLGLKEAKDLVEGAPKPVREGVSKEEAEAAKAKLTEAGAVVEIK

SEQ ID NO: 3073 - protein, 339 aa, Ralstonia metallidurans CH34
MPEGIRVMDATARRFGIDFQWDHFDFSSYAYYERHGKMLPDDWFDTLVKYDAIYFGAVGWPAKIADHVSLWGSLLQFRRSFDQYVNLRPVRLMPGIKSPLADRKPGDIDFYVVRENTEGEYSSIGGRMFPGTEREIVMQETVMSRHGVDRILKFAFELAQKRPKKHLTSATKSNGISITMPYWDERVEAMAANYPGMKVDKYHIDILTAHFVQHPDWFDVVVASNLFGDILSDLGPACTGTIGVAPSGNINPDKVYPSLFEPVHGSAPDIAGQGIANPIGQIWCGAMMLEHLGHAEAGAAVLAAIEQVLAAGPGHAPLTRDIGGTASTADLGQAIAEAL

SEQ ID NO: 3074 - protein, 322 aa, Parachlamydia sp. UWE25
MEKNKLDQLKSMTTIVIDTGDIEAIKEYSPTDATTNPSLILSAVEKPAYKPLMEEAYHYSQKAKSSGEQISLFLDKLFVNVGCEILKLIPGRVSTEVDARLSFDVEGSIQKAQSLIALYKEMGIEKERILIKLASTWEGGLAAKQLEKMGIHCNMTLLFSMPQAIHCAEAQATLISPFVGRILDWYKKHDNVPGYAPAEDPGVKSVTTIYHYFKKFSYKTQIMGASFRNKEEILELAGCDLLTISPHFLQELHDASGNVEQKLDAAKSKQLNIEPIKMNEKAFRLALNDDAMATEKLSEGIRNFAKDAQKLEKMLRTTYKIG

SEQ ID NO: 3075 - protein, 197 aa, Nicotiana tabacum
MSASRFIKCVTVGDGAVGKTCLLISYTSNTFPTDYVPTVFDNFSANVVVNGSTVNLGLWDTAGQEDYNRLRPLSYRGADVFILAFSLISKASYENVSKKWIPELKHYAPGVPIVLVGTKLDLRDDKQFFIDHPGAVPITTAQGEELRKTIGAPAYIECSSKTQQNVKAVFDAAIKVVLQPPKTKKKKGKSQKSCSIL

SEQ ID NO: 3076 - protein, 158 aa, Glycine max
MDMRLMDLDSPFFNTLHRIMDLTEDAEKNLNAPTRTYVRDAKAMAATPADVKEYPNSYVFVIDMPGLKSGDIKVQVEDDNVLLISGERKREEEKEKEGGKYLRMERRLGKLMRKFTLPENANTDAISAVCQDGVLTVTVNKLPPPQPKKPKTIEVNIA

SEQ ID NO: 3077 - protein, 373 aa, Candida maltosa
MSVKTKTITILPGDHVGTEIVNEAIKVLEAIEAATPYQKIHFDFKHHLIGGSAIDATGVPLPDDALESAKNSDAVLLGAVGGPKWGTGALRPEQGLLKIRKELNLYANIRPCNFASDSLLELSPLRPEVVKGTNLIIVRELVGGIYFGDREEQEESEDKQTAWDTEKYTVDEVTRITRIAAFMALQHNPPLPIWSLDKANVLASSRLWRRTVDKVISEEFPTLSVQHQLIDSAAMILIQNPTKLNGIIITSNMFGDIISDEASVIPGSLGLLPSASLASLPDTNTVFGLYEPCHGSAPDLPANKVNPIATILSAASMLRLSLDCVKEAEALEEAVKQVLDKGIRTADLRGTSSTTEVGDAIVEAVTKILKEKA

SEQ ID NO: 3078 - protein, 449 aa, Bacillus cereus ATCC 10987
MKTKQTDELLAKDEQYVWHGMRPFSPNSTMVGAKAEGCWVEDIQGKRYLDGMSGLWCVNSGYGRKELAEAAYKQLQTLSYFPMSQSHEPAIKLAEKLNEWLGGEYVIFFSNSGSEANETAFKIARQYYAQKGEPHRYKFMSRYRGYHGNTMATMAATGQAQRRYQYEPFASGFLHVTPPDCYRMPGIERENIYDVECVKEVDRVMTWELSETIAAFIMEPIITGGGILMPPQDYMKAVHETCQKHGALLISDEVICGFGRTGKAFGFMNYDVKPDIITMAKGITSAYLPLSATAVKKEIYEAFKGKGEYEFFRHINTFGGNPAACALALKNLEIMENENLIERSAQMGSLLLEQLKEEIGEHPLVGDIRGKGLLVGIELVNDKETKEPIDNDKIASVVNACKEKGLIIGRNGMTTAGYNNVLTLAPPLVISSEEIAFVVGTLKTAMERI

SEQ ID NO: 3079 - protein, 142 aa, Triticum aestivum
  misc_feature (28)..(28): Xaa can be any naturally occurring amino acid
  misc_feature (44)..(45): Xaa can be any naturally occurring amino acid
  misc_feature (109)..(109): Xaa can be any naturally occurring amino acid
RGFAFVQDVSYAGFLDRVRDGELKLPRXSGLWDVPHPWLNLFLXXRSRVLDFAAGVFHGILRRDSTTGAMGPVLVYPMNRNRWDADTSAVLPGEEDGVLHRGDLRSSVXASTDGGRQLLRRLEEQNEEILRFCEEAGIPCVQ

SEQ ID NO: 3080 - protein, 564 aa, Zea mays
MAAAAVTSNGGAVAANGPAPGRLASVYSEVQTSRLLHTLPLPSVLRSNFSVVDGPASSAAGNPDEIAKLFPNLFGQPSASLVPSAEPAATRPLKVGVVLSGGQAPGGHNVICGIFDYLQERAKGSTLLGFKGGPAGIMKCKYVELTSDFVYPYRNQGGFDMICSGRDKIETPEQFKQAEDTANKLDLDGLVVIGGDDSNTNACLLGEYFRSRNLKTRVIGCPKTIDGDLKCKEVPTSFGFDTACKIYSEMIGNVMTDARSTGKYYHFVRLMGRAASHITLECALQTHPNAALIGEEVAAKKETLKNVTNYITDIICKRADLGYNYGVILIPEGLIDFIPEVQKLIAELNEILAHDVVDEAGAWKSKLQAESRELFEFLPKTIQEQLMLERDPHGNVQVAKIETEKMLISMVETELEKRKAEGRYSAHFRGQAHFFGYEGRCGLPTNFDSNYCYALGYGAGALLQSGKTGLISSVGNLAAPVEEWTVGGTALTSLMDVERRHGKFKPVIKKAMVELDAAPFKKYASMRDEWALKNRYISPGPIQFSGPGSNDSNHTLMLELGAAL

SEQ ID NO: 3081 - protein, 112 aa, Glycine max
  misc_feature (18)..(18): Xaa can be any naturally occurring amino acid
  misc_feature (26)..(26): Xaa can be any naturally occurring amino acid
  misc_feature (86)..(86): Xaa can be any naturally occurring amino acid
TTVNRAGAGMADPLTALXSMAVCPTXNTIIDFTSFASNAGRAQYMQMWPPVGYKKFETLSYLPDLDDAHLGKDGEYLLRTGWSPRXEFELEHGFLCREHNRAPEYYDGRYWT

SEQ ID NO: 3082 - protein, 148 aa, Pseudomonas syringae pv. syringae
DVIDVRGLTATGRFTFDPGFMSTASCDSKITYIDGDNGILLHRGYPIEQLAEQSDYLETCYLLLNGELPTAQQKAQFVAVVKNHTMVHEQLKTFFNGFRRDAHPMAVMCGVVGALSAFYHDSLDINNPQHREISAVRLVAKMPTLAAM

SEQ ID NO: 3083 - protein, 167 aa, Citrus sinensis
MASQSKTSVHDFTVKDAKGQDVDLSIYKGKLLLIVNVASQCGLTNSNYTELSQLYDKYKNQGLEILAFPCNQFGAQEPGDNEQIQEFACTRFKAEFPIFDKVDVNGDNAAPLYKHLKSSKGGLFGDSIKWNFSKFLVDKEGNVVERYAPTTSPLSIEKDIKKLLETA

SEQ ID NO: 3084 - protein, 155 aa, Treponema denticola ATCC 35405
  misc_feature (35)..(35): Xaa can be any naturally occurring amino acid
MGIYNYTVKDSLGNDFSFNDYKDYVILIVNTACEXGLTPHFQGLEALYKEYRDKKFLVAAFPCNQFGGQDPGTNEEIRNFAQSKYGVSFPIMAKIEVNGENTEPIFSFLKKASNGEDIKWNFAKFLVDKTGERVTAYAPTVAPEDLKKDIEKLLN

SEQ ID NO: 3085 - protein, 110 aa, Zea mays
DLLQQALAMSMEGGASGSAAVTDSAMAEAGAVDPDLALALQMSVQDANMSSDTDMSKVFEDRTFVSSILNSLPGVDPNDPSVKDLLASLHSQGEQEKKEDTSDKTEDEKN

SEQ ID NO: 3086 - protein, 427 aa, Zea mays
EFPGRPTRPGDLSRCPWDELIFEDESERGSNALLARAWSPGWQNADKALTAFLDGPLVDYSANHKKADSASTSLLSPYLHFGELSVRKVFHLVRMKQLMWSNDGDRAGEESCTLFLRAIGLREYSRYLTFNHPCSLEKPLLSHLRFFPWVVDEVHFKVWRQGRTGYPLVDAGMRELWATGWVHDRIRVVVSSFFVKVLQLPWRWGMKYFWDTLLDADLESDALGWQYISGSLPDGRELDRIDNPQFEGYKFDPHGEYVRRWLPELARLPTEWIHHPWDAPESVLQAAGVELGSNYPRPIVELDAANSRLQGALSEMWELEAASRAAIENGMEEGLGDSTDEPPIDFPQELRMEVDRQPAQPAIIHTSVVAGWRREDQRVPSMTSSLIRAETELTADFGNTSEDSRPEVPSNIHLQAFRGWCSRSRAA

SEQ ID NO: 3087 - protein, 220 aa, Bacillus thuringiensis serovar konkukian str. 97-27
MDLKQIAGEYAATFVKDGMKVGLGTGSTAYWTIQKLGQRVKEGLSIQAVPTSKETEALAQQLNIPLISLNDVQSLDLTIDGADEIDSNLQLIKGGGGALLREKIVASSSKELIIIVDESKVVTRLGTFPLPIEIIPFAWKQTESKIQSLGCQTTLRLKNNETFITDNNNMIVDCIFPNHIPTPSDLHKRLKMITGVVETGLFVNMTSKAIIGTKNGIQEL

SEQ ID NO: 3088 - protein, 476 aa, Bacillus cereus G9241
MQNKIIMMFQKDFRLYDNPALFEAAQSGEVVPVYVQDETFSIGSAAKWWLHHAIIDVQKQLKALGATFIIRKGKTQEEILSLIEQLDITAVYWNICYEPDRLQSNQKMKMMLEDKGIICKEFNSHLLLEPWIIKKKDNTEYKVFTPFYNAFQKQAIPKPTSKVQSIKWGSSLPASLSVSELHLLPTIPWTSHMESIWNPTEEGAYKTFKKFFSSKLTFYSEGRDFPNQNVHSMLAPYLSFGQISVKLMFHYLINKSTERQSSLFEKQVNSFIRQLIWREFSYYLLYHYPFTVYKPLNKNFEHFPWDKEEELLRVWQKGETGYPFIDAGMRELWQTGFMHNRARMAVASFLVKHLLIPWQEGAKWFMDTLLDADIANNTMGWQWVAGSGADASPYFRIFNPITQGEKFDKDGEYIRKWVPELRDIPNKYIHKPWEAPEPILQKANIQLGDTYPLPVVDHKAARERALCAYKSMKEFI

SEQ ID NO: 3089 - protein, 444 aa, Acinetobacter sp. ADP1
MPDIMIRNANMINEGQSKFCDVLIKNGRIAKIQSSISSINNAKEIEANGRWLLPGMIDDQVHFRDPGSPHKGCIASESAAATIGGITSYMDMPNTQPPTLDLDALQAKKTIASQTSIANYAFHFGVSADNLEIIKQLDPTLVSGVKVFMGASTGNMLVDDPKTLGLLFANVPTILLSHCESSPIISQNEKLFREKFGEDIDASCHPIIRNEECCYQSSKMAVELAKKFNTQLHVLHLTTARELALFEDKPLHEKRITAEVCIHHLHFDDRDYKQLNHLIKCNPSIKAVSDKEALIQAIANTNLLDIIGTDHAPHTLDEKQRSYFQAPAGLPLVQHALPALLELVADQKMTIENVVKKTSHQVADLFRIKERGYIREGYWADLVLIDKNPLIVAQQPNFMRCGWTPFIHQTFRHQVATTIVSGQIAWHNQQLFLNCKGHALEIDR

SEQ ID NO: 3090 - protein, 144 aa, Triticum aestivum
AGAAHEAIELELSSWPSSPSAGKSRRVTELVMALLARLCSCAEGRAAVVAHPAGIALVAKRALRVSAATDTSAVRVLAAVCGRAASPEVVREMARVGAVGKLCCVLQADCDRDVKETAKAVLRMHSGVWCGSPCVSAYLLSRYL

SEQ ID NO: 3091 - protein, 494 aa, Bacillus cereus G9241
MLTKNIELKPKVKAFLNEEIKMFINGEFVPSISGKTFETYNPATEDVLAVVCEAQEEDIDVAVKAARSAFESGPWAEMTTAERAHLIYKLADLIEEHGEELAQLEALDNGKPYQVALDDDIAATVENYRYYAGWATKIIGQTIPISKDYLNYTRHEPVGVVGQIIPWNFPLVMSSWKMGAALATGCTIVLKPAEQTPLSLLYTAKLFKEAGFPDGVVNFVPGFGPEAGAAIVNHHDIDKVAFTGSTVTGKYIMRQSAETIKHVTLELGGKSPNIILEDADLEEAINGAFQGIMYNHGQNCSAGSRVFVHRKHYETVVNELVKMANNVKLGAGMEKETEMGPLVSKKQQERVLHYIEQGKAEGATIAAGGERAFEKGYFVQPTVFIDVTDDMTIVKEEIFGPVVVVLPFDSTEEVIERANRSSYGLAAGVWTQNIKTGHQVANKLKAGTVWINDYNLENAAAPFGGFKQSGIGRELGSYALDNYTEVKSVWVNIK

SEQ ID NO: 3092 - protein, 482 aa, Bradyrhizobium japonicum USDA 110
MTAILKNFIGGEWVDGSGVTRNINPSNTNDLVGEYAKADKAQTEKAIAAAKAAFPGWAQSTPQVRYDALNKISLEILARKEELGRLLAREEGKTLPEGIGEVARAGQIFAFFAGEALRLIGEKGASVRPGLDVELTREPMGVVGMITPWNFPIAIPAWKIAPALCYGNTVVFKPAELVPGSAHALSEIITRSGIPAGVFNLVVGSGSVVGQTLLDHPDVAAISFTGSVQTGRKIAQACVLSNPMKKFQLEMGGKNPLVVLDDADLKTAVEVAVNGSYFSTGQRCTASSRLIVTEGIHDRFVAAMAERLKGLSVDDALKAGVHIGPVVDQSQLDQDLRYIKIGQDEGAKLAFGGELLQRETPGHYLQPALFTEANNNMRIAREEIFGPVAAVIRAKNYEEALAISNDTEFGLASGICTTSLKYASHYKRNSESGMVMVNLPTAGVDYHVPFGGRKGSSYGAREQGSYAREFYTTVKTAYTYPG

SEQ ID NO: 3093 - protein, 335 aa, Glycine max
EYYDLMHEFMTAVKQNYGEKVLVQFEDFANHNAFELLAKYGTTHLVFNDDIQGTASVVLAGVVAALKLIGGTLPEHTFLFLGAGEAGTGIAELIALEMSKQTKAPIEESRKKIWLVDSKGLIVSSRKNSLQHFKKPWAHEHEPVNSLLEAVKVIKPTVLIGSSGVGRTFTKEVVEAMTSNNDKPLILALSNPTSQSECTAEEAYQWSEGRAIFASGSPFDPVEYKGKVYASGQANNAYIFPGFGLGLVISGAIRVHDDMLLAASESLAKQVSEENYKNGLIYPPFSNIRRISANIAANVAAKAYELGLATRLPRPQNLVKCAESCMYTPVYRNYR

SEQ ID NO: 3094 - protein, 533 aa, Glycine max
MGNCCRSPAAVAREDVKSSFSNADHGKRGGGGSASAAAKQKAPITVLAGVPKENIEDRYLVDRELGRGEFGVTYLCIDRDTRELLACKSISKRKLRTAVDVEDVRREVAIMRHLPESPSIVSLREACEDDNAVHLVMELCEGGELFDRIVARGHYTERAAAAVTRTIVEVVQLCHKHGVIHRDLKPENFLFANKKENSPLKAIDFGLSIFFKPGERFSEIVGSPYYMAPEVLKRNYGPEIDIWSAGVILYILLCGVPPFWAESEQGVAQAILRGLIDFKREPWPSISESAKSLVRQMLEPDPKLRLTAKQVLEHPWIQNAKKAPNVPLGDVVKSRLKQFSMMNRFKRKALRVIADFLSNEEVEDIKDMFKKMDNDNDGIVSIEELKAGFRNFGSQLAESEVQLLIEAVDTNGKGTLDYGEFVAVSLHLKRMANDDHLHKAFSYFDKDGNGYIEPDELRNALMEDGAEDCTDVANDIFLEVDTDKDGRISYDEFVAMMKTGTDWRKASRHYSRGRFNSLSLKLMKDGSLNLGNE

SEQ ID NO: 3095 - protein, 380 aa, Populus alba x Populus tremula
MCGGAIISGFIAPTTTARSSRRLTSGFEWLEPKKPFNNKHLKPVVADPEDDFEADLQEFKDESDVDEDYDVFADAKPFAFSASASEPAKKRGLPRGSTAVKSAGFSGLAKNSAKRKRKNQFRGIRQRPWGKWAAEIRDPRKGVRVWLGTFNTAEEAARAYDSEARRIRGKKAKVNFPDEAPCASARHPIKENSQKRLTKANLSQDFSYLSNPETDYNNMGFVEEKPQVSQFGIMNSIPVNGDSGVTPLTPSDNASMYFNSDKGSNSFDCDFGWGEQGAEILSVLAATPEVDESVFVEANPKKLKSYTEYAVPVEERNGKSLSEELLAFDNQLMNLQMPDLVGNWEASLDSFLNGDTTQDGTNAVDLWSFEDFPSMVGGVY

SEQ ID NO: 3096 - protein, 588 aa, Zea mays
  misc_feature (558)..(558): Xaa can be any naturally occurring amino acid
  misc_feature (571)..(571): Xaa can be any naturally occurring amino acid
MCGILAVLGVVEVSLAKRSRIIELSRRLRHRGPDWSGLHCHEDCYLAHQRLAIIDPTSGDQPLYNEDKTVVVTVNGEIYNHEELKAKLKTHEFQTGSDCEVIAHLYEEYGEEFVDMLDGMFSFVLLDTRDKSFIAARDAIGICPLYMGWGLDGSVWFSSEMKALSDDCERFITFPPGHLYSSKTGGLRRWYNPPWFSETVPSTPYNALFLREMFEKAVIKRLMTDVPFGVLLSGGLDSSLVASVASRHLNETKVDRQWGNKLHTFCIGLKGSPDLKAAREVADYLSTVHHEFHFTVQEGIDALEEVIYHIETYDVTTIRASTPMFLMSRKIKSLGVKMVISGEGSDEIFGGYLYFHKAPNKKEFLEETCRKIKALHLYDCLRANKATSAWGVEARVPFLDKSFISVAMDIDPEWNMIKRDLGRIEKWVMRKAFDDDEHPYLPKHILYRQKEQFSDGVGYNWIDGLKSFTEQQVTDEMMNNAAQMFPYNTPVNKEAYYYRMIFERLFPQDSARETVPWGPSIACSTPAAIEWVEQWKASNDPSGRFISSHDSAATDHTXAVSRRWPTAAATXAANGTVNGKDVAVAIAV

SEQ ID NO: 3097 - protein, 531 aa, Zea mays
MEAVGVTPAPVAAPEKKKLLDLKDPFPAAANGGTKASPASKWAMKKKLVGGDAGYVLEDVPHLTDYMPQLPTYPNPLQDNPAYSVVKQYFVNPDDTVTQKIVVHKTSARGTHFRRAGPRQRVYFQSDEVNAAIVTCGGLCPGLNTVIRELVCGLYDMYGVSSVVGIEGGYKGFYSKNTVALTPKSVNDIHKRGGTVLGTSRGGHDTAKIVDCLQHDGINQVYIIGGDGTQKGASVIYEEVRRRGLKCSVVGVPKTIDNDIAVIDKSFGFDTAVEEAQRAINAAHVEAESAENGIGVVKLMGRNSGFIAMYATLASRDVDCCLIPESPFYLEGKGGLLEFVERRLKDNGHMVIVVAEGAGQDLIARSMNFVDTQDASGNKLLLDVGLWLSQKIKDHFKKKPSFPITLKYIDPTYMIRAVRSNASDNVYCTLLAHSALHGAMAGYTGFTVAPVNGRHAYIPFYRITEKQNKVVITDRMWARVLCSTNQPCFLSHEDVENMKHDDDEHHHMHNTQLLEGGSSPVSKCNGSAAAV

SEQ ID NO: 3098 - protein, 168 aa, Avena vaviloviana
VMASSATTVAPFQGLKSTAGLPVSRRSNAGLGSVSNGGRIRCMQVWPIEGIKKFETLSYLPPLSEEALLKQIDFLIRSKWVPCLEFSKVGFIFREHGSTPGYYDGRYWTMWKLPMFGCTDASQVIKEVEEVKKEYPDAYVRIIGFDNIRQVQCVSFIAFKPPGCEESG

SEQ ID NO: 3099 - protein, 430 aa, Methylobacillus flagellatus KT
MKPSKVTLTFDDGSAPIELPILPGKLGPSVIDIRSLSKHGYFTYDPGFLSTASCDSNITFIDGEEGLLFYRGYPIEQLAEHSDFMEVSYLLIYGELPNAEQKEKFTNTITRHSMVHDQLTHIFRGFRRDAHPMAVMVGVVGSMSAFYHEAIDVSDPRNREFAAHRLLAKVPTIAAWSYKYNVGQPFMYPKNRFNYAENFMHMMFATPCEDYEPNPVLAKAFERILILHADHEQNASTSTVRLAGSSGANPFACVAAGIASLWGPAHGGANEATLKMLEEIGDISRIGEYIKRAKDKTDSFRLMGFGHRVYRNMDPRAAIMRQTCHQVLDELGLNDDPMFKLALELEKIALEDEYFVSRRLYPNVDFYSGIVMRAMGIPNSMFTAIFALARTVGWVAQWNEMMSDPGSKIGRPRQLYTGPERRDFLPLDQR

SEQ ID NO: 3100 - protein, 198 aa, Zea mays
LQLGGDVSGGRLSVDASDIAEASRDFGGLSRAEPMAVFQPRAAGDVAGLVRAAFGSARGFRVSARGHGHSISGQAQAPGGVVVDMGHGAVARAPPVYSPALGRHYVDVWGGELWVDVLNWTLSHGGLAPRSWTDYLYLSVGGTLSNAGISGQAFHHGPQISNVYELDVVTGQFGIITRARIALERAPQRVRPERMAAA

SEQ ID NO: 3101 - protein, 410 aa, Rickettsia sp. IRS 4
DSEFAELKIRGKIFKLPILKASIGEDVIDISRVSAEADCFTYDPGFMSTASCQSTITYIDGDKGILRHRGYDIKDLAEKSDFLEVAYLLIYGELPSSEQYNNFTKQVAHHSLVNERLHYLFQTFCSSSHPMAIMLAAVGSLSAFYPDLLNFKEADYELTAIRMIAKIPTIAAMSYKYSIGQPFIYPDNSLDFTENFLHMMFTTHCTKYKVNPIIKNALNKIFILHADHEQNASTSTVRIAGSSGANPFACISTGIASLWGPAHGGANEAVINMLKEIGSSENIPKYIAKAKDKNDPFRLMGFGHRVYKNYDPRAAVLKETCKEVLKELEQLENNPLLQIAIELEAIALKDEYFIERKLYPNVDFYSGIIYKAMGIPSQMFTVLFAIARTVGWMAQWKEMHEDPEQKISRP

SEQ ID NO: 3102 - protein, 480 aa, Oryza sativa (japonica cultivar-group)
MVLSVRAVSGKSDLDFSDPSWKEKYQEDWNRRFSLPHITDIYDLKPRLTTFSLKKNRTDGGSLSADKWNGYVNKDDRALLKVIKYASPTSAGAECVDPDCSWVEHWIHRAGPRKEIYYEPAEVKAAIVTCGGLCPGLNDVIRQIVFTLEIYGVKNIVGIQFGYRGFFEKGLKEMPLSRKVVENINLSGGSFLGVSRGGAKTSEIVDSIQARRIDMLFVIGGNGSHAGANAIHEECRKRKLKVSVVAVPKTIDNDILFMDKTFGFDTAVEEAQRAINSAYIEARSAYHGIGLVKLMGRSSGFIAMQASLSSGQIDVCLIPEVSFTLDGEHGVMRHLEHLLEKKGFCVVCVAEGAGQDLLQKSNATDASGNVILSDFGVHMQQKIKSHFKDIGVPADVKYIDPTYMVRACRANASDAILCTVLGQNAVHGAFAGFSGITSGICNTHYAFLPITEVITKPKRVNPNSRMWHRCLTSTGQPDFH

SEQ ID NO: 3103 - protein, 501 aa, Asparagus officinalis
MTVSITAAVQLFLLLLLLLPLLFVHHKTKPKTKCRSPPGPPPLPVIGNLHQLSLLLHQSLYRLSKIHGPIFKLSLGRVPVLVISSPSLAKQVLKTHDLACCSRASTVSFKEYTYDGCDVAGAPYGDSWRNLRKIFVLKLLSSKKLTSFRLVQEEEIEGMISSIRTRSDTNATVNITEFVVRLANNITFRVAFGYRSEGEYGEKSRFQRLLESGNDTVASFYVGDYFPGLGWLDKMTGKLGKMKRNARDLDEFYQEVIDAHMKDGRKEDGKEDIVDVLLRLREEGQLTMDHIKGALMNIFVGGTDTSAASIAWAMAELARKPKVMKKAQEEVRKAASKKGKVEENDLAQLQYIKCVVNETLRLHLPLPLLVPRETIQHCEINGYDVSAKTRVLVNAWAIGRDEDAWENPEEFNPDRFVGSSLDYKGQDFQFIPFGAGRRICPGIQFGVETVELALANLLYAFNWELPPGVERENIDMHEAPGLVTRRATDLRLVATNYEEAN

SEQ ID NO: 3104 - protein, 250 aa, Brassica oleracea
MTKNYPAVSEEYQKAIEKCKRKLRGLIAEKNCAPIMVRLAWHSAGTFDCASRTGGPFGTMRFDDELAHGANNGLHIALRLLEPIREQFPTISHADFHQLAGVVAVEVTGGPEIPFHPGREDKPQPPPEGRLPDATKGCDHLRQVFLKQMGLTDQDIVALSGAHTLGRCHKDRSGFEGAWTSNPLIFDNSYFKELLSGEKEGLFQLPSDKALLDDPVFRPLVEKYAADEEAFFTDYAEAHLKLSELGFADA

SEQ ID NO: 3105 - protein, 462 aa, Salmonella typhimurium LT2
MTMMTATQALSVNPATGQTLAAMPWANAQEIEHALSLAASGFKKWKMTSVAQRAQTLRDIGQALRAHAEEMAQCITREMGKPIKQARAEVTKSAALCDWYAEHGPAMLNPEPTLVENQQAVIEYRPLGVILAIMPWNFPLWQVLRGAVPILLAGNSYLLKHAPNVTGCAQMIARILAEAGTPAGVYGWVNANNEGVSQMINDPRIAAVTVTGSVRAGAAIGAQAGAALKKCVLELGGSDPFIVLNDADLELAVKAAVAGRYQNTGQVCAAAKRFIVEEGIAQAFTDRFVAAAAALKMGDPLVEENDLGPMARFDLRDELHQQVQASVAEGARLLLGGEKIAGEGNYYAATVLADVTPDMTAFRQELFGPVAAITVAKDAAHALALANDSEFGLSATIFTADDTLAAEMAARLECGGVFINGYSASDARVAFGGVKKSGFGRELSHFGLHEFCNVQTVWKNRV

SEQ ID NO: 3106 - protein, 148 aa, Pseudomonas syringae pv. tomato
DVIDVRGLTATGRFTFDPGFMSTASCDSKITYIDGDNGILLHRGYPIEQLAEQSDYLETCYLLLNGELPTAEQKAQFVAVVKNHTMVHEQLKTFFNGFRRDAHPMAVMCGVVGALSAFYHDSLDINNPQHREISAVRLVAKMPTLAAM

SEQ ID NO: 3107 - protein, 157 aa, Schizosaccharomyces pombe
MAEEEHVDFEGGEAGASLTFPMQCSALRKNGHVVIKGRPCKIVDMSTSKTGKHGHAKVHIVALDIFNGRKYEDMSPSTHNMDVPVVKRDEYQLVNIDDGYLNLMTTDGTTKDDVRLPEGELGNEIEEGFDEGRDLIITVVSAMGEETALACRDAPSS

SEQ ID NO: 3108 - protein, 173 aa, Glycine max
MSDAPPSPTHESGGEQSPRGSSSGAREQDRYLPIANISRIMKKALPPNGKIAKDAKDTMQECVSEFISFITSEASEKCQKEKRKTINGDDLLWAMATLGFEDYIEPLKVYLARYREAEGDTKGSARSGDGSATPDQVGLAGQNSQLVHQGSLNYIGLQVQPQHLVMPSMQSHE

SEQ ID NO: 3109 - protein, 112 aa, Triticum aestivum
  misc_feature (21)..(22): Xaa can be any naturally occurring amino acid
  misc_feature (53)..(53): Xaa can be any naturally occurring amino acid
  misc_feature (65)..(65): Xaa can be any naturally occurring amino acid
  misc_feature (68)..(68): Xaa can be any naturally occurring amino acid
  misc_feature (70)..(70): Xaa can be any naturally occurring amino acid
  misc_feature (77)..(78): Xaa can be any naturally occurring amino acid
  misc_feature (81)..(81): Xaa can be any naturally occurring amino acid
  misc_feature (85)..(85): Xaa can be any naturally occurring amino acid
  misc_feature (88)..(88): Xaa can be any naturally occurring amino acid
  misc_feature (90)..(90): Xaa can be any naturally occurring amino acid
  misc_feature (92)..(92): Xaa can be any naturally occurring amino acid
  misc_feature (94)..(96): Xaa can be any naturally occurring amino acid
  misc_feature (101)..(101): Xaa can be any naturally occurring amino acid
  misc_feature (103)..(103): Xaa can be any naturally occurring amino acid
  misc_feature (105)..(107): Xaa can be any naturally occurring amino acid
  misc_feature (109)..(109): Xaa can be any naturally occurring amino acid
MAPTVMASSATSVAPFQGLKXXVGLPVSRRSNGASLGSVSNGGRIRCMQVWPXEGIMKFETLSYXPPXRXETLLKQXXYLXRSKXVPXLXFXSXXXFILRXLXEXXXYXESS

SEQ ID NO: 3110 - protein, 148 aa, Pseudomonas syringae pv. tomato
DVIDVRGLTATGRFTFDPGFMSTASCESKITYIDGDNGILLHRGYPIEQLAEQSDYLETCYLLLNGELPTAEQKAQFVAVVKNHTMVHEQLKTFFNGFRRDAHPMAVMCGVVGALSAFYHDSLDINNPQHREISAVRLVAKMPTLAAM

SEQ ID NO: 3111 - protein, 427 aa, Helicobacter hepaticus ATCC 51449
MASITLTNNETKESFEFELIECTRGPKAVDFSKLFERTNIFSYDPGYGSTAGCKSTISYINGKNGELLYKGLPIEKIVEKYQFTDVCKLLITGEVPKNETETKEFEIELVHRSFLNEGLINIFNAFPDSAHPMANLSASLSALSTFHFRHLDMGNEEERQVMARRAIAKIPTLAAFSYRHSLGIPYIYPDVARGYVENFLYMLRAYPGGKMKHTIKGEVEITPLEIEALDKIFTLHADHGQNASTTTVRNVASTGAHPYAALSAGVNALWGAAHGGANEKVLDMLNEIGDAKNVDKFINKAKDKNDPFRLMGFGHRVYKNYDPRAKILKKLKDDLDAKGIKMNTRLSDLAHKVEEVALSDSYFVERNLYPNVDFYSGIILSALKIPVSLFTPIFVIGRMPGWCAQLLEHVKDPTTRITRPRQVYIGE

SEQ ID NO: 3112 - protein, 505 aa, Pseudomonas syringae pv. syringae B728a
MSTARILELMRPYWGDRSVIASYVGGQFIEGHGAPVEVRNAHDDSLLLSFPDADESLVEVADKAARAAQQQWWALTAQARGRAMYQVGNLIRDELENLAQIESLTANKPIRDARVEVLKVAEMFEYYAGWADKLHGEIIPVPTTHLNYVTYEPLGTVLQITPWNAPIFTCGWQIAPAIAAGNAVILKPSELTPLSSLMVGVLIERAGVPKGLVNVIAGFGHSIGQAFIAKADIRKVVFVGSPATGRHIAVAAAQRCIPAVLELGGKSANIVFDDADLEVALRGAQAAIFSGAGQSCVSGSRLLVQESIFEKFTNALAVAATQFKVGDPSDPETQIGPINNAKQYNHVKNMVEQALKDGAKLVGEHADPIPEKPGYYINPTVLAGTNALYCAQEEIFGPVVVAIPFKDEEDAIRIANDSRFGLAGGVWTRDVGRAHRVARQVRAGTFWVNGYKTIHVSSPFGGYGESGYGRSSGLDALREYSEVKSVWVETAAKPAASFGYGASLE

SEQ ID NO: 3113 - protein, 321 aa, Candida boidinii
MSSPLLTLNNGLKMPQIGFGCWKVDNATCAETIYEAIKVGYRLFDGAMDYGNEKEVGEGVNKAIKDGLVKREELFIVSKLWNNFHHPDSVKLAIKKVLSDLNLEYIDLFYMHFPIAQKFVPIEKKYPPNFYCGDGNKWSFEDVPLLTTWRAMEELVEEGLVKSIGISNFVGALIQDLLRGCKIRPAVLEIEHHPYLVQPRLIEYAKTEGIHVTAYSSFGPQSFVELDHPKVKDCTTLFKHETITSIASAHDVPPAKVLLTWATQRGLAVIPKSNKKERLLGNLKINDFDLTEAELEKIEALDIGLRFNDPWTWGYNIPTFI

SEQ ID NO: 3114 - protein, 286 aa, Buchnera aphidicola str. Sg (Schizaphis graminum)
MINEKIWHEKLHRHVGQYFSIDKILYQKKNKYHDIIIFQNSIMGRIMAIDGVVQTTEKDEFIYHEMLTHVPIFYHGLIKNVLIVGGGDGGILREICRHKSIENITMVEIDLNIIDLCKQFFPKHNNNAYKDPRLKIVIDNGLNFVQKTKEKFDLIISDSTDPIGCGKDLFLSDFYFHCKNCLVKNGIFVGQNGVFFLQKNDINQSYKNLKKNFHDVSFYQATIPSYYGGTMMFSWGTDNIDFRQINIKNLEKRIKDKKLTFNYYNSNIHISSFYLPQYIINTLDKS

SEQ ID NO: 3115 - protein, 113 aa, Arabidopsis thaliana
MAFALRFFTCLVLTVCIVASVDAAISCGTVAGSLAPCATYLSKGGLVPPSCCAGVKTLNSMAKTTPDRQQACRCIQSTAKSISGLNPSLASGLPGKCGVSIPYPISMSTNCNK

SEQ ID NO: 3116 - protein, 541 aa, Glycine max
  misc_feature (139)..(139): Xaa can be any naturally occurring amino acid
  misc_feature (236)..(236): Xaa can be any naturally occurring amino acid
  misc_feature (315)..(315): Xaa can be any naturally occurring amino acid
  misc_feature (391)..(391): Xaa can be any naturally occurring amino acid
MAALNLCRMALRSSKLLSRPYHLLSVQLQMQMQPSSPPLTRKMSMDAQSVSFQLNSSGLLRTQGLIAGKWSDAYDGKTIKVYNPATGESIVDVACMGGRETNDAISAAYDAYGSWSKTTAAERSKFLRKWYDLRMVHYXELAQLITLEQGKPLKESVGEIVYGAGVIEFAAEGAKRIYRDIVPAPFSDLRLFVLKQHVWVVCASRPWNFPVSLISRNVHTVLACGCKVVISPSEHXSLSVFASVDMYIPAGMSHSVMNVVMENALNIRDAFLSSPFQRKITFTGSTAVGKKLMAGSAETVKKVSLELGGNAPCIXVFDDADLDVAVKGTLAAKFRNSGQTCVCANRIIVQEGIYEKFANALRDAVQNMKVGDGFSEALSLRPLINEAAVNXLRSLYIHDSLFITGGKVNSWGVKRHSLGLTFYEPTVISDVNSDMHISREEAFGPVAPLLRFKTEEEAIRIANDTNAGLGSYVFTNSIQRSWRVAEALEYGLVGVNEGVISTEVAPFGGFKQSGLGREGSKYGMDEYLEIKYVCFGNMNKE

SEQ ID NO: 3117 - protein, 298 aa, Schizosaccharomyces pombe
MSVQELSHPLIKDGWFREINNMWPGQAMTLKVKKVLYAGKSKYQDVLVFESETYGHVLVLDGAIQATERDEFSYQEMIAHLALNSHPNPKKVLVIGGGDGGVLREVVKHECVEEAILCDIDEDVIKVSKQYLPEMSAGFNHPKVKVHIGDGFKFLQDYQNTFDVIITDSSDPDGPAEALFQKPYFQLLSDALRGGGVITTQAECMWIHLGVISNVLTAVKTVFPNVRYAYTTIPTYPSGSIGFVVASKDASIDLSKPLRKWSPEEENKLCKYYNSEIHAASFVLPTFARDVVDKATSS

SEQ ID NO: 3118 - protein, 487 aa, Escherichia coli CFT073
MLPLRINPTFLLPSNKFKEFEMDQKLLTDFRSELLDSRFGAKAISTIAESKRFPLHEMRDDVAFQIINDELYLDGNARQNLATFCQTWDDENVHKLMDLSINKNWIDKEEYPQSAAIDLRCVNMVADLWHAPAPKNGQAVGTNTIGSSEACMLGGMAMKWRWRKRMEAAGKPTDKPNLVCGPVQICWHKFARYWDVELREIPMRPGQLFMDPKRMIEACDENTIGVVPTFGVTYTGNYEFPQPLHDALDKFQADTGIDIDMHIDAASGGFLAPFVAPDIVWDFRLPRVKSISASGHKFGLAPLGCGWVIWRDEEALPQELVFNVDYLGGQIGTFAINFSRPAGQVIAQYYEFLRLGREGYTKVQNASYQVAAYLADEIAKLGPYEFICTGRPDEGIPAVCFKLKDGEDPGYTLYDLSERLRLRGWQVPAFTLGGEATDIVVMRIMCRRGFEMDFAELLLEDYKASLKYLSDHPKLQGIAQQNSFKHT

SEQ ID NO: 3119 - protein, 228 aa, Brassica napus
  misc_feature (12)..(12): Xaa can be any naturally occurring amino acid
MALQDEQEHEVXGGDIPEEDEGEMETDEYQEHAGEEGAAAAEDEEELEPGSASRDLEDMKKRLKEIEEEASALREMQAKAENDMAAAQDPSSAISAAEKEEVDLRSIYVGNVDYACTPEEVQQHFQSFGTVNRVTILTVLSGQPGRPAGVAFVEVVAVQNSLVLNESELHGRQIKVSAKETNVPGMRQFRGRRPFRPMRGFMPGPPFYPPYAYGRVPRFRRPMRYRPY

SEQ ID NO: 3120 - protein, 154 aa, Zea mays
MDARMFGLETPRVAALHHLLDVPDGDKAGGGATRTYVRDARAMAATPADVKELAGAYAFVVDMPGLSTGDIRVQVEDERVLVISGERRREEREDAKYLRMERRMGKFMRKFVLPDNADVDKVAAVCRDGVLTVTVEKLPPPEPKKPKTIEIKVA

SEQ ID NO: 3121 - protein, 483 aa, Pseudomonas aeruginosa
MNTKLFINNVWINSSDQQTFERKHPVSGEVMTECANSTVMDALKAAQAAQEAFQTWKTVGPSERRRLLLRVAEVMESKTPEFIEVMAKEVGASALWAGFNVQMSANVFREAASLATQIQGETIPTDKSDTLSMTLRQPVGPILSIVPWNGTAVLAARAIAYPLVCGNAVVFKGSEFSPATHALITQCVQEAGLPAGVLNYLNSSPDRSPEIADALISAKEIRRINFTGSTRVGSIIAQKAAQHLKRCLLELGGKSPLIVLDDADIDAAVKAAVFGSFLFQGQICMSTERLIVDEKIADEFVAKFVEKTKRLSAGDPCVTGDCIIGPMVSPNSGERINGLFKDAIDKGAKVVCGGLAQGALMPATILDHVKSDMRIYDEETFGPITVVIRCKGEAEAVRIANDSVYGLSSGVFGRDINRALRVGMSIEYGSVHINGSTVQNEAQAPYGGTKNTGYGRFDGRAVIDEFTEIKWLTIEPFEQQYPF

SEQ ID NO: 3122 - protein, 360 aa, Hypocrea virens
MSRSNPPNNASASRKISFNVSEQYDIQDVVGEGAYGVVCSAIHKPSGQKVAIKKITPFDHSMFCLRTLREMKLLRYFNHENIISILDIQKPRSYDSFNEVYLIQELMETDMHRVIRTQDLSDDHCQYFIYQTLRALKAMHSANVLHRDLKPSNLLLNANCDLKVCDFGLARSAASQEDNSGFMTEYVAARWYRAPEIMLTFKEYTKAIDVWSVGCILAEMLSGKPLFPGKDLTFPDHHQLTLILDVLGTPTMEDYYGIKSRRAREYIRSLPFKKKVPFRTLFPKTSDLALDLLEKLLAFNPVKRITVEDALKHPYLEPYHDPDDEPTAPPIPEEFFDFDKHKDTLSKEQLKQLIYQEIMR

SEQ ID NO: 3123 - protein, 198 aa, Azotobacter vinelandii
MTKNLSWHASSVGKLQRAGGKRQKPCILWLTGLSAAGKSTIANLLEQELFLCGAHTYLLDGDNLRHGLNRDLGFADADRQENIRRAAEVAHLFVDAGIIVIAAFISPFRRDRELARRLVAPGEFLEIFVDTPLEECERRDPKGLYRRARCGLISHFTGIDSAYEVPLDPEMRLTTLGWTPAQNACAIVDYLREGGYLR

SEQ ID NO: 3124 - protein, 501 aa, Asparagus officinalis
MTVSITAAVQLFLLLLLLLQLLFVHHKTKPKTKCRSPPGPPPLPVIGNLHQLSLLLHQSLYRLSKIHGPIFKLSLGRVPVLVISSPSLAKQVLKTHDLAFCSRASTVSFKEYTYDGCDVAGAPYGDSWRNLRKIFVLNLLSSKKLTSFRLVQEEEIEGMISSIRTRSDTNATVNITEFVVRLANNITFRVAFGYRSEGEYGEKSRFQRLLESGNDTVASFYVGDYFPGLGWLDKITGKLGKMKRNARDLDEFYQEVIDAHMKDGRKEDGKEDIVDVLLRLREEGQLTMDHIKGALMNIFVGGTDTSAASIAWAMAELARKPKVMKKAQEEVRKAASKKGKVEENDLAQLQYIKCVVNETLRLHLPLPLLVPRETIQHCEINGYDVSAKTRVLVNAWAIGRDEDAWENPEEFNPDRFVGSSLDYKGQDFQFIPFGAGRRICPGIQFGVETVELALANLLYAFNWELPPGVERENIDMHEAPGLVTRRATDLRLVATNYEEAN

SEQ ID NO: 3125 - protein, 250 aa, Brassica oleracea
MTKSYPTVTEDYQNAIEKCKRKLRGLIAEKNCAPIMVRLAWHSAGTFDCASRTGGPFGTMRFDAEQGHGANSGIHIALRLLEPIREQFPTISFADFHQLAGVVAVEVTGGPEIPFHPGREDKPQPPPEGRLPDATKGCDHLRQVFTKQMGLSDKDIVALSGAHTLGRCHKDRSGFEGAWTSNPLIFDNSYFKELLSGEKEGLLQLVSDKALLDDPVFRPLVEKYADDEEAFFADYAEAHLKLSELGFADA

SEQ ID NO: 3126 - protein, 405 aa, Zea mays
  misc_feature (80)..(80): Xaa can be any naturally occurring amino acid
MLTCIACSKQLPGDAPPLREPSDDDDRANAGGGGESAATPGTRQAIRVLTAQIKDMALKASGAYRHCKPCAGSSSPAASXRQQPYYHGAYAESGSDRFHCAYQRAGSSAASTPGLRTGGAMSSGDITPSVSARTDFLADDEEGDDEEGTATGSSEEDEEKEWVAQVEPGVLITFLSLPRGGNGLKRIRFSREMFNKWQAQRWWTENYEKVMELYNVQKSNSQVDPLPSIPRSDSEISKDDTPATAPLNKGQLLRTSPRPLKGSEAIGYSSSDCPQHQSSHLRNVYRKDRYLGHQFCDPVELASTPELSSISGAKTETSIGASVRTSSSPEEVDGSGELSASVSNASDEEREWVEEDEPGVYITIRALPGSIRELRRVRFSRERFSEMHARLWWEENQARIYEQYL

SEQ ID NO: 3127 - protein, 151 aa, Brassica napus
  misc_feature (119)..(119): Xaa can be any naturally occurring amino acid
  misc_feature (142)..(142): Xaa can be any naturally occurring amino acid
  misc_feature (146)..(146): Xaa can be any naturally occurring amino acid
MFTCIACTKADGGEELGARGGTTPNTKESVKSLTTQIKDMAMKFSGAYKQCKPCTGSPRSPMKKGHRPFSDFDNASEGVPYPYMGGSAGSTPAWDFINSSHHPAGAKFTSIYGNDRESXSAQSCDVVLDDEGPKEWMAQVEXGVHXTFASL

SEQ ID NO: 3128 - protein, 408 aa, Photorhabdus luminescens subsp. laumondii TTO1
MDIIILGVVMFTLIVLVLTALILFAKSKLVNTGNIRVEVNGDPEKSFTAPAGDKLLNMLSSQGIFVSSACGGGGSCGQCRVKIKDGGGDILPTELSHISKREAKEGCRLACQVNVKQNLKIKLPEEIFGVKKWECEVISNDNKATFIKELKLKIPDGDVVPFRAGGYIQIEAQPHIARYEDYDVPKEYREDWDKFNLFRFVSEVKEPTVRAYSMANYPEEHGIIMLNVRIATPPPKNSEAPPGIMSSYIWSLKPGDKVTISGPFGEFFAKDTDAEMIFIGGGAGMAPMRSHIFDQLNRLNSKRKISFWYGARSKREMFYTEDFDQLAAENENFTWNVALSDALPEDNWDGYTGFIHNVLYENYLRDHPAPEDCEFYMCGPPVMNAAVIKMLKDLGVEDENIMLDDFGG

SEQ ID NO: 3129 - protein, 506 aa, Vibrio cholerae O1 biovar eltor str. N16961
MIYAQPGSDNAVITFKSHYDNFIGGQWVKPVSGEYFGNISPVNGQVYCQVARSTQADIDLALDAAHQVREAWAKTSVTERSNLLLKIADRIEANIEQLAVAECWENGKPVRETLAADLPLVVDHFRYFAGCIRAQEGSAAELDSHTASYHFPEPIGVVGQIIPWNFPMLMAAWKLAPALAAGCCVVLKPAEQTPTSILVLIEKIADLIPAGVLNVVNGFGSEAGQALATSQRIAKLAFTGSTQVGQHILKCAAQSLIPSTVELGGKSPNIYFPDIFDHEDTYLEKCIEGTLLGFFNQGEVCTCPSRVLVHESIYDRFVAKVAERAKGIKQGNPLDTATQVGAQASQEQFDKILSYLDIGRQEGAKVLFGGGVAKQEGELGQGYYIQPTLLQGHNKMRVFQEEIFGPVIAITSFKDEAEALALANDTEYGLGAGIWTRDQNLAYRMGRNIQAGRIWINCYHAYPAHAAFGGYKKSGIGRETHKMMLNHYQNTKNLLISYDVNPLGFF

SEQ ID NO: 3130 - protein, 486 aa, Pseudomonas sp. S-47
MKEIKHFISGAFVGSASGKLFDNVSPANGQVIGRVHEAGRAEVDAAVRAARAALKGPWGKMTVAERAEILHRVADGITARFGEFLEARMPGHRQAEVAGQPHRHSARRANFKVFADLLKNVANEAFEMATPDGAGALNYGVRRPKGVIGVISPWNLPLLLMTWKVGPALACGNCVVVKPSEETPLTATLLGEVMQAAGVPAGVYNVVHGFGGDSAGAFLTEHPDVDAYTFTGETGTGETIMRAAAKGVRQVSLELGGKNAGIVFADCDMDKAIEGTLRSAFANCGQVCLGTERVYVERPIFDAFVARLKAGAEALKIGEPNDPEANFGPLISHKPREKVPSYYQQAVDDGATVVTGGGVPEMPAHLAGGAWVQPTIWTGLADDSAVVTEEIFGPCCHIRPFDSEEEAIELANSLPYGLASAIWTENASRAHRVAGQIEAGIVWVNSWFLRDLRTAFGGSKQSGIGREGGVHSLEFYTELKNICVKL

SEQ ID NO: 3131 - protein, 304 aa, Oryza sativa (japonica cultivar-group)
MSLQGGFVKTQKTHAYFKRFQVKFKRRRQGKTDYRARIRLTNQDKNKYNTPKYRFVTNKDITAQIVYATIAGDIVMAAAYSHELPRYGLEVGLTNYAAAYCTGLLLARRVLTLRGLDQEYEGNVEATGEDYYVEPADERRPFRALLDVGLIRTTTGNRVFGALKGALDGGLDIPHSDKRFAGFKKDEKQLDSDIHRKYIYGGHVADYMRSMAEEEPEKFQAHFSEYLKKGIDADGMESLYKKVHAAIRADPTMAKSTKKEPATHKRYNLKKLTYEQRKASLVERLNALNSSAGADDDDEEEDDE

SEQ ID NO: 3132 - protein, 290 aa, Haemophilus influenzae 86-028NP
MIKKIAVLTSGGDAPGMNAAIRGVVRSALAEGLEVFGIYDGYQGLYNNKIKQLNRYSVSDVINRGGTFLGSARFPEFKDPNVRAKCAEILRSHGIDALVVIGGDGSYMGAKLLTEEHGFPCVGLPGTIDNDVAGTDYTIGYQTALQTAVDAIDRLRDTSSSHQRISIVEIMGRHCSDLTISAGIAGGCEYIVASEIEFNREQLIQQIERSIIRGKRHAIIAITELLTDVHSLAKKIEARVGHETSRNRFRAYSTWWFSLGFCRYSCLTYGRIRSRFIATRQRRLLRRYPK

SEQ ID NO: 3133 - protein, 456 aa, Pirellula sp. 1
MVVGQRERKRRCIRGEPLMNDTTWVLDGGRLIDPANGIDRIARLVLHEGKVHSIDTPDGDVPPDAGRLDVTGKIVAPGLVDLATELREPGSEEDETIQTGSNAALAGGYTTVLCCSSTKPLMDSAASVQLVRQIAQRVDGVRVLPIACLSKGRQAEQMAELGILAAAGAAGFSDTPRPMPNDALLKRALDYCRMFDLPIFDRPEVPELADGGVMHDGQIGLILGLKGLPTEAEDLAVARDVRLAEATKGRLHVGPVSTMGSIDMIGRVKSRGIHISASVCPHNLFGSDELLRSYDSRYKVHPPMRSPSHVEALRNAVAEGVIDAIESGHMPRAQEKKANDLDLAPFGASALETTLAAIATDLVETKILPWSRAIECLSTAPARIAGVKGGTLSVGANADVTVIDPLNAWSVEAKEFRSRCHSSPMTGRTLTARVTHTLVGGRLKFELHPTVASAAS

SEQ ID NO: 3134 - protein, 493 aa, Glycine max
MDPNHLFFTHFRDGAIASRIEGQHRGALPSVIVIGAGISGLAAARSLYDASFKVTVLESRDRLGGRIHTDFSFGCPVDMGASWLHGVCNENPLAPLIRGLGLSLYRTSGDNSVLYDHDLESYMLFNIDGKQVPQQMVIEVGDTFKKILEETGKVRDEHTEDISVSQAISIVLDKHPDLRQQGLAHEVLQWFICRMEAWFAADADMISLKTWDQEHVLSGGHGLMVQGYDPVIKVLAKDIDIRLNHRVKKISSGYNKVMVTVEDGRNFVADAAIITVPIGILKANLIEFEPKLPDWKVSAISDLGVGNENKIALRFDKVFWPNVELLGTVAPTSYTCGYFLNLHKATGHPVLVYMVAGRFAYDIEKLSDEAAANFVMQQLKKMFPNASKPVQYLVSRWGTDPNSLGCYSYDLVGKPTDVYDKLRAPLGNLFFGGEAVSLDNQGSVHGAYSAGVMAAENCESYMLEKLGHAEKLSLASVRHEMLETLIPLQISRM

SEQ ID NO: 3135 - protein, 280 aa, Oryza sativa (japonica cultivar-group)
MATPAAEKPDGVEIREVWEDNLEAEFAVIREIVDDFPYVAMDTEFPGVVCRPLGTFKSNADFNYATLKANVDMLKLIQLGLTFSNEHGGLPSLGPEGRPCVWQFNFRGFDPRTDVAAADSIDLLRRSGIDFTRHSADGADARRFAELLMSSGVVMNSEVRWVTFHSGYDFGYLLKLLTGTYLPDTITGFFDLIRIYFPVVYDIKHLMRFCNSLHGGLNKLAELLDVERVGICHQAGSDSLLTALSFKKLKEAYFNGLTEKYAGVLYGLGTEGGETSSAAH

SEQ ID NO: 3136 - protein, 301 aa, Oryza sativa (japonica cultivar-group)
MGGFVKTQKTNAYHKRFQVKFKRRRQGKTDYRARIRLTNQDKNKYNTPKYRFVTNKDITAQIVYATIAGDIVMAAAYSHELPRYGLEVGLTNYAAAYCTGLLLARRVLKLRGLDQEYEGNIEATGEDYYVEPADERRPFRALLDVGLIRTTTGNRVFGALKGALDGGLDIPHSDKRFAGFKKDEKQLDSDIHRKYIYGGHVADYMRSMAEEEPEKFQAHFSEYLKKGIDADGMEALYKKVHAAIRADPTMAKSTKKEPATHKRYNLKKLTYEQRKASLVERLNALNSSAGADDDDEEEDDE

SEQ ID NO: 3137 - protein, 434 aa, Salmonella typhimurium LT2
MKTRTQQIEELQKEWTQPRWEGITRPYSAEEVVKLRGSVNPECTLAQLGAAKMWRLLHGEAKKGYINSLGALTGGQALQQAKAGIEAIYLSGWQVAADANLASSMYPDQSLYPANSVPAVVDRINNTFRRADQIQWASGIEPNDPRYVDYFLPIVADAEAGFGGVLNAFELMKSMIEAGAAAVHFEDQLASVKKCGHMGGKVLVPTQEAIQKLVAARLAADVMGVPTLVIARTDADAADLITSDCDPYDSGFITGERTSEGFYRTHAGIEQAISRGLAYAPYADLVWCETSTPDLELARRFADAIHAKYPGKLLAYNCSPSFNWQKNLDDKTIASFQQQLSDMGYKYQFITLAGIHSMWFNMFDLAHAYAQGEGMKHYVEKVQQPEFAAAKDGYTFVSHQQEVGTGYFDKVTTIIQGGASSVTALTGSTEEAQF

SEQ ID NO: 3138 - protein, 326 aa, Triticum aestivum
  misc_feature (195)..(195): Xaa can be any naturally occurring amino acid
MASTTAVPEVALRSGGARPMPAIGMGTATFPVVPETTVKAVLEAVEVGYRHFDTAAMYATERPLGEALAEAVRRGLLASREEVFVTSKLWCTQCHPHLVLPSLRESLQNLQMEYVDLYLIHWPISLKPGPTVFPVKREDAVPFDFAGVWRAMEECHRLGLAKAIGVSNFTTSHLHKLLAAATVPPAVNQVEMNPXWQQRKLREYCAEKGIHVAAYSPLGGQNWSGDGNAVLDSEVLAEIAKARGKTVAQVALRWIYEQGVTPIVKSFSKERLKENLGIFDWGLTDDDLRKIGQIPQKKIVRAETVLFSAEGEFTSADLADMEIVEE

SEQ ID NO: 3139 - protein, 251 aa, unidentified bacterium
MNTGDLAWVLISAALVWLMTPGLALFYGGLGERRNLLHTMFVPILIIGIATMVWFTVGYSLAFGGAGDIIGNFKHLFLSGVSFTHSTKSLTIPDGAFALFQGMFPIITAAIITGSVIGRVRIKAMIVFITLWLIFIYTPLAHMVWGGGLLAKLGAIDFAGGTVVHISSGVTGLVLALMIGHRHNDKHVPVRPSYVLIGGALLWVGWFGFNSGSALAANGIAVLALVNTWLASAAGVLTWGLAEYKMHGPGI

SEQ ID NO: 3140 - protein, 332 aa, Brassica napus
MSPEEELQSNGSVASSTRNIVGVLKEHNYLGLSDCSSVGSSNLSGLADDDKATISLKATELTLGLPGSQSPARDTELNLLGPAKLDEKPFFPLLPSKDEMCSSSSHKNIASGNKRGFSDTMDKVPLYTEKNWMFPEAVVATQSVIKKEVAQNLPKGKLSTTNNSSSPPAAKAQIVGWPPVRSYRKNTLATTCKNSDEVDGKPGSGPLFVKVSMDGAPYLRKVDLRSYTNYGELSAALEKMFTTFTLGQCGTSGATGKDVRNETKLKDLLNGKDYVLTYEDKDGDWMLVGDFSWEIFIGVCKKLKIMKGCDAIGLAAAPAPAPRAMEKSKMRA

SEQ ID NO: 3141 - protein, 436 aa, Streptomyces clavuligerus
MTETGTETETAGAPAETAETLAERWATEPRWRDIERTYGAEEVIRLSGSVREEHTLARRGADRLWRQLHELDYVHALGALTGGQAVQQVRAGLQAIYLFGWQVAADANQAGHTYPDQSLYPANSVPQVVRRINNALLRADQIATAENAGDGTDWLAPIVADAEAGFGGPLNAFELTKAMIEAGAAGIHYEDQLASEKKCGHLGGKVLVPTAQHIRTLNAARLAADIADVPTVIIARTDALAASLITSDVDERDAEFLTGERTAEGFHRVRNGMAPVIARGLAYAPYADLLWMETGTPDLAQAREFAEAIHAQYPEQLLAYNCSPSFNWRAALDDDRIAKFQRELGAMGYRFQFITLAGFHSLNHAMFDLARGYAEHGMTAYVDLQEREFAAQADGFTAVRHQREVGTGYFDLVSTAVNPASSTTALSGSTEEEQFH

SEQ ID NO: 3142 - protein, 499 aa, Zea mays
YNLGVQMSADASAAMEKIRAAGLLKTQGLIAGQWVDAYDGKTIEVQNPATGEVLANVSFMGSRETSDAIASAHSTFYSWSKLTASERGKALRKWYDLIISHKEELALLMTLEQGKPMKEALGEVNYGASFIEYFAEEAKRIYGDIIPPTLSDRRLLVLKQPVGVVGAITPWNFPLAMITRKVGPALACGCTVVVKPSELTPLTSLAAADLALQAGIPAGALNVVMGNAPEIGDALLQSTQVRKITFTGSTAVGKKLMAESANTVKKVSLELGGNAPCIVFDDADIDVAVKGSLAAKFRNSGQTCVCANRILVQEGIYEKFASAFIKAVQSLKVGNGLEESTSQGPLINEAAVQKVEKFINDATSKGANVMLGGRRHSLGMSFYEPTVVGNVSNDMLLFREEVFGPVAPLIPFKTEEEAVHMANDTNAGLAAYIFTKSIPRSWRVSESLEYGLVGVNEGIISTEVAPFGGVKQSGLGREGSKYGVDEYLELKYICMGNLG

SEQ ID NO: 3143 - protein, 131 aa, Brassica napus
MVYIKNQKTRAYSKRFQVKFKRRRQGKTDYRARLRLTNQDKNKYNTPKYRFVVRFTNKDVTAQIVYATIAGDIVMAAAYSHELPRYGLEVGLTNYAAAYCTGLLLARRVLKNRDLDEEYEGYVEATGEDFS

SEQ ID NO: 3144 - protein, 292 aa, Glycine max
  misc_feature (186)..(186): Xaa can be any naturally occurring amino acid
  misc_feature (206)..(206): Xaa can be any naturally occurring amino acid
  misc_feature (276)..(276): Xaa can be any naturally occurring amino acid
  misc_feature (288)..(288): Xaa can be any naturally occurring amino acid
MESTLKALRDGESVLDLSPRSTVSGGVEDIYGEDRATEDQLVTPWIFSVASGYSLLRDPQYNKGLSFTEKERDAHYLRGLLPPTVSTQQLQEKKLMNSIRQYQVPLQKYVAMMDLQERNERLFYKLLIDNVEELLPVVYTPTVGEACQKYGSIFRRPQGLYISLKEKGKILEVLKNWPERSIQVIXVEPDGERIFGDLGILGCQGXGIPGGKLALYTALGGVRPSACLPITIDVGTNNEKLLNDEFYIGLRQRRATGQEYYDLMHEFMTAVKQNYXEKVLVQFEDFAXHNAF

SEQ ID NO: 3145 - protein, 240 aa, Populus alba x Populus tremula
MVPKFLFSASFVLFFLLHCPPALAQSPAAAPAPPGPINVTKVLEKGGQFSAFIRLLKATQEDVTLNGQLNNTNNAITIFAPSDNAFSSLKSGTLNSLSDQEKAELVQFHIIPQFLSSSQFQTVSNPLTTQAGSGGRLELNVTTTGNSVNITTGLTNTSVSGTIYTDNQLAVHQVDKVLLPLDIFTPKPPTPAPAPEKPKKRSKAAASPESPADTSGAVSFTVLNNVVFFGLCMVAAIYSL

SEQ ID NO: 3146 - protein, 279 aa, Borrelia burgdorferi B31
MANKINWFPGHMKRALDLIKNNLQKANIVLEILDARAPFSSKNPLTEKITKNQAKIILLHKSDVAQINEIIKWKKYFENLGNTVIISNIYKKGMRKQIIDIIKKLAIVKKIKNYKEKIKVLIIGVPNVGKSSIINLLSGKKSAKVANKPGYTKNIQIVKINEEINLFDMPGILWHNLVDQSIAKKLAILDMIKNEIVDNTDLALYLLEIMDQNNKNILLKKYEIYHKNSLDILQNFAKARKLIGKKNELNLEKASKILIKEFREGKFGKIILDKNYNAF

SEQ ID NO: 3147 - protein, 192 aa, Glycine max
  misc_feature (139)..(139): Xaa can be any naturally occurring amino acid
MEDGAGRGLECPKTMDGKASNGNGLEKEIPSCCLKAKASIPESEAKCHSTVVSGWFSASQTCSGKSGKAVYFNNPMWPGEAHSIKVEKILYKEKSEYQEVLVFEVWPLHLIMYYNFNVKGIDANPFILQSSTYGKVLVXLDGIVQLTEKDECAYQEMIAHLPLCSIQSPKTVKPFDLMIFVLSLYYDCRIKK

SEQ ID NO: 3148 - protein, 106 aa, uncultured Rickettsia sp.
MLKEIGSSENIPKYIAKAKDKNDPFRLMGFGHRVYKNYDPRAAVLKETCKEVLKELGQLENNPLLQIAIELEAIALKDEYFIERKLYPNVDFYSGIIYKAMGIPSQ

SEQ ID NO: 3149 - protein, 176 aa, Glycine max
  misc_feature (115)..(115): Xaa can be any naturally occurring amino acid
  misc_feature (125)..(125): Xaa can be any naturally occurring amino acid
MAHSMISFRAVTTVNRARADMVAPFTGLKSMAGFSTRKTNNVITSIASNRGRVQCMHVWPPVGKKKTETLFYLPDLDDAQLAKEVECPVRKGWIPCYELEFEHAFVYREHNKSPXYYNGHYWTMXKLPIFDCTNTAQVWKELQETKTAYPNDFIHIIGFDDVLQMQVINYITYKPA

SEQ ID NO: 3150 - protein, 479 aa, Mycobacterium tuberculosis H37Rv
MAREISRQTFLRGAAGALAAGAVFGSVRATADPAASGWEALSSALGGKVLQPDDGPQFATAKQVFNTNYNGYTPAVIVTPTSQLDVQKAMAFAAANNLKVAPRGGGHSYVGASTANGAMVLDLRQLPGDINYDATTGRVTVTPATGLYAMHQVLAAAGRGIPTGTCPTVGVAGHALGGGLGANSRHAGLLCDQLTSASVVLPSGQAVTASATDHPDLFWALRGGGGGNFGVTTSLTFATFPSGDLDVVNLNFPPQSFAQVLVGWQNWLRTADRGSWALADATVDPLGTHCRILATCPAGSGGSVAAAIVSAVGTQPTGTENHTFNYLDLVRYLAVGNLNPSPLGYVGGSDVFTTITPATAQGIASAVDAFPRGAGRMLAIMHALDGALATVSPGATAFPWRRQSALVQWYVETSGSPSEATSWLNTAHQAVRAYSVGGYVNYLEVNQPPARYFGPNLSRLSAVRQKYDPSRVMFSGLNF

SEQ ID NO: 3151 - protein, 192 aa, Agrobacterium tumefaciens str. C58
MADRMSSKTIVDVEDLSGDAVDLTEITGVVKWFDVAKGFGFIVPDNGTQDVLLHVSCLRRDGYQTILEGTRIVALIQRRDRGFQVFRILSMDQSTAVHPSQLPPVRTHVQVTPHSGLERAIVKWFNRTKGFGFLTRGEGTEDIFVHMETLRRFGLTELRPGQVVLVRYGDGDKGLMAAEIHPDNPVSIGMSH

SEQ ID NO: 3152 - protein, 335 aa, Capsicum chinense
MVHEKQVIDEVSGWLRVFDDGSVDRTWTGPPEVKFMSEPVKPHDDFIDGIAVKDVVADDKSGSRLRIYLPEQNGGSVDKLPVVVHFHGGGFCISQADWFMYYTVYTRLARVANAIIVSVFLPLAPEHSLPAACDSGFAALLYLRDLSRQKINEPWLSNFADFNRVFLIGDSSGGNIVHHVAARAGEEDLSPMKLAGAIPIHPGFVRSKRSKSELEQEQTPFLTLDMVDKFLGFALPMGSNKDHPITCPMGDAAPAVEELKLPPYLYCVADKDLIKDTEMEFYEALKKAKKDVELCISYGVGHSFYLNKIAVEMDPVTGSATEKLFEAIAEFINKH

SEQ ID NO: 3153 - protein, 498 aa, Oryza sativa (japonica cultivar-group)
MATCLDSLGPLLGGAANSTDAANYICNRFTDTSSAVDATYLLFSAYLVFAMQLGFAMLCAGSVRAKNSMNIMLTNVLDAAAGALFYYLFGFAFAFGTPSKGFIGKQFFGLKHMPQTGYDYDFFLFQWAFAIAAAGITSGSIAERTRFSAYLIYSAFLTGFVYPVVSHWFWSTDGWASAGRLTGPLLFKSGVIDFAGSGVVHLVGGIAGLWGAFIEGPRIGRFDAAGRTVAMKGHSASLVVLGTFLLWFGWFGFNPGSFTTISKIYGESGTIDGQWSAVGRTAVTTSLAGSVAALTTLYGKRWLTGHWNVTDVCNGLLGGFAAITAGCSVVDPWASVICGFVSAWVLIGCNKLSLILKFDDPLEATQLHAGCGAWGIIFTALFARREYVELIYGVPGRPYGLFMGGGGRLLAAHIVQILVIVGWVSATMGTLFYVLHRFGLLRVSPATEMEGMDPTCHGGFGYVDEDEGERRVRAKSAAETARVEPRKSPEQAAAGQFV

SEQ ID NO: 3154 - protein, 506 aa, Rhodospirillum rubrum
MLYAAPGTADAIFAFKPRYDNFIDGTWQPPVRGEYFDNVTPITGKVFCKAARSTEEDITLALDAAHAAADRWGRTTAAERALILNRIADRLQDNLETLAYVESIDNGKPIRETLAADIPLAIDHFRYFAACIRAQEGSLSQIDETTIAYHFNEPLGVVGQIIPWKFPILMATWKLAPALAAGNCIVLKPAEQTPISILVLTELIADLLPPGVLNVVNGFGLEAGKPLASSKRIAKIAFTGETATARLIMQYASQNLIPVTLELGGKSPNVFFDDIASADDSFFDKAVEGFVMFALNQGEICTCPSRALIHESLYDRFIERALARVAVIKQGSPLDTETMIGAQASTEQMDKILSYMDIGREEGATVLAGGARAELGGELDGGYYVQPTVFKGNNSMRIFQEEIFGPVVAVTTFKDEDEALHLANDTHYGLGSGVWTRDGNRAFRFGRGIKAGRVWTNCYHLYPAHAAFGGYKQSGIGRENHHMMLDHYQQTKNLLVSYDPKAMGFF

SEQ ID NO: 3155 - protein, 243 aa, Triticum aestivum
MGGGVMRTAAKVGLAGGAAAAAGRFRNVAPSFATAPAAEAAAAAPLLSAAGEIPAVAPAGSQWASWEVDDWEFADWRSESASEADVAVVGGPRLVFAPPSREEAEEATAELREAIDRVYFKETPVEVVKEHDQELSKLGADALIPAMPGHVVQAFTLLKSSPEAQSVVASLASDKNVWDAVLKNERVMEFYKSHQQTLVNTFPEGTDSTDSVESPEKFEEASPEYALPTGSPLSDFGANANKR

SEQ ID NO: 3156 - protein, 175 aa, Triticum aestivum
  misc_feature (165)..(165): Xaa can be any naturally occurring amino acid
MAPTVMASSATSVAPFQGLKSTAGLPVSRRSNGASLGSVSNGGRIRCMQVWPIEGIKKFETLSYLPPLSTEALLKQVDYLIRSKWVPCLEFSKVGFIFREHNASPGYYDGRYWTMWKLPMFGCTDATQVINEVEEVKKEYPDAYVRIIGFDNMRQVQCVSFIAFXPPGCEESGKG

SEQ ID NO: 3157 - protein, 75 aa, Glycine max
  misc_feature (37)..(37): Xaa can be any naturally occurring amino acid
  misc_feature (57)..(57): Xaa can be any naturally occurring amino acid
IYRIESYDVTSIPACIPMYLMSRLIKSLAFNWLISIXGSDKIFGRCVCFLNAPLKEXFHQETCRMIKALHKYDCL

SEQ ID NO: 3158 - protein, 162 aa, Triticum aestivum
MEGRMFGLETPLMTALQHLLDVPDGESGGAGNAGGEKQGPTRAYVRDARAMAATPADVKELPGAYAFVVDMPGLGSGDIKVQVEDERVLVISGERRREEKEDAKYLRMERRMGKLMRKFVLPENADMEKISAVCRDGVLTVTVEKLPPPEPKKPKTIQVQVA

SEQ ID NO: 3159 - protein, 358 aa, Saccharomyces cerevisiae [sequence omitted]

SEQ ID NO: 3160 - protein, 341 aa, Salmonella typhimurium LT2
MKVKAVFINKPGEVETRWVDYPHKKENEVLIKVDAAGICGSDIGAFRGTNPLVTYPRIIGHEVTGIVLQEGAGMPDNIKEGDRVIVDPYIYCGHCYPCSVGRTNCCENLNVIGVHVDGAMQEVVTHPAHLIHKIPDNVPSEMAPLAEPLTIALHALHRANVKAGEYVAIIGAGAIGLMAALSARHYKATPILIDIVEERLRYAQKLGVPYVLNAADDQVIDAIKNITHGTMAQVVIEASGANSAIRNTLDLASFAGRISFTGWPKQETSLPTNLITYKELDLRGSRTSAGEFDEALRMLSTLEINPQDVVSKVVNLDEIPDAVKELDRYPERYLKINAVFH

SEQ ID NO: 3161 - protein, 162 aa, Zea mays
MDAVMFGLETPLMAALQHLLDVPDGDAGAGGDNKTGGGATRTYVRDARAMAATPADVKELPGAYAFVVDMPGLGTGDIRVQVEDERVLVVSGERRREEREDDAKYLRMERRMGKFMRKFVLPDNADVDKVAAVCRDGVLTVTVEKLPPPEPKKPKTIEVKVA

SEQ ID NO: 3162 - protein, 332 aa, Arabidopsis thaliana
MSNVIGDRTEDGLSTAAAASGSTAVQSSPPTDRPVRVYADGIYDLFHFGHARSLEQAKLAFPNNTYLLVGCCNDETTHKYKGRTVMTAEERYESLRHCKWVDEVIPDAPWVVNQEFLDKHQIDYVAHDSLPYADSSGAGKDVYEFVKKVGRFKETQRTEGISTSDIIMRIVKDYNQYVMRNLDRGYSREDLGVSFVKEKRLRVNMRLKKLQERVKEQQERVGEKIQTVKMLRNEWVENADRWVAGFLEIFEEGCHKMGTAIVDSIQERLMRQKSAERLENGQDDDTDDQFYEEYFDHDMGSDDDEDEKFYDEEEVKEEETEKTVMTDAKDNK

SEQ ID NO: 3163 - protein, 197 aa, Zinnia elegans
MSASRFIKCVTVGDGAVGKTCLLISYTSNTFPTDYVPTVFDNFSANVVVNGSTVNLGLWDTAGQEDYNRLRPLSYRGADVFILAFSLISKASYENVSKKWIPELKHYAPGVPIVLVGTKLDLRDDKQFFVDHPGATPITTAQGEELKKTIGAPEYIECSSKTQLNVKQVFDAAIKVVLAPPKAKKKKGKAQKACSIL

SEQ ID NO: 3164 - protein, 105 aa, uncultured Rickettsia sp.
MLKEIGSSEYIPKYIAKAKDKNDPFRLMGFGHRVYKNYDPRAAVLKETCKEVLKELGQLDNNPLLQIAIELEAIALKDEYFIERKLYPNVDFYSGLSIKLWVYRQ

SEQ ID NO: 3165 - protein, 158 aa, Arabidopsis thaliana
MSDDEHHFESSDAGASKTYPQQAGNIRKGGHIVIKGRPCKVVEVSTSKTGKHGHAKCHFVAIDIFTSKKLEDIVPSSHNCDVPHVNRVDYQLIDISEDGFVSLLTDNGSTKDDLKLPTDEALLTQLKNGFEEGKDIVVSVMSAIGEEQMCALKEVGPK

SEQ ID NO: 3166 - protein, 498 aa, Bacillus sp. KSM-K16
MSQVPTGENSLKTRLVSFLNGGSKKLLINGEWVDAVSGQTFETMNPATGDTLAIVAEAGQEDIDSAVKAARKAFDEGPWSKMSAAERSRLIYKLADLIEEHKEELAQLETLDNGKPIRETANADVPLAIEHFRYFAGWATKIVGQTIPVQGNYFNYTRHEAIGVVGQIIPWNFPLLMAAWKLGAALATGCTVVLKPAEQTPLSALYLGELINEAGFPKGVVNIVPGFGHSAGTAIVNHPAVDKVAFTGSTNVGKLIMKQASESLKRVTLELGGKSPNIILPDADLSKAVPGSLMGIMFNQGQVCCAGSRLYVQKKQYDHVVADLVSLTKKINQGDGLLEHTTMGPLISTQQQKRVKNYIDRGVEEGAELLAGGTIPYDQGYFVSPTIFADVDHSMTIAKEEIFGPVVAAMPFESVDDLIGKANDSDYGLAAGVWTQDIKKAHYIAHRIKAGTIWVNCYNVFDAASPFGGYKQSGIGREMGSYALDNYTEVKSVWVNMD

SEQ ID NO: 3167 - protein, 506 aa, Halomonas salina
MIYANPGSPESVVSFDARYGNYIGGEFVPPVKGQYFDNVSPVNGKPFCEIPRSTAEDIDKALDAAHAAAPAWGKTSAAERGNILLRIADRIEQNLELLAVAETWDNGKAVRETLNADLPLAVDHFRYFAGCIRAQEGTAADIDANTVAYHFHEPLGVVGQIIPWNFPILMAVWKLAPALAAGNCVVLKPAEQTPASILKLMELVGDLLPPGVVNVVNGYGAEAGQALATSTRIAKIAFTGSTPVGSHILKCAAENIIPSTVELGGKSPNIYFADIMDAEPEFIDKAAEGLVLAFFNQGEVCTCPSRALIQEDIYDAFMAKVMEKVATITRGNPLDTDVKVGAQASQEQFDKIMSYMEVAREEGAEFLTGGDKEHFDPAYDSGYYIQPTLLKGHNKMRVFQEEIFGPVVAVTTFKDEEEALAIANDTEFGLGAGVWSRDINVAFRMGRGIQAGRVWTNCYHQYPAHAAFGGYKKSGVGRETHKVALEHYQQTKNLLVSYDTNPLGFF

SEQ ID NO: 3168 - protein, 477 aa, Methylocystis sp. SC2
MSVQATHSGSARIDPRYDHAALAAARESDRFSLHTKHLNEMWVRVLKTIGYDVGFTRGLGPYLWDRKGDRYLDLLSGWGVFALGRNHPAVRDALVSVLDGELANLVQLDVSVLAGVLAEKLLGYAPWLEKVFFANSGAEAVEAAIKFARAATGRPGILHCAHSFHGLTYGSLSMNGDDIFKKGFGPLLPNAREVAFDDLDALERALAGRDVAAYFVEPIQGKGVNIPQEGYLLGAQALCRKYGTLFVADEIQTGIGRTGRFFAIDHYPGVEPDMIVVAKALSGGHVPVGAVLTRKWIFDKVFDRMDRAVVHGSTFSKNDLAMAAGVATLDVLKNERVIENAAKTGDRLLASFQRMAGGYELVADVRGKGLMIGVEFGPPKSFKLKAAWNLLETVNSGLFCQLISIPLFRDHKVLTQVAGHGNHTIKLLPPLTISDEDCDWIEQSFDAVIADAHKAPSAVWSLGKTLAEHAIKARMSG

SEQ ID NO: 3169 - protein, 487 aa, Burkholderia cepacia R1808
MTIKHWIDGREVASRDTFTTLNPATGDVIADVASGGDAEVDAAVRAAKAAFPKWANTPARERAKLMCRLAELIEKHVPMLAALETQDTGLPIAQTSKQLIPRAAENFNFFAQVCVQMNGRTYPVDDQMLNYTLYQPVGVCALVSPWNVPFMTATWKTAPCLALGNTAVLKMSELSPLTADQLGRLALEAGIPPGVLNVVHGYGATAGDALVRHSDVRAVSFTGGTVTGKRIMERAGLKKYSMELGGKSPVLIFDDADFDRALDASLFTIFSINGERCTAGSRIFVQRTIYDRFVQAFAQRANRLVVGDPADPATQLGAMITRQHWEKVTGYIRLGEQEGARVVAGGAQAPAGLAAHLRNGNFVRPTVFADVDNRMRIAQEEIFGPVACLIPFDDEDDGLRLANETSYGLASYLWTQDVGKVHRLARGIEAGMVFVNSQNVRDLRQPFGGVKESGTGREGGEYSFEVFAEIKNVCISMGSHHIPRWGV

SEQ ID NO: 3170 - protein, 183 aa, Methylocystis sp. SC2
MTASATESDETGLELVEVAGRIKWFDVAKGYGFVVPDDGSDDILLHVTILRRSGMQTAFEGARVVCEAQKRVKGMQVFRVIAMDESTAVHPSQSCAGRTHVQIVPTSGYEIAIVKWFNRMKGFGFLTRGEGTEDIFLHMETVRRYGMTELKPGDSVLVRYGGGPKGLMAAEVRPLDAKSVPSH

SEQ ID NO: 3171 - protein, 588 aa, Zea mays
  misc_feature (188)..(188): Xaa can be any naturally occurring amino acid
  misc_feature (299)..(299): Xaa can be any naturally occurring amino acid
  misc_feature (559)..(559): Xaa can be any naturally occurring amino acid
  misc_feature (572)..(572): Xaa can be any naturally occurring amino acid
MCGILAVLGCSDWSQAKRARILACSRRQEHPGPDWSGLYQHEGNFLAQQRLAVVSPLSGDQPLFNEDRTVVVVANGEIYNHKNVRKQFTGTHNFSTGSDCEVIIPLYEKYGENFVDMLDGVFAFVLYDTRDRTYVAARDAIGVNPLYIGWGSDGSVWIASEMKALNEDCVRFEIFPPGHLYSSAGGGXRRWYTPHWFQEQVPRTPYQPLVLREAFEKAVIKRLMTDVPFGVLLSGGLDSSLVASVTKRHLVETEAAEKFGTELHSFVVGLEGSPDLKAAREVADYLGTIHHEFHFTVQXGIDAIEEVIYHDETYDVTTIRASTPMFLMARKIKSLGVKMVLSREGSHELLGGYLYFHFAPNKEEFHRETCRKVKALHQYDCLRANKATSAWGLEVRVPFLDKEFINVAMGMDPEWKMYDKNLGRIEKWVMRKAFDDDEHPYLPKHILYRQKEQFSDGVGYNWIDGLKSFTEQQVTDEMMNSAAQMFPYNTPVNKEAYYYRIIFERLFPQDSARETVPWGPSIACSTPAAIEWVEQWKASNDPSGRFISSHDSTAIDHTXAVSRRWPTAAATXANGTVNGKDVAVAIAV

SEQ ID NO: 3172 - protein, 440 aa, Bordetella parapertussis 12822
MSNRETEIRNLQKDWAENTRWQGIKRAYSAEDVIRLRGSVAVEHSLARRGATRLWDSLHSEPFVNSLGALTGNQAMQQVKAGLKAIYLSGWQVAGDANLAGEMYPDQSLYPANSVPQVVRRINNALARCDQIQWMEGKNPGDQDYIDYYAPIVADAEAGFGGVLNAFELMKAMIEAGAAGVHFEDQLASVKKCGHMGGKVLVPTREAVSKLVSARLAADVMGTPTILLARTDADAADLVTSDVDENDRPFITGERTVEGFFRTRAGLDQAISRGLAYAPYADLIWCETSTPNLEYARKFAEAVHRQFPGKLLAYNCSPSFNWKKNLDDGTIAKFQRELGAMGYKFQFITLAGFHALNYGMFELAHGYARRQMSAFVELQQKEFAAAELGFTAVKHQREVGTGYFDAVTQTIEGGQSSTTALTGSTEEAQFEHGGQAVKAA

SEQ ID NO: 3173 - protein, 106 aa, uncultured Rickettsia sp.
MLKEIGSSEYIPKYIAKAKDKNDPFRLMGFGHRVYKNYDPRAAVLKETCKEVLKELGQLDNNPLLQIAIELEAIALKDEYFIERKLYPNVDFYSGIIYNAMGIPTQ

SEQ ID NO: 3174 - protein, 463 aa, Pseudomonas putida KT2440
MDKQKQDLISQQDRGAVLHPFTQLKDFASGKAGDPTIIETAKGITITDATGREYIDGFAGLYCMNVGYGRTEVAEAISKQAHKLAYYHTYAAHTTEELARLSDRLVKMAPGKMSKVFYGMSGSDANETQAKLVWYYNNLRGKPNKKKIIARERGYHGCSVVSGSMTGMSFYHDHMDLPIAGILRTGAPHYYWGAEPGETELEFSARRARELEELILREGPDTIGAFIAEPVLGTGGITPPPEGYWAAVQPVLKKYDILLIADEVITGFGRTGAMFGCDKYGIEPDLITVAKGLTSAYAPLSASIVGEKVYKVMEEGADRVGAFSHGYTYSGHPIGVAAANAVLDIVEGENIPAHVDKVGQYFQKSMQETFSSLPIVGEVRGVGMMAAIEFVADPATKKRFDPALKVGARISKAARDRNLIARAMPHGEILGFAPPLVTTEQEVDRIISIAHEAVLSVLDELKV

SEQ ID NO: 3175 - protein, 106 aa, uncultured Rickettsia sp.
MLKEIGSSEYIPKYIAKAKDKNDPFRLMGFGHRVYKNYDPRAAVLKETCKEVLKELGQLDNNPLLQIAIELEAIALKDEYFIERKLYPNVDFYSGIIYKAMGIPSQ

SEQ ID NO: 3176 - protein, 490 aa, Pseudomonas putida KT2440
MKDLAPSALNKLRRNDLLETRAYIDGRWVTGEGSLDVTDPANDQVIAQVAHCDESWVDLAVEAASRAFDGWRNTLPTQRGAVLRKWAALMRENQEDLAVIMTCEQGKPLSESRGEINYGANFVEWFAAEGERCYGETIPSHLPNSQLVTKLQPIGVTVAITPWNFPSAMITRKAAAALAAGCPMIVKPAPETPLSALALARLAEEAGIPGGVFQVLTGDAPKMSARLLAASAVRAFSFTGSTEVGRILLRQSADTVKKVSLELGGHAPFIVFDDASIAEAVEGCIGAKFATSGQDCLGANRIYVHRNIYGQFVEEFTKATEKLRVGHGLEEGVDIGPMTRVTVANKCREQISNALSLGAKLTCGGIDNHLGSSFVLPTVLADVTDKMDIAFEETFGPVAAILPFDSEDEVVTRANNTEFGLAAYVYTNDLRRACRVSDRLEYGMVALNTPKFTGAPIPFGGWKQSGLGREGSKHGLAEYMELKYVCIGGL

SEQ ID NO: 3177 - protein, 192 aa, Zea mays
MSLCTIARRLCLSKPSSGSRLSAIWAHLYSTEAAKDMGAKKYKYPDVYDPYGPMPPPSEKVVELADRIAALPPEEIKQIAPALLLRLNQEPPQAVSGQGFGFGAQVGSGAGSGKAEEKKAEKTVFDVRLEKFDAAAKIKIIKEIRTFTDLGLKEAKELVEKAPVVLKQSLTKDEAEAIIGKIKAAGGVAVME

SEQ ID NO: 3178 - protein, 389 aa, Salmonella typhimurium LT2
MTDTTILQNNTHVIKPKKSVALSGVPAGNTALCTVGKSGNDLHYRGYDILDLAEHCEFEEVAHLLIHGKLPTRDELNAYKSKLKALRGLPANVRTVLEALPAASHPMDVMRTGVSALGCTLPEKEGHTVSGARDIADKLLASLSSILLYWYHYSHNGERIQPETDDDSIGGHFLHLLHGEKPTQSWEKAMHISLVLYAEHEFNASTFTSRVIAGTGSDVYSAIIGAIGALRGPKHGGANEVSLEIQQRYETPDEAEADIRKRVENKEVVIGFGHPVYTIADPRHQVIKRVAKQLSEEGGSLKMYHIADRLETVMWETKKMFPNLDWFSAVSYNMMGVPTEMFTPLFVIARVTGWAAHIIEQRQDNKIIRPSANYTGPEDRPFVSIDDRC

SEQ ID NO: 3179 - protein, 489 aa, Glycine max
  misc_feature (259)..(259): Xaa can be any naturally occurring amino acid
FEQQYDRFMNSFRSLENNTQGQPDKVVSLAKWRILNRLHDRNETLYYRVLIDNIKEFAPIIYTPTVGLVCQNYSGLFRRPRGMYFSAKDKGEMMSMIYNWPAHEVDMIVLTDGSRILGLGDLGVQGIGIPIGKLDVYVAAAGINPQRILPVMLDVGTNNQKLLEDRLYLGLRQPRLEGEEYLSIVDEFMEAVHARWPKAIVQFEDFQMKWAFETLKRYQKRFCMFNDDIQGTAGVALAGILGTVRAQGRPLTDFVNQKXIVVVGAGSAGLGVLKMAIQTVAKISGCSELAAKSQFYLIDKDGLVTTERNSLDPAAAPFAKNPRDIEGLTEEGLTEGASIIEVVKKIRPHVLLGLSGVGGIFNEEVLKAMRESVSTKPAIFAFYMYMGTAECTAIDAFKHAGENMVFASGSPFENVDLGNGIVGHVNQANNMYLFPGIGLGTLLSGAHLITDGMLQAAAEWYDVNLENCFFFINQKPLELALMEVWQDVF

SEQ ID NO: 3180 - protein, 505 aa, Vinca major
MAIVDFLAAFLIFILTQKLIQTLFRRTYRRKLPPGPKGWPVIGALPYLGTMPHTSLAYMAKKYGPVMYLKVGTNDMVVVSTPDAARAFLKTLDINFSNRPPNAGATHLAYGAQDMVFAHYGPKWKLLRKLSNLHMRGGKALEDWSNVRISELGHMLETMYESSKKGEAVVVAEMLTYAMANMIGQVILSRRVFVTKGSDSNEFKDMVVELMTSAGLFNIGDFIPSIAWMDLQGIEGGMKRLHKKFDVLLTKLLEEHKESSSKRKGKPDLLDYVLANRDNSEGERLTTTNIKALLLNLFSAGTDTSSSIIEWALSEMLRNPSILKRAQHEMVQVIGRNRRLVESDISRLPYLQAICKETFRKHPSTPLNLPRIATEACEVNGYYIPKGTRLSVNIWAIGRDPDVWENPLEFNPDRFLSGKNAKIDPRGNDFELIPFGAGRRICAGTRMGILLVEYILGTLVHSFDWNLPSSVTKLNMDESFGLALQKVVPLAALVTPRLPINAYSP

SEQ ID NO: 3181 - protein, 496 aa, Oryza sativa (japonica cultivar-group)
MATCADTLGPLLGTAAANATDYLCNQFADTTSAVDSTYLLFSAYLVFAMQLGFAMLCAGSVRAKNTMNIMLTNVLDAAAGALFYYLFGFAFAFGAPSNGFIGKHFFGLKQVPQVGFDYSFFLFQWAFAIAAAGITSGSIAERTQFVAYLIYSAFLTGFVYPVVSHWIWSADGWASASRTSGSLLFGSGVIDFAGSGVVHMVGGVAGLWGALIEGPRIGRFDHAGRSVALRGHSASLVVLGSFLLWFGWYGFNPGSFLTILKSYGPPGSIHGQWSAVGRTAVTTTLAGSTAALTTLFGKRLQTGHWNVIDVCNGLLGGFAAITAGCSVVDPWAAIICGFVSAWVLIGLNALAARLKFDDPLEAAQLHGGCGAWGVIFTALFARKEYVDQIFGQPGRPYGLFMGGGGRLLGAHIVVILVIAAWVSFTMAPLFLVLNKLGLLRISAEDEMAGMDQTRHGGFAYAYHDDDASGKPDRSVGGFMLKSAHGTQVAAEMGGHV

SEQ ID NO: 3182 - protein, 352 aa, Cochliobolus heterostrophus
MPPAGSGSSRKISFNVSEQYDIQDVVGEGAYGVVCSALHKPSGQKVAIKKITPFDHSMFCLRTLREMKLLRYFNHENIISILDIQKPRNYETFTEVYLIQELMETDMHRVIRTQELSDDHCQYFIYQTLRALKAMHSANVLHRDLKPSNLLLNANCDLKVCDFGLARSAASTEDNSGFMTEYVATRWYRAPEIMLTFKEYTKAIDVWSVGCILAEMLSGKPLFPGKDYHHQLTLILDVLGTPTMEDYYGIKSRRAREYIRSLPFKKKIPWKAIFPKTNDLALDLLERLLAFNPVKRISVEDALKHPYLEPYHDPDDEPGADPIPEEFFDFDKNKDNLTKEQLKLLIYQEIMR

SEQ ID NO: 3183 - protein, 357 aa, Leuconostoc mesenteroides subsp. mesenteroides ATCC 8293
MTSVKKIVVLKGDYIGPEIMTAGLAVLDAATKDTTFAYELIDAPFGGDGIDRAGDPLPQSTIDVSKQADAVLLSAIGGPKWDNAPRRPEQGLLEIRSKLNLFANIRPTKVTAAQIDRSPLKPEYVENTDFVIVRELTSGAYFGKPRKLEAHQAIDTMYYSEEEVTRIMHQGFKMAQKRNKHVTIVDKSNVLATSKFWRKIANEVGKSYQDVTIDYYYVDAMTMAIMAKPTTFDVVIIPNLFGDILSDEAAQITGSIGQIPSMSVGESGPNLYEPIHGSAPDIAGQGIANPISMVNTVAMMLTESFDEKRIADKITAAVDYIIENHCVTPDMGGTMTTDEVTQKMVDYIKNYESADIK

SEQ ID NO: 3184 - protein, 136 aa, Triticum aestivum
MSEAVGTPESSGAKEQERFLPIANIGRIMRRGVPENGKIAKDAKESIQECVSEFISFITSEASDKCMKEKRKTINGDDLIWSMGTLGFEDYVEPLKLYLKLYREMEGDTSKGSISEQAGKKEVALNGQPGSSFNGM

SEQ ID NO: 3185 - protein, 283 aa, Magnetospirillum magnetotacticum MS-1
MTVASQCWTSIHGVVMPRIIYGTAWKKEKTADLVELALGQGFRGIDTACQPKHYHEPGVGEGLAAALAKGLRRDEIYLQTKFTPLAGQDPQRIPYDPSACLSQQVAQSFERSCANLRTEFLDGLVLHSPLGNPADFREVWSAMEGIFESGGTRQLGISNCYDPEVLRHLCETSRVKPAIVQNRFYAATGFDRILRAYCRKNGILYQSFWTLTANPEILVDDRVKALMAKHGRTAPQIFFRYLSQQEIIPLTGTTSAVHMGQDLEIGDFELSDAECQTLAPLLN

SEQ ID NO: 3186 - protein, 257 aa, Glycine max
MGKSYPTVSADYQKAVEKAKKKLRGIIAEKRCAPLMLRLAWHSAGTFDKGTKTGGPFGTIKHPAELAHSANNGLDIAVRLLEPLKAEFPILSYADFYQLAGVVAVEVTGGPEVPFHPGREDKPEPPPEGRLPDATKGSDHLRDVFGKAMGLTDQDIVALSGGHTIGAAHKERSGFEGPWTSNPLIFDNSYFTELLSGEKEGLLQLPSDKALLSDPVFRPLVDKYAADEDAFFADYAEAHQKLSELGLLMPKQRLGDC

SEQ ID NO: 3187 - protein, 321 aa, Glycine max
  misc_feature (68)..(68): Xaa can be any naturally occurring amino acid
MEAKKIPEVILNSGQKMPVIGLGTASIPLPPHEALTSIPIVAFEVGYRHFDTASLYGSEESLGKAVAXALDLGLIKSRDKVFITSKLWTTDAHPDLVVPTLKTHCRKKLGLEYVDLYLIHWPLRMKPEAKGYHNILKENVLPSFDMKGIWEAMEECYRLGLAKSIGVSNFGIKKLSQLLENATIPPAVNQVEMSPAWQQGKLKEFCKQKGIHVSAWSPLGAYKSAQGTNAVMESPILKEIACERQKSMAQIALRWIYEQGAIAIVKSFNKERMKQNLDIFDWELSQEESQKFSQIPQRRMYRGITFVSENGPYKTLEELWD

SEQ ID NO: 3188 - protein, 150 aa, Hordeum vulgare subsp. vulgare
MSIVRRSNAFDPFADLWADPFDTFRSIVPAFSGNSETAAFANARVDWKETPEAHVFKADLPGVKKEEVKVEVEDGNVLVVSGERTKEKEDKNDKWHRVERSSGKFVRRFRLPEDAKVEEVKAGLENGVLTVTVPKTEVKKPEVKAIEISG

SEQ ID NO: 3189 - protein, 122 aa, Glycine max
LINCVSTFCFIVNQVDSRHSVVVPDSNIFYIIALLRFIPPPPKGPPTELLVEQNHEIIQLCYNRGFDFKLYLPHYQSQENWMRHYGDKWTRFVERKANFDPLAILAPGQKIFSRIPQTLSIT

SEQ ID NO: 3190 - protein, 250 aa, Glycine max
MGKSYPTVSADYQKAVEKAKKKLRGFIAEKRCAPLMLRLAWHSAGTYDVSSKTGGPFGTIKHPSELAHGANNGLDIAVRLLEPLKAEFPILSYADFYQLAGVVAVEVTGGPEVPFHPGREDKPEPPPEGRLPDATKGSDHLRDVFGKAMGLSDRDIVALSGGHTIGAAHKERSGFEGPWTSNPLIFDNSYFKELLSGEKEGLLQLPSDKALLSDPVFRPLVEKYASDEDAFFADYAEAHQKLSELGFAEA

SEQ ID NO: 3191 - protein, 267 aa, Brassica napus
  misc_feature (70)..(70): Xaa can be any naturally occurring amino acid
  misc_feature (244)..(244): Xaa can be any naturally occurring amino acid
RFGSTAGAAIASHMDIDKVSFTGSTDVGRKIMQAAATSNLKKVSLELGGKSPLLIFDDADVNKAAELALXLGCFYNKGEICVASSRVFVQEAIYDKVVAKMVEKVKDWTVGDPFDSTSRQGPQVDKNEGATLLTGGNAIGDKGYYIEPTIFADITEDMKIYKEEIFGPVMSLMKFKTMEEGIKCANNTKYGLAAGIVSQNVDVINTVSRSIKAGVIWVNCYFAFDLDSPYGGYKMSGNCRQQGXMDALDSYLQVKSIAMPLHNSPWM

SEQ ID NO: 3192 - protein, 318 aa, Zea mays
IPGMKYFWDTLLDADLESDALGWQYITGSLPDGRELDRIDNPQFEGYKFDPHGEYVRRWIPELARLPTEWIHHPWDAPVSVLQAAGIELGSNYPLPIVELDAAKGRLQAALSEMWQLEAASRATMNNGTEEGLGDSSEVLFPQELQMEVDRQPAPAEAAANVHVPVPMPARRRGDQMVPTMTTSSLNRAGTEVSADLVVANSEEEDTRAQVPFHAHLHPRAEAPPAARRTNNGARQHDVFQQPRNHRREALLAPSASEASSSWTGREGAVVPVWSPPAASGHSDAFAADEADVSSRSYLGRHPQSHRLMNWSQLSQSS

SEQ ID NO: 3193 - protein, 364 aa, Zea mays
MGSTAGDVAAVVDEEACMYAMQLASSSILPMTLKNAIELGLLEVLQKEAGGGKAALAPEEVVARMPAAPSDPAAAAAMVDRMLRLLASYDVVRCQMEDRDGRYERRYSAAPVCKWLTPNEDGVSMAALALMNQDKVLMESWYYLKDAVLDGGIPFNKAYGMTAFEYHGTDPRFNRVFNEGMKDHSVIITKKLLDFYTGFEGVSTLVDVGGGVGATLHAITSRHPHISGVNFDLPHVISEAPPFPGVRHVGGDMFASVPAGDAILMKWILHDWSDAHCATLLKNCYDALPENGKAIVVECVLPVNTEATPKAQGVFHVDMIMLAHNPGGKERYEREFRELAKGAGFSGFKATYIYANAWAIEFIK

SEQ ID NO: 3194 - protein, 280 aa, Streptococcus mutans UA159
MEAYTLINGVHIPKIGFGTWKLADGDEAYKSVSYALEVGYRHVDTAQYYGNEVSVGRAIADSPIKREELFITTKIWNDKHSYDEAKQSVEESLAKLKLNYLDLLLIHWPNPKALRENDAWKTRNADVWRAMEDLYQAGKVRAIGVSNFMIHHLEPLLEVATVKPMVNQVLLAPGCSQEELVAFCRQNEMILEAYSPLGTGSIFDNQTAQDLANKYNKTVAQIALRWSLQKGFLPLPKSATPKNILSNLAIFDFDLTEDDILKLDKIENVKSQGNPDETAF

SEQ ID NO: 3195 - protein, 168 aa, Xylella fastidiosa Dixon
MTSIYTFTFTRLDGRPQALADWRGQVLLLVNVASHCGFTPQYAGLEMLWQRYRDAGLIVIGFPCDQFAGQEPGDEAKIAEFCTLTYGVDFPMAAKIKVNGADAHPLWQWLKHRRRGLFGVAAIKWNFTKFLIGRNGQPIARYSPIKSPEQLEVHIVRALGEEGGGNTH

SEQ ID NO: 3196 - protein, 177 aa, Zea mays
  misc_feature (81)..(81): Xaa can be any naturally occurring amino acid
  misc_feature (136)..(136): Xaa can be any naturally occurring amino acid
MVLEATMICIDNSEWMRNGDYAPSRFQAQADAVNLICGAKTQSNPENTVGVMTMAGKGVRVLVTPTSDLGKILACMHGLEXVGAEANLGCGNPGAQLALKHRQNKRQQQRIIAFMGGLGEQQESFETLGKKLKKNXVALEILNFGGTPGEKPEKRKLGFGLLTPGKPPLCLSPPGEK

SEQ ID NO: 3197 - protein, 181 aa, Zea mays
MAYSMLSSAAVVTSPAQATMVAPFTGLKSSSAFPVTRKANNDITSIVSNGGRVSCMQVWPPIGKKKFETLSYLPDLTEVELGKEVDYLLRNKWIPCVEFELEHGFVYREHGSTPGYYDGRYWTMWKLPLFGCTDSAQVLKEVQECKTEYPNAFIRIIGFDNNRQVQCISFIAYKPPSFTGA

SEQ ID NO: 3198 - protein, 438 aa, Neurospora crassa
MSNNSAFTFSPPGPQHPIFSSASTPNIGTSASIDPRIPTVGSRARDLHYSIRDFLSTHPLLELGGQEHFSVERRRHQDVFGLHALPKDKIHPIDDVEFTAIRGPHGTIPVRILYPTSGKDNRNKGKAGALIYFHGGGYTVGSVDEFENGLRLIAEESGCQVYAVEYRLAPEFKYPVQLDEYSAVIDWVQGEGGKTRGVHPEKVVGGGDSAGGNMTAAICLRRMDEGRKPLAGQILLYPEARLPFDTPAATENNSDISPQDRYVSPGMQSVEDLRHQPPAAVFTSGYDPLRDVGCEYASKLSQAGVPTRWRHYDNLTHGWLQLTAWSEVAEQAVKDVAHQVKRLVFAATDTHTLKSPQGQLPVDRLNIQTWNCGHTKFAGSKPGWQHVYCLYLGHLVPPLHLGLDLYPKVILSVALEVSRIPPKLRQIKTSQQPIVLVV

SEQ ID NO: 3199 - protein, 92 aa, Glycine max
  misc_feature (52)..(52): Xaa can be any naturally occurring amino acid
  misc_feature (55)..(55): Xaa can be any naturally occurring amino acid
  misc_feature (65)..(65): Xaa can be any naturally occurring amino acid
VGFPTSKTYNDITSIVSNGGRLQCMHVWPPLGKKKSETLFYLPYLYDAQSAXKYXYLLKKGWIPXWEFQLDHSLVYHDHYRLPRYYDGRYWT

SEQ ID NO: 3200 - protein, 623 aa, Triticum aestivum
MANASSISRSLRRSLAPDDLHRLLLQRSRAFVTAECHRPVVLHKRGPDILHDPWFNRGTAFSMTERDRLGLRGLLPPSVVSSQQQIDRFMGDLKRLEQNARDGPSDTYQLAKWRILNRLHDRNETMYYKVLIDNIEEYAPIVYTPTVGAVCQNYSGLFRRPRGMYFSAEDRGEMMSMVYNWPADQVDMIVVTDGSRILGLGDLGVQGIGIAIGKLDLYVAAAGINPQRVLPVMIDVGTNNEKLLKDPLYLGLQEHRLEGEDYVEIIDEFMEAVFSRWPNVIVQFEDFQSKWAFRLLQRYRKTYRMFNDDVQGTAGVAIAGLLGAVRAQGRPMIDFPKQKIVVAGAGSAGIGVVNAASRTMARMLGNNEVAFESARSQFWIVDAHGLITEERVDIDPDARPFARRKSELTHQGLNEGASLIEVVKKVKPDVILGLSAVGGLFSKEVLEALKDSSSSRPAIFAMSNPTKNAECTPEEAFSIIGEKVVFSSGSPFDDVDLGDGKIGHSNQGNNMYLFPGIGLGTLLSGARIVSDGMLQAAAERLASYMKEEEVLQGIIYPPTSRIRDITKEVAAAVVREAVADDLAEGYRDMDARELARLSEEETVDYVKNNMWNPVYPTVVYKKD

SEQ ID NO: 3201 - protein, 58 aa, Zea mays
  misc_feature (15)..(15): Xaa can be any naturally occurring amino acid
MPQGTANCAHILIAXILPPLGALLIHGRGHQLWICLLLTFLDYIPGIIYAIYAITRNT

SEQ ID NO: 3202 - protein, 134 aa, uncultured Rickettsia sp.
ANEAVINMLKEIGSSENIPKYIAKAKDKNDPFRLMGFGHRVYKNYDPRAAVLKETCKEVLKELEQLENNPLLQIAIELEAIALKDEYFIERKLYPNVDFYSGIIYKAMGIPSQMFTVLFAIARTVGWMAQWKEM

SEQ ID NO: 3203 - protein, 106 aa, uncultured Rickettsia sp.
MLKEIGSSENIPKYIAKAKDKNDPFRLIGFGHRVYKNYDPRAAVLKETCKEVLKELGQLENNPLLQIAIELGAIALKDEYFIERKLYPNVDFYSGIIYKAMGIPSQ

SEQ ID NO: 3204 - protein, 145 aa, uncultured Rickettsia sp.
ANEAVINMLKEIGSSENIPKYIAKAKDKNDPFRLMGFGHRVYKNYDPRAAVLKETCKEVLKELEQLENNPLLQIAIELEAIALKDEYFIERKLYPNVDFYSGIIYKAMGIPSQMFTVLFAIARTVGWMAQWKEMHEDPEQKISRP

SEQ ID NO: 3205 - protein, 138 aa, uncultured Rickettsia sp.
ANEAVINMLKEIGSSENIPKYIAKAKDKNDPFRLIGFGHRVYKNYDPRAAVLKETCKEVLKELGQLENNPLLQIAIELEAIALKDEYFIERKLYPNVDFYSGIIYKAMGDTVANVHGTFCNSTNHRLDGTMERNARRP

SEQ ID NO: 3206 - protein, 158 aa, Arabidopsis thaliana
MSSNKILLTSSDGESFEIDEAVARKFLIIVHMMEDNCAGEAIPLENVTGDILSKIIEYAKMHVNEPSEEDEDEEAKKNLDSWDAKFMEKLDLETIFKIILAANYLNFEGLLGFASQTVADYIKDKTPEEVREIFNIENDFTPEEEEEIRKESAWTFNE

SEQ ID NO: 3207 - protein, 482 aa, Ralstonia eutropha JMP134
MHNLNTFYIGGEWVKPADGATLADLVNPATEAVIGTVAMGGAADVDRAVAAARDAFASWSRSSREERLALLRRISDGYKARIGEIAEAISTEIGAPIWLCREYQAPMGLVQIQAAIAALEAFEFVTVKGTTQVVREAVGVAALITPWNWPVNQIAAKVAPALAAGCTVVLKPSEIAPLDARIFAEIVQEACQATSTPAGVFNMLFGTGPTVGAALSRHPDVDMVSITGSTRAGVDVAMQAAPTVKRVAQELGGKSPNVILDDADLKAAVSQGVVSCMLNSGQTCTAPTRMLVPRAQYQMAIAIAQATVQALTVGDPSSPDSKLGPSSNRAQYERVQRMIEAGIQEGARVVAGGPGRPEGLAQGFYNRPTVFADVSNDMTIAREEIFGPVLSMIPYDNEAEAIRIANDTPYGLAAYVWSGNPARARRVAGELRAGSVQINGAKMDFAAPFGGYKTSGNGREFGAYGLAEFLEYKSVAGCTVDE

SEQ ID NO: 3208 - protein, 186 aa, Triticum aestivum
  misc_feature (49)..(49): Xaa can be any naturally occurring amino acid
  misc_feature (71)..(71): Xaa can be any naturally occurring amino acid
  misc_feature (81)..(81): Xaa can be any naturally occurring amino acid
  misc_feature (101)..(101): Xaa can be any naturally occurring amino acid
MAGVGRNMVAPLLVLNLIMYIVVIGFASWNLNHFINGLTNRPGVGGNGXATFYFLVFAILAGVVGAASKAXAACNHVRTWXRGDSLATSASSALVAWAITXALAFGLACKEIHIGGYRGWRLRVLEAFVIILMFTQLLYVLALHSGLFGNQFGNHAGAGGYGAEHGAYGAGDPHNKGMGTGGVARV

SEQ ID NO: 3209 - protein, 413 aa, Methylobacillus flagellatus KT
MSTKIKVPTTGEKISVNADNSLNVPDHPIIPFIEGDGIGVDITPPMRHVVDSAVAKAYGGKRAIAWMEVYAGEKAVKTYGDNTWLPDETLKAVKDYVISIKGPLTTPVGGGIRSLNVTLRQELDLYVCLRPIQYFQGVPSPVKHPEKTNMVIFRENTEDIYAGIEWAAGTDEVKKVVDFLSDMGVRKKIRFPEASAIGIKPVSIDGSKRLVRKAIQYAIDNNRKSVTIAHKGNIMKFTEGGFKTWGYEVAKEEFGAVEIDGGPWCKLPNGIIIKDCIADAFLQEILLHPADYDVVATLNLNGDYISDALAAQVGGIGIAPGANISDTVAMFEATHGTAPKIAGKDIANPSSLILSAEMMLRHLGWTEAADLVINGVAKAIQAKRVTHDFSSQMEGATQVGSAEFGAEIVKHMS

SEQ ID NO: 3210 - protein, 175 aa, Brassica napus
MGDSDKDSGGGQNGQSPLSPREQDRFLPIANVSRIMKKALPANAKISKDAKETMQECVSEFISFVTGEASDKCQKEKRKTINGDDLLWAMTTLGFEDYVEPLKVYLQRFREIEGERAGLGRPQTGGEGGEHQRDAGLGDGGGFYGGGGMQYHQHHQFLEQQDRVYGSTGGGGGDG

SEQ ID NO: 3211 - protein, 359 aa, Zea mays
MGSTAGDVAAVVDEEACMYAMQLASSSILPMTLKNAIELGLLEVLQKEAGGGKAALAPEEVVARMPAAPGDPAAAAAMVDRMLRLLASYDVVRCQMEDRDGRYERRYSAAPVCKWLTPNEDGVSMAALALMNQDKVLMESWYYLKDAVLDGGIPFNKAYGMTAFEYHGTDARFNRVFNEGMKNHSVIITKKLLDFYTGFEGVSTLVDVGGGVGATLHAITSRHPHISGVNFDLPHVISEAPPFPGVRHVGGDMFASVPAGDAILMKWILHDWSDAHCATLLKNCYDALPENGKVIVVECVLPVNTEATPKAQGVFHVDMIMLAHNPGGKERYEREFRELAKGAGFSGFKATYIYANAWA

SEQ ID NO: 3212 - protein, 192 aa, Xylella fastidiosa Ann-1
MNMLNVLRFPVLALALAFVSSGVLADVGSLLDLDYRPLAGKETVNLQRLYGGKVLLVVNTASKCGFTPQYEGLEALHQKLSPLGFAVLGFPSNDFKGQEPGDEQQIQEFCTLTYGVKFPMFQKVHVKGDEVTPLYQRLTQTTGVAPGWNFHKYLIARDGHVVAQFDSRTRPDDPILLEAIKRELAKSVQVVH

SEQ ID NO: 3213 - protein, 165 aa, Ralstonia solanacearum
MSDIYAFEADSLAGQRVPLSQYRGKVLLIVNTASQCGFTPQYAGLEAVYKRLNEKGLEVLGFPCNQFGKQEPGGAEEIGAFCEKNYGVSFPMFGKIEVNGSNAHPLYKWLTSEKPGVLGTEAIKWNFTKFLLRRDGTVYKRYAPLTKPEEMLGDIETLLAEPDPL

SEQ ID NO: 3214 - protein, 281 aa, Oryza sativa (japonica cultivar-group)
MYTGIQTRRIPVHVLPLPMSPPLELDYIGLSPPPPPPSSSSAAAARADDVDLKGTELRLGLPGSESPDRRPAAIAAAAATATTLELLPAKGAKRVFPDEAALTPPTAAAGKGKAAREGEEVGAEEEDKKVAAPPQPAAKAQVVGWPPIRSYRKNTMATNQIKSNKEDVDAKQGQGFLYVKVSMDGAPYLRKVDLKTYKNYKDMSLGLEKMFIGFSTGKEGAENQKDGEYVLTYEDKDGDWMLVGDVPWEMFTDSCRRLRIMKGSDAIGLAPRAGEKSKNRN

SEQ ID NO: 3215 - protein, 165 aa, Triticum aestivum
  misc_feature (20)..(20): Xaa can be any naturally occurring amino acid
  misc_feature (29)..(29): Xaa can be any naturally occurring amino acid
  misc_feature (57)..(57): Xaa can be any naturally occurring amino acid
  misc_feature (66)..(66): Xaa can be any naturally occurring amino acid
  misc_feature (88)..(88): Xaa can be any naturally occurring amino acid
  misc_feature (93)..(93): Xaa can be any naturally occurring amino acid
  misc_feature (101)..(101): Xaa can be any naturally occurring amino acid
VMASSATSVAPFQGLKSTAXLPVSRRSNXASLGSVSNGGRIRCMQVWPIEGIKKFEXTLSYLPPLXAREALLKQVDYLIRSKWVPCLXFTKVXGFIFREHXRISLGTTNGRYWAMWESCPMFGATDPNKRWIKQGEGGSRKGVTPGAVLSGNPSGSNQCGQGGVA

SEQ ID NO: 3216 - protein, 209 aa, Zea mays
  misc_feature (101)..(101): Xaa can be any naturally occurring amino acid
MSYYGDRRAESSIVEAFTLSPLPYPVILVLLMVTLLLGASWFFTYDDFIEEASQQLSWALLGVPIALVLLIRWISSVDSFEGYLGFYPEGEPLEGPLRAGXAEGSSPWGVALLVLLLLVLASFHSTIHDMWGAVNGCAPAPGSCLSARLVCLCSVDRSIDEVLMSFFFSSFCPLRAALAWYVVLHARTYGSMIPCTYLLGGCCGAGYRV

SEQ ID NO: 3217 - protein, 405 aa, Pseudomonas syringae pv. syringae B728a
MSVEHAAVQRADFDQVMVPNYAPAGFIPVRGAGSRVWDQAGRELVDFSGGIAVNVLGHCHPALVGALTEQANNLWHVSNVFTNEPTLRLAKKLVDATFAERVFFCNSGAEANEAAFKLARRVAHDQYGPEKYEIIAALNSFHGRTLFTVSVGGQPKYSDGFGPKITGISHVPYNDLDALKAAVTDKTCAVVLEPIQGEGGVLPGQLEYLQGARKLCDEHNALLVFDEVQSGMGRSGHLFAYMHYGVTPDILSSAKSIGGGFPLAAMLTTEKLARHFAVGVHGTTYGGNPLACAVGEAVIDVINTPEVLAGVQRKHQQFKTRLQSIGQQYGVFSEVRGLGLLIGCVLSDAWKGKAKDIFNAAEAQDLMILQAGPDVIRFAPSLVIEDADIEEGLNRFERAIAQLTS

SEQ ID NO: 3218 - protein, 277 aa, Bacillus thuringiensis serovar konkukian str. 97-27
MSLTSLKDYTTLHNGVKMPWFGLGVFKVEDGSQVIDSVKAAIKNGYRSIDTAAIYQNEEGVGQAIRESGVSREELFITSKVWNSDQGYETTLQAFETTLEKLGLEYLDLYLVHWPVKGKYTESWKALEKLYKDGRVRAIGVSNFHIHHLQDVFEIAEIKPMVNQVEYHPRLAQEELHAFCKEHNIQLEAWSPLMQGQLLDNPTLQDIAKKYNKSTAQIILRWDLHNEVVTIPKSIKEHRIIENANIFDFELSSDDMKAIQALNEDHRVGPDPDNFNF

SEQ ID NO: 3219 - protein, 157 aa, Triticum aestivum
  misc_feature (17)..(17): Xaa can be any naturally occurring amino acid
  misc_feature (32)..(32): Xaa can be any naturally occurring amino acid
  misc_feature (60)..(60): Xaa can be any naturally occurring amino acid
  misc_feature (103)..(103): Xaa can be any naturally occurring amino acid
CWGRSVGFEIGVRGRRXAGFAFFQAANTAVRXPLFVNTAFPLLHSPLTSASVIFRRTRAXEMFQHEELVGSSWIGAYSALCFSCGHVAYGQLDMLRYRLYSGXIPGILLHHLILLICFTLALYRNVTINYLILTLLCETTHENLCQVVGLTSMIKDV

SEQ ID NO: 3220 - protein, 537 aa, Zea mays
  misc_feature (152)..(152): Xaa can be any naturally occurring amino acid
MGNCCRSPAAVAREDVSSSHFPASNAKKKPHQARNGGGAGQKRLSVLGDEGCEVVGIDDKYVLDRELGRGEFGVTYLCMDRGTKELLACKSISKRKLRTAVDVEDVRREVAIMRHLPKSPSVVSLREACEDDGAVHLVMELCEGGELFDRIXVARGHYTERAAASVTRTILEVVQLCHRHGVIHRDLKPENFLFANKKENSPLKAIDFGLSIFFKPGEKFSEIVGSPYYMAPEVLKRNYGPEIDIWSAGVILYILLCGVPPFWAETEQGVAQAILRGNIDFKREPWPNVSDNAKDLVRHMLEPDPKLRLTAKQVLEHHWLQNAKKAPNVPLGDIVKSRLKQFSRMNRFKRRALRVIADHLSAEEVEDIKDMFKTMDTDNDGIVSYEELKTGIAKLGSHLAESEVQMLIEAVDTNGRGALDYGEFLAVSLHLQRMANDEHLRRAFLFFDKDGNGFIEPEELREALVDDGAADSMEEVVNDILQEVDTDKDGKISYEEFVAMMKTGTDWRKASRHYSRGRFNSLSMKLIKDGSVKLGVE

SEQ ID NO: 3221 - protein, 209 aa, Triticum aestivum
MEDEEHEVYGQEIPVDGEDVDMGAGGDDAAKLHELDEMKRRLKEMEEEAAALREMQAKVAKEMQGGDPNATTSEAKEEMDSRSVFVGNVDYACTPEEVQQHFNSCGTVNRVTILTDKFGQPKGFAYVEFVEAEAIQEAVKLSESELHGRQIKVAPKRTNVPGLKQPRGGRGFNPYGGHPYMRPYPPPFYNPYGGYGRAPRFRRPRRPLH

SEQ ID NO: 3222 - protein, 163 aa, Ralstonia eutropha JMP134
MRRPTLACCVLALSLRAIAAPLTDAELDARVHALSEQLRCLVCQNQTLADSNAELAVDLRRQIREQLRQGASDEAVKQYLVQRYGDFVLYKPPLKPLTWLLWFGPLLLLLVVLAALWRPRARRVAPAGPLDDAERRRLAELLDEPPPQRSPRSIDTLPPLSPP

SEQ ID NO: 3223 - protein, 496 aa, Streptomyces clavuligerus
MVTAAISGTDEIRARADEALTRCGVDLTAVKATPHGPHPLTGADLFGLRAHTPEDVDRAVEAAHTAFLTWRTTPAPVRGALVKRFGELLTEHKQDLADLVTIEAGKIRSEALGEVQEMIDICDFAVGLSRQLYGRTMPSERPGHRLMETWHPLGVVGVISAFNFPVAVWAWNAAVALVCGDTVVWKPSELTPLNRAACAALLDLAIADAGAPKGLNQVVVGAADVGERLVDSPRVPLVSATGSTRMGRAVGPRVAARFGRTILELGGNNAAVVTPSADLDLTVNAAVFAAAGTAGQRCTTLRRLIVHEDIADTVVERLTAAFERLPIGDPFQDTTLVGPLVNEAAFGRMREAVERATAEGGTLCAGGERQFPDAAPGAYYVRPALVRMPAQTAVVREETFAPILYVLTYRDLDEAIRLNNEVPQACRQGSRTDGAPADDPRCRARRRAGGANCPAVPGRSGTGAGAGGTADRVRTGGTSHRLVRHRRVPDPAVRTS

SEQ ID NO: 3224 - protein, 204 aa, Triticum aestivum
  misc_feature (65)..(65): Xaa can be any naturally occurring amino acid
  misc_feature (78)..(78): Xaa can be any naturally occurring amino acid
  misc_feature (116)..(116): Xaa can be any naturally occurring amino acid
  misc_feature (119)..(119): Xaa can be any naturally occurring amino acid
MAPTVMASSATSVAPFQGLKSTAGLPVSRRSNGASLGSVSNGGRIRCMQVWPIEGIKKFETLSYXPPLSTEALLKQVXYLDSAPKWVPCLRVQQGGFIFPLSTTHPLGYYDGRYWXTMXETAYFRCTDPPSVQRSGGVKKEYLDPYSASSVRQLRKSMRQIALSHGLQESARLNTHHTGNIKCNAVAPTFCGGSFTSLPKLSRK

SEQ ID NO: 3225 - protein, 134 aa, Glycine max
AGTGEVVNCSEEQNGELFHSVLGGLGQFGIITRARIFLEPAPAMVKWIRVLYADFTAFIRDQEKLIFAEKAFDYVEGFVIINRTGLLNNWSSSFNPQDPVQASEFKSDGRTLFCLELAKYYNLEETLLVNQVRD

SEQ ID NO: 3226 - protein, 429 aa, Xylella fastidiosa Ann-1
MSDLDKVTLNAGETSLVLPVLKPTLGNGCVDIAKLTKETGLFTYDSGFTATASCKSAITYIDGEKGVLLYRGYPIEQLAEHSSFLEVAYLLMNGELPRKDEFAKFDDEITHHTMMHESLKNFLGGFHYDAHPMAMLAASVASLSAFYHDTLDLNDLEQRRLAAIRLIAKVPTLAAAAHRYSIGWPIRYPRNNLGYVERFLHMMFEVPSEPLQLNPVVTKALDLLFILHADHEQNASTSTVRLVGSTGANPYASVAAGITALWGPAHGGANEAVLKMLEEIGDAKNVDLVIAKAKTKDKNSPFRLMGFGHRVYKHFDPRAKIIREMAHTVLGELGVNDPLLEVALKLEEAALKDDYFVQRKLYPNVDFYSGIIYKAINIPLEMFTVMFAIARTAGWVSHWLEQQVDPEMKISRPRQIYTGHRERDYKDAR

SEQ ID NO: 3227 - protein, 305 aa, Mycobacterium avium subsp. paratuberculosis str. k10
MTALDGAERLDPALRAVATTRTDFSPAAIELTRAPFNERRRLAAAQTDTAGVRIVDDDANGVGVRIYRGGPEPAPAVIYCHAGGFALGNLDTDHRQCVELARRGRCTVVSVDYRLAPEHPYPAALQDAGTVLRWVHAEAAALGVDPARLAVAGSSAGAALAACLAHPDGSLPAVVFQLLHQPVLDDRATGSKARFRTSPAFDGEAAELMWRYYLGPTVGSAAAVPARRPELAGLPPALITCAEIDPFRDEAIDYARRLLDAGVCTELHVFARACHGFDSLLPDWPGSQRLFALQGEVLSAALHRD

SEQ ID NO: 3228 - protein, 281 aa, Glycine max
MPLILAKSDSIQIREVWNDNLEEEFALIREIVDNYPYIAMDTEFPGIVLRPVGNFKNSYDYHYQTLKDNVDMLKLIQLGLTFSDEHGNLPMCGGDDEESDTCCCIWQFNFREFNVNEDVFANDSIELLRQSGIDFKRNNENGIDAHRFGELLMSSGIVLNDNIHWVTFHSGYDFGYLLKLLTCQDLPDTQVGFFNLINMYFPTVYDIKHLMKFCNSLHGGLNKLAELLEVERVGISHQAGSDSLLTSCTFRKLKDNFFSGSLEKYAGVLYGLGVENGQGSH

SEQ ID NO: 3229 - protein, 482 aa, Pseudomonas syringae pv. tomato str. DC3000
MQLIWLRSDLRVHDNTALTAAMQRGPTLAVYLLSPTQWRNHDDADCKVDFWLRNLVELEKALGKLNVPLLIREADTWDQAPEVLATLCKQFKVEGLHLNEEYGINETRRDQAVQQSMQADGVHFTSHLDQLLFKPGSILTKTGNYFQVFTQFKKVCYTRLHQAMPRTVHTPEAQQPLSIKSDAIPDQVKGFSTPSKTLRDLWPAGEVEASRRIEAFAGEQISYYKDERDFPARPGTSQLSAYLAAGVISPRQCLHAALASNQGEFETGDVGTVTWINELLWREFYKHTLVGYPRVSRHRAFRPETEALKWRDAPEELLAWQEARTGLPIIDAAMRQLLETGWMHNRLRMVVAMFLTKNLLIDWREGERFFMRHLIDGDLAANNGGWQWSSSTGTDSAPYFRIFNPLSQSERFDPEGVFIKRWLPELADLNKKQIHDPASVGGLFGVADYPKPIVDLSKSRARALAAFKALPTRQPAAGADNG

SEQ ID NO: 3230 - protein, 70 aa, Triticum aestivum
  misc_feature (18)..(18): Xaa can be any naturally occurring amino acid
  misc_feature (22)..(22): Xaa can be any naturally occurring amino acid
  misc_feature (26)..(26): Xaa can be any naturally occurring amino acid
  misc_feature (31)..(31): Xaa can be any naturally occurring amino acid
  misc_feature (42)..(42): Xaa can be any naturally occurring amino acid
GHATCHFLAIDIFNGKKXEDIXPSSXHNCDXPHVDRQDYQLXIDITDDGYVSLLTESGNTKDDLKLPTDD

SEQ ID NO: 3231 - protein, 190 aa, Glycine max
LTLIILIFIILPLSIPNSLSEIRMASQSNTKSVHDFTVKDARGNDVNLADYKGKVLLLVNVASQCGLTNSNYTELNQLYEKYKGKGLEILAFPCNQFGAQEPGTNEEIVEFACTRFKAEFPIFDKVDVNGDNAAPLYKFLKSSKGGLFGDSIKWNFSKFLVDKDGNVVDRYAPTTSPLSIEKDIKKLLDA

SEQ ID NO: 3232 - protein, 117 aa, Glycine max
  misc_feature (37)..(37): Xaa can be any naturally occurring amino acid
  misc_feature (80)..(80): Xaa can be any naturally occurring amino acid
MASSMIFSPADTTVNRAGAGMAGPFTGLKYMAGFPTXRKTNNDLTWIARHGGKRPCMHVWPTIGKKKFETLSYLPDLDDXPLAKEGQYPLKKGWDPLLGITLEHRFAYPEHKKAPGY

SEQ ID NO: 3233 - protein, 321 aa, Glycine max
  misc_feature (255)..(255): Xaa can be any naturally occurring amino acid
MSATNVPKVLLQLQPPSKSNPLCVPVIGLGTAAVHNDGDTVKAAVIEAIKLGYRHFDTAAQYGSEQALGEAIAEALRVGLIASRDELFITSKLWCCDNHPHLVLPALQNSLRSLKLDYLDLYLIHWPITAKPGMWEMPYSEESLVPFDLKSVWAAMEECHKLGLTKSIGVSNFSCKKLENLLSFATIPPSVNQVEMNIAWQQKNLRAYCKAKGIIVTAYSPLGAKGSKWDINQILDNELTKQIAQAHGKTAAQVXLEWLFEQGVTFIPKSYNKERLKENLEIFDWSLTKDDHEKINQVKQERMFKYGTAAFPLPDLFDGET

SEQ ID NO: 3234 - protein, 120 aa, Glycine max
MEPMDIVGKAKEDASLPKATMTKIIKEMLPPDVRVARDAQDLLIECCVEFINLVSSESNEVCNKEERRTIAPEHVLKALGVLGFGEYIEEVYAAYEQHKLETMVIMLMTNVHDIYYNLTA

SEQ ID NO: 3235 - protein, 82 aa, Brassica napus
  misc_feature (24)..(24): Xaa can be any naturally occurring amino acid
AIRLAQVPCARMPAYVCQRRGLAXAVNHLGSTKVDFWKEPTNSTNGKGEHFVLISHSGWGWLFYSGYKLFTGVKGVEEKPAQ

SEQ ID NO: 3236 - protein, 166 aa, Bordetella pertussis Tohama I
MNTMYDFSAPTITGAERALADFRGQVALVVNVASRCGFTPQYSGLEELYRSYRNEGFVVLGFPCNQFGRQEPGDEAAIAQFCETQYAISFPLFAKIDVNGAHAHPLYRWLKARKPGLLGTRAIKWNFTKFLVGRDGLPLRRYAPAHTPESLRHDIARACAAPGPTP

SEQ ID NO: 3237 - protein, 498 aa, Zea mays
MSTCAADLAPLLGPAAANATDYLCGQFADTASAVDATYLLFSAYLVFAMQLGFAMLCAGSVRAKNTMNIMLTNVLDAAAGALFYYLFGFAFAFGTPSNGFIGKQFFGLKHLPRTGFDYDFFLYQWAFAIAAAGITSGSIAERTQFVAYLIYSAFLTGFVYPVVSHWFWSADGWAGASRTSGPLLFGSGVIDFAGSGVVHMVGGIAGLWGALIEGPRIGRFDHAGRSVALKGHSASLVVLGTFLLWFGWYGFNPGSFTTILKSYGPAGTVHGQWSAVGRTAVTTTLAGSVAALTTLFGKRLQTGHWNVVDVCNGLLGGFAAITAGCSVVEPWAAVICGFVSAWVLIGANALAARFRFDDPLEAAQLHGGCGAWGVLFTGLFARRKYVEEIYGAGRPYGLFMGGGGKLLAAQIIQILVIAGWVSCTMGPLFYALKKLGLLRISADDEMSGMDLTRHGGFAYVYHDEDPGDKAGVGGFMLKSAQNRVEPAAAVAAATSSQV

SEQ ID NO: 3238 - protein, 473 aa, Arabidopsis thaliana
MSSSVPNSDRKIVTGPAGYILEDVPHFSDDFPDHPTYPNPLQDNAAYSVVKQYFVDEDDTVPQKIVVHPDSPRGTHFRRAGPRQRVYFESDDVLACIVTCGGLCPGLNTVIREIVCGLSYMYGVKRILGIDGGYRGFYARNTIHLDLKTVNDIHRSGGTILGTSRGGHNTTKIVDSIQDRGINQVYIIGGDGSQKGAAAIFEEIRKRKLKVAVAGIPKTIDNDIPIIDRSFGFDTAVEEAQRAINAAHVEATSFENGIGLVKLMGRYSGFIAMHATLASRDVDCCLIPESPFFLEGSGGLFEFIDKRLKESGHMVIVIAEGAGQDLLSESMKESTTLKDASGNKLLQDIGLWISQRIKDHFAKKMTLTLKYIDPTYMIRAVPSNASDNVCCTLLAQSAVHGVVAGYNGFTVGLVNGRHTYIPFNRITEKQNKVVITDRMWARLLSSTNQPSFMKQADKIHSNQLVGEPGTMKW

SEQ ID NO: 3239 - protein, 380 aa, Vibrio parahaemolyticus RIMD 2210633
MPQTVAKKAELGGAGLRGQSAGSTALCTVGKTGTGLTYRGYDITDLANNAQFEEVAHLLLRGHLPSQQELDAYKTHLLSLRGLPTELKQALELIPASAHPMDVMRTGCSVLGNLEQEMSFDEQLQATERMLALFPAIICYWYRFSHDGVRIDTEDQTEDCIGGYFLRLLTDKEPSVLHKQVMHCSLILYAEHEFNASTFAARVCASTLSDIHSCITAAIGTLRGPLHGGANEAAMEMIEDWQTPDEAEANIMQMLANKDKIMGFGHAIYRESDPRNALIKRWSEELSKHVGDTHLYAVSERVESVMKREKGLFCNADFFHASAYHFMDIPTKLFTPIFVMSRLTGWAAHVYEQRANNRIIRPSADYTGPDHQEWVPIENR

SEQ ID NO: 3240 - protein, 189 aa, Archaeoglobus fulgidus DSM 4304
MKLARGPRYKVPLRRRREGKTNYRKRLKLLLSRKPRLVVRITNRRVIAQIVEYAPEGDRVVVGVDSAMLREFGWKGDLNNTPAAYLTGILIAKKALQKGIGEAVLDIGLHTPTRGSRVFAVLRGAVEGGLEVPHSDEVLPDDSRIRGEHIAAYYEMNPERFGEYEKRGLKPSDLPAHVDEIKEKLMVIS

SEQ ID NO: 3241 - protein, 477 aa, Populus tremula x Populus tremuloides
MLSQKQAEEAIVPSYSETDLHEGKEEETEENHSLFSIKSALWHGGSVWDAWFSCASNQVAQVLLTLPYSFSQLGMLSGILFQIFYGIVGSWTAYLISVLYIEYRSRKEKENVNFKNHVIQWFEVLDGLLGPYWKAVGLAFNCTFLLFGSVIQLIACASNIYYINDHMDKRTWTYIFGACCATTVFIPSFHNYRIWSFLGLGMTTYTAWYMAIAALIHGQVGGVTHSAPTKLVLYFTGATNILYTFGGHAVTVEIMHAMWKPQKFKYIYLMATLYVFTLTIPSATAVYWAFGDLLLNHSNAFALLPRNGFRDAAVILMLIHQFITFGFACTPLYFVWEKVIGMHDTKSICLRALARLPVVIPIWFLAIIFPFFGPINSAVGALLVSFTVYIIPSLAHMLTYRKSSARQNAAEKPPFFLPSWTAMYVINTFVVVWVLVVGFGFGGWASVTNFVRQVDTFGLFAKCYQCKPAVAAPPRPH

SEQ ID NO: 3242 - protein, 817 aa, Zea mays
  misc_feature (44)..(44): Xaa can be any naturally occurring amino acid
  misc_feature (66)..(66): Xaa can be any naturally occurring amino acid
  misc_feature (141)..(141): Xaa can be any naturally occurring amino acid
  misc_feature (160)..(160): Xaa can be any naturally occurring amino acid
  misc_feature (704)..(704): Xaa can be any naturally occurring amino acid
  misc_feature (772)..(772): Xaa can be any naturally occurring amino acid
MAQILLHGTLHATIFEAESLSNPHRATGGAPKFIRKLVEGIEDXTVGVGKGATKIYATVDLEKGPXVGGPRMISNEPVNPRWYESFHIYCAHMAADVIFTVKIDNSIGASLIGRAYLPVQDLLGGEEIDKWLEICDENREXVGDSKIHVKLQYFDVGKDXRNWARGVRSTKYPGVPYTFFSQRQGCKVTLYQDAHVPDNFVPRIQLADGKNYEPHRCWEDIFDAISKAQHLIYITGWSVYTEITLVRDTNRPKPGGDVTLGELLKRKASEGVRVLMLVWDDRTSVGLLKKDGLMATHDEETANYFHGTDVNCVLCPRNPDDSGSFVQDLQISTMFTHHQKIVVVDHEMPNQGSQQRRIVSFIGGIDLCDGRYDTQYHSLFRTLDTVHHDDFHQPNFEGGSIKKGGPREPWHDIHSRLEGPIAWDVLYNFEQRWRKQGGKDLLVRLRDLPDIIIPPSPVMFPEDRETWNVQLFRSIDGGAAFGFPETPEEAARAGLVSGKDQIIDRSIQDAYVNAIRRAKNFIYIENQYFLGSSYGWKPEGIKPEEIGALHLIPKELSLKIVSKIEAGERFTVYVVVPMWPEGVPESASVQAILDWQRRTMEMMYTDIAQALEANGIEANPKDYLTFFCLGNREVKQEGEYEPEEHPEPDTDYIRAQEARRFMIYVHTKMMIVDDEYIIIGSANINQRSMDGARDSEIAMGAYQXPYHLATRQPARGQIHGFRMSLWYEHLGMLEDVFQRPESVECVQKVNEVAEKYWDLYSSDDLEQDLPGXHSLSYPIGVTADGSVTELPGMENFPDTRARVLGNKSDYLPPILTT

SEQ ID NO: 3243 - protein, 106 aa, uncultured Rickettsia sp.
MLKEIGSSEYIPRYIAKAKDKNDPFRLMGFGHRVYKNYDPRAAVLKETCKEVLKELGQLDNNPLLQIAIELEAIALKDEYFIERKLYPNVDFYSGIIYKAMGIPSQ

SEQ ID NO: 3244 - protein, 425 aa, Bacillus anthracis str. Ames 0581
MKNERIEKLQESWELDTRWKGITRPYSAEDVIRLRGSIDIEHTLARRGAEKLWASLHTEDYINALGALTGNQAMQQVKAGLKAIYLSGWQVAADANLSGHMYPDQSLYPANSVPAVVKRINQTLQRADQIQHMEGSGDTDYFVPIVADAEAGFGGQLNVFELMKGMIEAGASGVHFEDQLSSEKKCGHLGGKVLLPTQTAVRNLISARLAADVMGVPTIIVARTDADAADLITSDIDPVDKAFITGERTPEGFYRTKAGLDQAIARGLAYAPYADLVWCETSEPNLEDAKRFADAIHKEHPGKLLAYNCSPSFNWKQKLDEKTIASFQKEIASYGYKFQFVTLAGFHSLNYGMFELARGYKERGMAAYSELQQAEFAAEKHGYSATRHQREVGTGYFDEVAQVITGGTSSTTALKGSTEEAQFTK

SEQ ID NO: 3245 - protein, 428 aa, Pichia anomala
PGDFNLSLLDKIYEVEGLRWAGNANELNAAYAADGYSRVKGLSAIITTFGVGELSALNGIAGSYAEHVGVLHIVGVPSISSQAKQLLLHHTLGNGDFTVFHRMSSNISQTTAFIKDINSAPAEIDRCIREAYVFQRPVYLALPANLVDDLVSSDLLSTPIDLSLKPNDPESENEVVSTVLELIKKADNPVILVDACASRHSALAETKDLMDLTQFPTFVTPMGKGAVDEQHPRFGGVYVGTLSKPDVKAQVENADLILSVGALLSDFNTGSFSYSYKTKNIVEFHSDHIKIRNATFPGVQFQSVLQNLNSKIAPVVKGYKPYPVPSLKLTTSPASPETPLTQEWLWTKLSSWLREGDVVITETGTSAFGIVQTRFPSNTTGISQVLWGSIGYSVGAALGAVAGAEEVDKEKRVILFVGDGSLQLTVQE

SEQ ID NO: 3246 - protein, 237 aa, Prochlorococcus marinus subsp. marinus str. CCMP1375
MTDLQTQMKIAVAQEAIGEIKDGMILGLGSGSTAALMIKSLGEKLKEGSLKEIIGVPTSFQGEVLASQLGIPLRAFSAVSKIDLAIDGADEVDPNFQLIKGGGACHVQEKLVASIADRFVVVVDSTKIVEKLNLEFKLPVEVLPAAWKLVQKELNDLGAKSDLRMAEKKAGPIVTDQGNLVLDVQFADGISDPQNLEKQINNFPGVLENGLFVNLTDEVLVGEIKNGVSSVNRLKKA

SEQ ID NO: 3247 - protein, 364 aa, Picea abies
MGSASENSEMNTKIVNEDEWLLGMELGNFSCLPMGMKAAIELDVLQIIANAGNGVQLSPRQIVAHIPTTNPDAAITLDRILRVLASHSVLSCSVTTDENGKAERLYGLTPLCKYLVKNQDGVSLAPLVLMNQDKVLMDSWYYLKDAVLEGSQPFTKAHGMNAFEYPAKDQRFNRVFNRGMSEHSTMLMNKILDTYQGFKEVQELVDVGGGVGSTLNLIVSRYPHISGINFDMPHVVTDAPHYPAVKHVGGDMFDSVPTGQAIFMKWILHDWSDDHCRKLLKNCHKALPEKGKVIVVDTILPVAAETSPYARQGFHIDLLMLAYNPGGKERTEQEFQDLAKEAGFAGGVKPVCCANGMWVMEFHK

SEQ ID NO: 3248 - protein, 139 aa, Brassica napus
  misc_feature (43)..(43): Xaa can be any naturally occurring amino acid
  misc_feature (135)..(135): Xaa can be any naturally occurring amino acid
  misc_feature (137)..(137): Xaa can be any naturally occurring amino acid
MEISERVKARLAVLTAHIAVSDPVGSSQVLPAGEIERWWGSSXVEAHGSLKGSLTIVDERTGKKYQVPVSEDGTVKSVDLKKITTGKDDKGLKLYEPGYLNTAPVRSSISYIDGDEGILRYRGYPIEELAESSTXIXVS

SEQ ID NO: 3249 - protein, 332 aa, Triticum aestivum
  misc_feature (208)..(208): Xaa can be any naturally occurring amino acid
AYLGDIIEQVCTKKQAGTGPEFPGYLLDADLESDALGWQYISGSLPDSRELDHIDNPQLEGYKFDPHGEYVRRWLPELARLPTEWIHHPWDAPASVLQAAGVELGSNYPLPIVELDTAQVRLQEALSEMWQLEAASRAAMDTGMEEGLGDSSEVPPIEFPQDLQMEVHWEPARVAPNVLTTAQRRQDQMVPTVTMTTSLNRVETEISXADLGNSVDSRAEVPFRMHFEPRTEREEMIRSTGNAAGTNGIHHHNNFQQPQRRMRNIFAPSVSEASSSWTGRDGGVVPVWSPPAASGHSETYGADEADVSSRSYLDRHPQSHRIMNWHQLSQSL

SEQ ID NO: 3250 - protein, 100 aa, Triticum aestivum
MDPSKQQQQHKPHAPAGGQQGDDVHKTTTAHGDVMTHSFGEGYSTRSDEEGFGGVYGQNDPVLNPGTEVHPNHPEYDKSQGSEVKEKEKARHLKDDKHAT

SEQ ID NO: 3251 - protein, 358 aa, Zea mays
MGSTAGDVAAVVDEEACMYAMQLASSSILPMTLKNAIELGLLEVLQKEAGGGKAALAPEEVVARMPAAPSDPAAAAAMVDRMLRLLASYDVVRCQMEDRDGRYERRYSAAPVCKWLTPNEDGVSMAALALMNQDKVLMESWYYLKDAVLDGGIPFNKAYGMTAFEYHGTDPRFNRVFNEGMKNHSVIITKKLLDFYTGFEGVSTLVDVGGGVGATLHAITSRHPHISGVNFDLPHVISEAPPFPGVRHVGGDMFASVPAGDAILMKWILHDWSDAHCATLLKNCYDALPENGKVIVVECVLPVNTEATPKAQGVFHVDMIMLAHNPGGKERYEREFRELAKGAGFSGFKATYIYANAW

SEQ ID NO: 3252 - protein, 357 aa, Tropheryma whipplei str. Twist
MVRMKALVYHGPGKRSLDTVDDPTIKLGTDVILEMETTTICGSDLHILKGDVAAVKPGTVLGHEGIGKIVEVGKDVKSHSVGDRVIVSPMSSCGVCRFCRANNNGHCLGDSEGPGGWRLGGLINGVQAQFARIPLADNSLHKLPSGLDPKVGILVSDVLPTGHEVGAQAGQVTLGSVVAVIGCGPVGLGAIVTSLLYSPSKVIAVDADSNRLELARKLGATDTVRVNRERPLDAIEDVKKLTEGGFGVDVAIEAVGVPVTFSMALGIAAPGGRVANIGVHGAPVDFPLQDLWDKNIAVTLGIVSTHTIPLLLAALSEGKIDASQFVTHEFDLSDLERAYDVFSAAAQHNVVKVAIRA

SEQ ID NO: 3253 - protein, 102 aa, Glycine max
  misc_feature (80)..(80): Xaa can be any naturally occurring amino acid
SNISSTVHLQPAVLYDAGCTNLKSMAVFPTRKTNNYITSIASNCGRVQCMQVWPPIVKKNFETLSYLPDLYDAQFAYEVXYLLMKVCIPFLEFVLEHIFLFP

SEQ ID NO: 3254 - protein, 337 aa, Neurospora crassa
MSSSSKFRSSHHYHSQSVSSILGRHDSTSPGAELQRRPTTTSSYTSSGSASRRVPRDNGTRSSDGTVSTMMSTTSSTGRESAATTAMTEGPAYSKKVVVVGDGGCGKTCLLISYSQGYFPEKYVPTVFENYITYPTHPPTGKTVELALWDTAGQEEYDRLRPLSYPETDLIFVCFAIDCPNSLENVMDKWYPEVLHFCPYTPLILVGLKSDLRNKKTCIDMLKTQGLTPVTTEQGLAVAKKMGAQYMECSSKEMKGVEEIFEQAILTVVANDRKTLEQEAANGMLGVGAGSGSGKGSGISFSSGDKAGSGIGPVKAAGVGGTIVPKTRKKKRKCGMM

SEQ ID NO: 3255 - protein, 495 aa, Staphylococcus aureus subsp. aureus MRSA252
MAVNVRDYIAENYGLFINGEFVKGSSDETIEVTNPATGETLSHITRAKDKDVDHAVKVAQEAFESWSLTSKSERAQMLRDIGDKLMAQKDKIAMIETLNNGKPIRETTAIDIPFAARHFHYFASVIETEEGTVNDIDKDTMSIVRHEPIGVVGAVVAWNFPMLLAAWKIAPAIAAGNTIVIQPSSSTPLSLLEVAKIFQEVLPNGVVNILTGKGSESGNAIFNHDGVDKLSFTGSTDVGYQVAEAAAKHLVPATLELGGKSANIILDDANLDLAVEGIQLGILFNQGEVCSAGSRLLVHEKIYDQLVPRLQEAFSNIKVGDPQDEATQMGSQTGKDQLDKIQSYIDAAKESDAQILAGGHRLTENGLDKGFFFEPTLIAVPDNHHKLAQEEIFGPVLTVIKVKDDQEAIDIANDSEYGLAGGVFSQNITRALNIAKAVRTGRIWINTYNQVPEGAPFGGYKKSGIGRETYKGALSNYQQVKNIYIDTSNALKGLY

SEQ ID NO: 3256 - protein, 264 aa, Candida albicans SC5314
MPASREDSVYLAKLAEQAERYEEMVENMKAVASSGQELSVEERNLLSVAYKNVIGARRASWRIVSSIEQKEEAKGNESQVALIRDYRAKIEAELSKICEDILSVLSDHLITSAQTGESKVFYYKMKGDYHRYLAEFAIAEKRKEAADLSLEAYKAASDVAVTELPPTHPIRLGLALNFSVFYYEILNSPDRACHLAKQAFDDAVADLETLSEDSYKDSTLIMQLLRDNLTLWTDLSEAPAATEEQQQSSQAPAAQPTEGKADQE

SEQ ID NO: 3257 - protein, 181 aa, Brassica napus
MAYSMLSSAAVVTSPAQATMVAPFTGLKSSSAFPVTRKANNDITSIVSNGGRVSCMQVWPPVGKKKFETLSYLPDLTEVELGKEVDYLLRNKWIPCVEFELEHGFVYREHGSTPGYYDGRYWTMWKLPLFGCTDSAQVLKEVQECKTEYPNAFIRIIGFDNNRQVQCISFIAYKPPSFTGA

SEQ ID NO: 3258 - protein, 447 aa, Leptospira interrogans serovar Lai str. 56601
MKLSRSEFIKLGILTAAGISGLPGIKLSAQGTSSRKTVIVMGGGISGLYASYLLSKTGIKVQLIEATDRLGGRIRTVTDVSGNFLDLGAEWIQAEHRTAKSLIRELGLKTTDFEVQSDLFFGSYRKFGTWDISPKSQEILNKLVQMNSKINSTQQQELDRISFYNFLNYQGMSLEDLNILNFKYSLYYGDSLRSLSAQKVLSDLVNFPKYNTRVEGGMETLTRALVSSLENTEIIFSDPVVSVSQVEGKVIVTTVSGKKIEGNACISTLPANQLTTIQWDPELDKEKKLSALRIRYSRIYKTFLMLREAPWTRGSFSAYSDSVAGFIYDAGTKINSEDKILGMISTGDRYDVLASSTDAMKVEYIRLALESLGQGRELQVLRIQSSETSQSKFIPTGIATFPPGSYGSIISLLKPMDRIFFAGEHTAELNGTVEGALASAIRAVNQV

SEQ ID NO: 3259 - protein, 357 aa, Magnaporthe grisea
MAEFVRAQIFGTTFEITSRYSDLQPVGMGAFGLVCSARDQLTNQNVAIKKIMKPFSTPVLAKRTYRELKLLKHLKHENVISLSDIFISPLEDIYFVTELLGTDLHRLLTSRPLEKQFIQYFLYQIMRGLKYVHSAGVVHRDLKPSNILVNENCDLKICDFGLARIQDPQMTGYVSTRYYRAPEIMLTWQKYDVEVDIWSAGCIFAEMLEGKPLFPGKDHVNQFSIITELLGTPPDDVINTIASENTLRFVKSLPKRERQPLKNKFKNADPSAIDLLERMLVFDPKKRITATEALAHEYLTPYHDPTDEPIAEEKFDWSFNDADLPVDTWKIMMYSEILDYHNAEAGMQQMDDQFTGQ

SEQ ID NO: 3260 - protein, 502 aa, Pseudomonas sp. Y2
MTRSLTMNSSLSAIDGLRLPHQMLIGGQWVSAQSGKTLNVYNPATGDILTEVPDGDVEDVNAAVESAAGTLRSDTWRRMPPSARERILLRLADLLEVHGDELARLETLNNGKLLIYSKLMEVGASAQWLRYMAGWATKLTGSTLDLSLPLPPEVRSRASTQRVPVGVVAAIIPWNFPLLMAVWKIAPALACGNTVVLKPAEETPLTALRLAELAMEAGLPAGALNVVTGRGETAGDALVRHPKVAKVAFTGSTEVGRIIGSACGRSLKAVSLELGGKSPVIVLADCDPQEAAEGAAAAIFFNHGQVCTAGSRLYVHESIYEDVIQRLAVIGESIVVGSGLEQGVHMGPMVSKKHHENVLRHIRNGIEDGADLICGGTEAPCAQGFFVKPTIFANREKKDIRLLSQEVFGPVLVATPFSDIAEVVNEANRSVYGLGASIWTNDLSAALRINDELEAGTVWVNTHNMVDPNLPFGGFKDSGVGREHGAAAIEHYTTTRSLVIAY

SEQ ID NO: 3261 - protein, 121 aa, Bacillus halodurans C-125
MSKDQIIEAIKEMTVLELNDLVKAIEEEFGVTAAAPVAVAGGAAAEGGAAEKTEFDVVLESAGGSKINVIKVVREITGLGLKEAKALVDGAPAPIKEGVAKEEAEEMKAKLEEAGASVELK

SEQ ID NO: 3262 - protein, 102 aa, uncultured Rickettsia sp.
MLKEIGSSENIPKYIAKAKDKNDPFRLIGFGHRVYKNYDPRAAVLKETCKEVLKELGQLENNPLLQIAIELEAIALKDEYFIERKLYPNVDFYSGIIYKAMG

SEQ ID NO: 3263 - protein, 286 aa, Mycobacterium avium subsp. paratuberculosis str. k10
MTVIDEIYSSSSAIPTVALNDEAKKPVLGLGVAKLSDEETESSVLAALEAGCRLIDTAASYGNEAAVGRAIAASGIPREELFVTTKLGTSRQGFHSAQESCKESLDRLGLDYLDLYLIHWPAPTLGKYVESFEGMIEARERGHVRSIGVSNFTEDLLATVIEETNEVPAVNQVELHPRLNQAELRQVHAQHDVTTQSYSPLGVGRLIEEPTVTTIAAEYGRTPAQVLVRWNLQLDNVVVSRSSKPERVAENLDVFDFTLEPEHMEAIEGLHDGTRVLHDPMTFMGT

SEQ ID NO: 3264 - protein, 456 aa, Leuconostoc mesenteroides subsp. mesenteroides ATCC 8293
MTDSDNQQKWPALPATLSNIAVTKNSGKYESVSSNYFKVGHPRLVFMAENDEQVSHVVEYAGNVQRFVGHQIPFSVRSGGHGITNYSVNDGGIIIDLSQMNQVNILDEAKGLVKVQAGAVWGDVADKISKADLVLSSGDFGDTGVGGLATSGGLGLLVRKQGLTTDQILGATIITADGKKRNVNKEENSDLFWAIRGGGSQVGIVTEFIFQADKVEPAKSGQRVPIGLQKLSYNVFDLSHFLFAWHSWITTATEDMSSLLMLTKNDSNSSIISVQATNIWCGEKTDLCEKYFTDALNIAKVEKQDESNLSYHTLVQAPHLPHEGANNVYVKNVLLTKIDDHLLNALHTMLKSSAVMGIEVRAIDGPINQLSPDFDAWSFREATLFVAMWGDITQSGLLNQLFKPLQEHGCGVYGAYSSDTSKSETTKAWSRDTRERLQKVVKKYDSKHIINQSRYA

SEQ ID NO: 3265 - protein, 421 aa, Streptomyces coelicolor A3(2)
MRDHEPDHPADSERRLTTREAAELLGVKPETVYAYVSRGQLGSRRAPGSRGSTFDADEVRALARRNRRDGGINPAPAAGQELTVRTRLTLIENDRFSYRGVDAVELAARHTYEEVAEWLWTGELRPGAAFSAPESSVAVARRAVDALPEHAGPADRLRVAAIAAAVTDPLRFDLSEEAVLGTARVLIPTLVAALPPVLRDGHDRDPIARRLWTRLSGQEPDEPTLQALDTALGLLVDHDLAASTLAVRVAASARAHAYAAVSAGLGVIEGPLHGAAGGLAHRMLLEVLELGSAAPVVAEELRAGRRIPGLGHRLYPGEDPRARALFALLEDVPRAAPAIAAARDVQATAARHTPLHANVDLALAVLTVSSGMASTAAETIFAVARTAGWIAHALEEYGERPLRMRPSGLYSGPRPPRPLPE

SEQ ID NO: 3266 - protein, 451 aa, Bacillus halodurans C-125
MTSNDLLAKSKKHLWLPFTQMSDYEKDPLIIESGNGVYLKDIEGNTYLDGYSSLWLNVHGHRKKEIDEAIEKQLQLIAHSTLLGAANIPSIQLAEKLVELAPEAITRVFYSDSGAEAVEIAVKMAYQYWQNRGYENKKSFVTLSNGYHGDTVGTMSVGSIELYHKVYTSLLFDAIVIPFPASKEEQTESDLCRESLKQLRELFEAKHEEIAGITVEALIQGAGGMNLMPKGYLKGVEQLCKEFHILLIVDEVATGFGRTGKMFAVEHENVQPDIMTVAKGITGGYLPIAATLTQEHIYEAFYGEYTDLKTFFHGHSYTGNQLGCAAALANLEIFEKENIIQQVEEKALFLEEQLKHVAELEFVGAVRQLGLMCGIQLVQHKRTSEPFPWEQRVAYRSTLKMRALGMLTRPLGDVIVLMPPLAATNDQLKQMVDIMKEGIMEAATECLEQQV

SEQ ID NO: 3267 - protein, 423 aa, Brucella melitensis 16M
MRKEMLLPNLSISYSDPIKFVRGDGVWLIDNRGRAYLDCFNNVCHLGHAHPEVVEAIARQAAILNTNTRYLHDTIVSYAERLTATLPEGLTVASFACSGSEANSLALRMARTHSGQRDALVLDWAYHGTTQELIDLSPYKYKRKGGKGRPDHVFEATIPDSYRAPESWPLAEHGRRFAESIAEQIEKMKAQGRAPAFFIAESIPSVAGQVFLPEGYLREVYAMVRAAGGVCIADEVQVGFGRVGSHWWAFEMQGVVPDIVTMGKPIGNGHPMSAVVTTREVADSFNNGMEYFNTFGGNPVSCAAGLAVLDVIEHNDLRRNALEIGNYLIAGFRSMQDRFDIIGDVRGQGLFLGIELVMDRKTKEPATAIARKINDGARERGILMGTEGPFDNVLKMRPPMIFTRANADHLLSVLEDSFAAALK

SEQ ID NO: 3268 - protein, 520 aa, Glycine max
MPSFMAFLSHPYFFAALSASLTLLVVQLLFRKLNKRHSRKKYHPVAGTIFNQMLNFNRLHHYMTDLAAKHRTYRLLNPFRYEVYTTEPTNVEYILKTNFENYGKGLYNYHNLKDLLGDGIFTVDGEKWREQRKISSHEFSTKMLRDFSISIFRKNVVKLVNIVSEAATSNSTLEIQDLLMKSTLDSIFQVAFGTELDSMCGSSQEGKIFADAFDTSSALTLYRYVDVFWKIKKFLNIGSEAKLRKTTEILNEFVFKLINTRILQMQISKGDSGSKRGDILSRFLQVKEYDPTYLRDIILNFVIAGKDTTAATLSWFMYMLCKYPEVQEKAAEEVKEATNTKRISSYNEFVYSVTDEALERMNYLHAAITETLRLYPAVPVDAKICFSDDTLPDGYSVNKGDMVSYQPYAMGRMKFIWGDDAEDFRPERWLDENGIFKPESPFKFTAFQVNNNMKCTTCTGPRVCLRVRFAYRQMKIFAAVLLGCFRFKLKDEKKNVTYKTMINLHIDEGLEIKAFNRYRD

SEQ ID NO: 3269 - protein, 441 aa, Arabidopsis thaliana
MNRRQQVKRRVGKYEVGRTIGEGTFAKVKFARNSETGEPVALKILDKEKVLKHKMAEQIRREIATMKLIKHPNVVQLYEVMASKTKIFIILEYVTGGELFDKIVNDGRMKEDEARRYFQQLIHAVDYCHSRGVYHRDLKPENLLLDSYGNLKISDFGLSALSQQVRDDGLLHTSCGTPNYVAPEVLNDRGYDGATADMWSCGVVLYVLLAGYLPFDDSNLMNLYKKISSGEFNCPPWLSLGAMKLITRILDPNPMTRVTPQEVFEDEWFKKDYKPPVFEERDDSNMDDIDAVFKDSEEHLVTEKREEQPAAINAFEIISMSRGLNLENLFDPEQEFKRETRITLRGGANEIIEKIEEAAKPLGFDVQKKNYKMRLENVKAGRKGNLNVATEIFQVAPSLHMVQVSKSKGDTLEFHKFYKKLSNSLEQVVWTNNEVKKETAK

SEQ ID NO: 3270 - protein, 390 aa, Streptomyces coelicolor A3(2)
MSVNRTAAAATPVEVPRGLAGVVVADTEVGDVRGLEGFYHYRQYSAVELARSRGFEDVWHLLVHGELPDARTGAAFAAETAALRRLPDAVRAALPAIAEAGAGSGPLAGMRTGLSLLGAALGFRPVYDLSVDQRRQDTLVAAAAVPTLLTALHRLGRGLEPVEPREDLSYAANYLYMLTGQEPDEACTRAIEQYLISTIDHGFNASTFTARVIASTGADVAACLAGAVSALSGPLHGGAPSRALDTLDAIGTPDRIDAWIRERVLAGDRIMGFGHAVYRTEDPRSRMLREVAQSFGGPRVEFAVEVERQVEAILAELKPGRELHTNVEFYAGVVMELCGLPREMFTPTFAAARVVGWSANILEQASDSKIIRPAARYVGPGAPVGVPAVA

SEQ ID NO: 3271 - protein, 320 aa, Zea mays
  misc_feature (49)..(49): Xaa can be any naturally occurring amino acid
MVLKFSGSSKQCKGTAGTQSSRLHRRHRLHAREQGSRRGLLPKDRIGGXAGAAGGARTASSDTLDMGRSNRKSPGSSGWIPGTDEAAAGGDDVLALEDAAAPREWTAQVEPGVQITFGTIPTGGNDLKRIRFSREMFNKWEAQRWWGENYDRIVELYNVVMFSGRQQGCSTPVSSVDAGSSSAPYAAAHSTRAAAAYFPSAAVPDPSDHVWAHHFNMLNSAAAAAGTSAAMGGGAPSSYDPSRATTSSRDEASVSLSNVSDLEATEWIEEDEPGVCLTIRELGDGTRELRRIRFSREIFGEDRAKVWWEQNRERIQAEYL

SEQ ID NO: 3272 - protein, 485 aa, Burkholderia fungorum LB400
MSESATVFKNLIAGEWTESVSGKTFANINPADTRDVVGQFQASVVADAQAAIQAASSAFAQWRRTPVTARARIVNKAADWLESHADTFAQELTREEGKPLAQSRDEILRSAQVLRFYAVEAQSFTGETFPSDDPEQHVYTQREPLGVVTVITPWNFPISIPARKIAPALMAGNTVIFKPSSDAPLIGYRLAEAFAQAGIPAGVLNFITGRASDIGAAITESPVVRAISFTGSTAAGEHIHRSVPITTRTQMELGGKNPLIVMDDADLDRAVDLAVKGGLSLSGQACTGTSRILVMESVRETFTAKLVERVKSLKIGSGVTPGMDLGPLANRKQLESVLGYVASGKEQSTHLIGGEQLTGEGFEHGYYVTPAVFSDVPESARIYREEIFGPVLAITSVTGYDDAIAKANDTEYGLSAAIATSNPRYMHRFADEIEAGTVKINRTTTGNVINAPFGGLKRSSTSTFRESGRAGLEFYTQIKTVYRGL

SEQ ID NO: 3273 - protein, 123 aa, Bacillus subtilis subsp. subtilis str. 168
MALNIEEIIASVKEATVLELNDLVKAIEEEFGVTAAAPVAVAGGAAAGGAAEEQSEFDLILAGAGSQKIKVIKVVREITGLGLKEAKELVDNTPKPLKEGIAKEEAEELKAKLEEVGASVEVK

SEQ ID NO: 3274 - protein, 225 aa, Listeria monocytogenes EGD-e
MNEINHTSERVNTEKRTEKQIIMQKILNWFVFSLLLASIGAAIGSKLSPELYLPLVVLEVALLITAMVVRRSKTINKVVGYPVVLAFAFVTGLTLGPTLTYYFGAGQGAAVLMAFVTATVTFTTLAFIGAKMKKDLSFLSSALFAAIIILVIFSFVGVFLPLGSMLSTIISAGGTIIFSLYILYDFNQIMKRDVELADVPMLALNLYLDFLNLFMFLLRLFTGRD

SEQ ID NO: 3275 - protein, 433 aa, Triticum aestivum
MDHGSSPTKICKSVVDEDIISNLPEALRDKILCCLPIKEAVGTCLLSRTWRYTWASMTELMFRTADFASGNDSADDDRRFLKFTDMFLFLHNGPILKFCLNTIANEMVSTGGHLYRWMLMLSRNKIKEIQLQTSIRDSYKVPSSFFSCDELEYVYLRACVFTSLHLPPPSKGFKQLHTLRLEYVTVEGNSLGDLVASCPNLEKLNIRGLYSKSNINIRSTKLKVLKIEGWFTHLNLHAPYLTSVWIGLELNSDTDGASTTRCNFNLSPFIASLSDVETIRFHGHILECVEREFLILKQPKLFNRLTEISLEINLGDLKEANFALCLFQHAPNLRFFKLKLISRNSMVPRVHFWESIDRDVCLFQNVELVGLFDFTGSFAELGFLKFLLEGAPVLRKLGIIDKGLDRNVLKNLLKLRRASKDAEILILEACFPH

SEQ ID NO: 3276 - protein, 326 aa, Glycine max
MDQALVDDIINRLLEVRGRPGKQVQLSESEIRQLCAASREIFLQQPNLLELEAPIKICGDVHGQYSDLLRLFEYGGLPPEANYLFLGDYVDRGKQSLETICLLLAYKIKYPENFFLLRGNHECASINRIYGFYDECKRRFNVRLWKTFTECFNCLPVAALIDEKILCMHGGLSPDLLNLDQIRNLQRPTDVPDTGLLCDLLWSDPSKEVQGWGMNDRGVSYTFGADKVSEFLQKHDLDLICRAHQVVEDGYEFFANRQLVTIFSAPNYCGEFDNAGAMMSVDETLMCSFQILKPADKKVKLNFGSTTTTKPGNSPAGVKSFLGTKV

SEQ ID NO: 3277 - protein, 358 aa, Zea mays
MGSTAGDVAAVVDEEACMYAMQLASSSILPMTLKNAIELGLLEVLQKEAGGGKAALAPEEVVARMPAAPGDPAAAAAMVDRMLRLLASYDVVRCQMEDRDGRYERRYSAAPVCKWLTPNEDGVSMAALALMNQDKVLMESWYYLKDAVLDGGIPFNKAYGMTAFEYHGTDPRFNRVFNEGMKDHSVIITKKLLDFYTGFEGVSTLVDVGGGVGATLHAITSRHPHISGVNFDLPHVISEAPPFPGVRHVGGDMFASVPAGDAILMKWILHDWSDAHCATLLKNCYDALPENGKAIVVECVLPVNTEATPKAQGVFHVDMIMLAHNPGGKERYEREFRELAKGAGFSGFKATYIYANAW

SEQ ID NO: 3278 - protein, 501 aa, Glycine max
  misc_feature (192)..(192): Xaa can be any naturally occurring amino acid
MDQFLWRVLPLLTILVSFGVFFYLQDSYTAQLFPLIKLPRDKCSLLPHRHFWISSKRIVTPQGIISGSVEINDGKIISVVEGHAIQGKPKQEEVIDYGDAVIMPGLIDVHVHLNEPGRTEWEGFDTGTRAAAAGGVTTVVDMPLNCYPTTVSKEKLKLKLDAAEDKIYVDVGMTNNLCLSIQLTELLRYFLXSYTGFWGGLIPENALNTSILDGLLSAGVLGVKSFMCPSGIDDFPMATIDHIKAGLSVLAKYRRPIVVHAEIQQDFENHLELNEDNLDPRAYLTYLNTRPPSWEEAAIKQLVSVTKDTRKGGPLEGAHVHIVHLSDSSASLDLIKEAKSHGDSISVETCPHYLAFTSEEIPNGDTRFKCSPPIRDAYNKDKLWEAVLEGHIDLLSTDHSPTVPELKLMEEGDFLKAWGGISSLQFNLPVTWSYGKKYGLTLEQLSLLWSKKPATLAGLESKGTIAVGNHADIVVWQPELEFDLDDDYPVFIKHSVCLPCY

SEQ ID NO: 3279 - protein, 1023 aa, Neurospora crassa
MTRRDAEVKDRCDTGRESPSTDGTGKSIFHVKPPALAALRFLHLLHLALTCFASAATVTTPSLYRPIRGYRFQHLLSISHVPVQHFPEGIQSRIFVAATSGHTEQTQPGVFGCLQRLDHACLQGHAQPTRPDPTRTHHPDPPPTVHGSVKAPAVCNGIHSRRQNSEKTPLARGKDTDTHSDTLLHHGQAALETAIPRLPKPARQALPVSPWTVLMSGATAPRLQNVLSRPVLSSKRDAGRTSSHHLLKSLLLASRFAASTLVATTSSAGASRSTGTSSPDPGPTINKSQTNRNPSTYTSPPNSLSRTFSASNLLAWYRTLPSPYFNLSGHLDDLSSLIRPFLAFLDPSSLSSPYSMASTSYAFSTSSGSDFSTPRSSSPHSSASVASARSSHSSTFSAGKRLSMSSVRRTSASNPMSSVDLSTIEEALKMANLDTLKGYCQKTYGEVHQETTTEYISQEEARGYQVLNQPHWNKVADFRISPKGTSFTPEERVAKNLTGLIPHVMEDSEKQVERALKMIRTRQTDIDRYLYLSTIKSQNVDLFYRLLMDHAKEMMPLVYTPTIGDVCLQYSTLYTRPEALYISIKQRKSIRTILRNWPYPQPEICVVTDGSRILGLGDLGVNGVGIPIGKLALYTAAAGIHPDKTLPIVLDCGTANETNLKDPLYLGLRQKRIPVAEQQEFMDEFMEAAAEVFPDMVVQFEDFESEKAFNYLDRYRDQYKCFNDDIQGTGAVVLAGYIGAVNLSNVPIEEQRLVFMGAGSAGVGVAKQLVEYYTKRGLSEQQAKDKFWLVDTKGLVTKDRGDKLAEHKKYFARTDNNGHQFRTLEEVIEYVKPSALVGLTATHGVFTESVVRALKASVDAGGLGRRPILFPLSNPLTKAECTFKEAIDWTDGTVLFASGSPFSSYTTNGVTYHPNQGNNVYVFPGIGLGAILAKATRVTDDMIYTSAAALANSLNADEVKQGLIYPRIDRVREASVIVAREVMKSARREGVSTLPEEQWLEWEEWGDVDLERYIKQHIYDPKF

SEQ ID NO: 3280 - protein, 90 aa, Glycine max
MASFARRAMSLAQIPSARAPASVCQRRGLAGAADHHGSTKVDFWKQPTNPGNWKEEHFVLISLSGWGMLFYGGYKLFTGGKGEKPVEAAQ

SEQ ID NO: 3281 - protein, 617 aa, Triticum aestivum
  misc_feature (175)..(175): Xaa can be any naturally occurring amino acid
  misc_feature (198)..(198): Xaa can be any naturally occurring amino acid
MWRHAAARRSAQIRRLLSTSAPSAGAGSVLRGPSIVHKRGTDILHAPWYNKDTAFPLTERDRLSLRGFPPTQRVRLGLQGVLLMRFNKSEEHYQRLVTGSPLLVPKPQSPPLLVVSIATWEAPTWMHDSKEAWHSRIRSTTCLGCGGTMFTANSSTANNVRRSTPGTDVSVTYNXSDQWNTWLFRFSCSTWEYFSRLXLPGILALLLTHFVYVAAAGINPQIVVPIMLDVGTNHEELLEDKLYLGLRQPRLEGEEYLAVVDEFMEAVHARWPKAIVQFEDFQMKWAFETLQRYRSRFCMFNDDVQGTAGVALAGLLGAVRAQGRPLADFTKQKIVVVGAGSAGIGVLNMAKHAMLRMPGTHKIGELGEGHNQFWVLDKDGLITKSRKDLDPAVARFARGYGPEEVEDLHEGASLVEVVKKVKPHVLLGLSGVGGIFNEEVLKAMKESDSPCPAIFAMSNPTTKAECTPEDVFKHVGENAVFASGSPFSNVTLSNGRKGYANQANNMYLFPGIGLGALLSGARHISDGMLHAAAECLASYITDDAIRKGILFPSISSIRHITARVGAAVARAAVDEDLAEGCSDLDPRDLRSMSESDTVDYVARKMWYPVYSPLVNDK

SEQ ID NO: 3282 - protein, 315 aa, Zea mays
  misc_feature (219)..(219): Xaa can be any naturally occurring amino acid
APRGVEPRLFVARAAGPAQQAADAKACSALCSPAARAVPAMESFGVPPAPVAAPEKRKKPLDLKDPVPAAAAAAANGGGATKASPAAKWAEKKKLVGGDAGYVLEDVPHLTDYLPQLPTYPNPLQDNPAYSVVKQYFVNPDDTVTQKIVVHKTSARGTHFRRAGPRQRVYFQPDEVNAAIVTCGGLCPGLNTVIRELVCGLYDMYGVTSVVGIEGGYKXGFYFKNTVALTPRSVNGIHKRGGTVLGTSRGGHDTAKIVDCLQDRGINQVYIIGGDGTQKGASVIYEEVRRRGLKCAVVGVPKTIDNDIAVSSAPP

SEQ ID NO: 3283 - protein, 358 aa, Zea mays
MGSTAGDVAAVVDEEACMYAMQLASSSILPMTLKNAIELGLLEVLQKEAGGGKAALAPEEVVARMPAAPGDPAAAAAMVDRMLRLLASYDVVRCQMEDRDGRYERRYSAAPVCKWLTPNEDGVSMAALALMNQDKVLMESWYYLKDAVLDGGIPFNKAYGMTAFEYHGTDSRFNRVFNEGMKNHSVIITKKLLDFYTGFEGVSTLVDVGGGVGATLHAITSRHPHISGVNFDLPHVISEAPPFPGVRHVGGDMFASVPAGDAILMKWILHDWSDAHCATLLKNCYDALPENGKVIVVECVLPVNTEATPKAQGVFHVDMIMLAHNPGGKERYEREFRELAKGAGFSGFKATYIYANAW

SEQ ID NO: 3284 - protein, 353 aa, Zea mays
MGDAAAAAASTSAPTTPTSILICLEDGSDLLADADDGAGTDLVVAHDERLLVVDQDEEYVALLLSKESASGGCGPVEEMEDWMKAARSGCVRWIIKTTAMFRFGGKTAYVAVNYLDRFLAQRRVNREHAWGLQLLMVACMSLATKLEEHHAPRLSELPLDACEFAFDRASVLRMELLVLGTLEWRMVAVTPFPYISCFAARFRQDERRAVLVRAVECVFAAIRAMSSVEYQPSTIAVASILVARGRETPAGNLDALKAILGSSFPQLDTGHVYSCYSAMIREDDKSPTQSTSTSTSTGVASSGVSVAAHAGGSGSPSPGASVSVGANNAAGTAPPATTDKRNKRRRLRSPQRQ

SEQ ID NO: 3285 - protein, 154 aa, Castanea sativa
MALSLFGGRRSNVFDPFSLDIWDPFEGFSAVANVPPSARETTAFATARIDWKETPEAHIFKADLPGLKKEEVKVEVEDGNVLQISGERSKEHEEKNDKWHRVERSCGKFLRRFRLPENAKVEQVKANMENGVLTVIVPKEEQKKTEVKSIEISG

SEQ ID NO: 3286 - protein, 154 aa, Glycine max
KDAREGDDNLSTVHHELHFTVQECIDALGEVIYHIETYDVTTIRASTPMFLMSRKIKSLGVKMVISGEGSDEIFGGYLYFHKAPNKKEFHEETCRKIKALHLYDCLRANKATSAWGVEARVPFLDKSFISVAMDIDPQWKMIKRDSVQIEKWVT

SEQ ID NO: 3287 - protein, 493 aa, Mentha x piperita
MAALLVFFSVSLILLAVLFHKRKSSLSSRKRPPPSPLRLPVIGHFHLIGALSHRSFTSLSKRYGEVMLLHFGSAPVLVASSAAAAREIMKNQDVIFASRPRLSIFDRLMYSGKGVAFAPYGEHWRNARSMCMLQLLSAKRVQSFGGIREEETSAMIEKIRRSKPTTVVNLSEMFMALTNGVIHRAVLGRKGDGGDDFNRILIKVIKLLGSFNVGDYVPWLSWINRINGVDAEVEKVGTKLDGSMEGILRKYRRKKVGDDETNFVDTLLQFQRESKDTDPVEDDVIKALIFDMVSAGTDTTFAALEWTMAELIKNPRTLKTLQNEVREVSRNKGGITEDDVDKMPYLKAVSKEILRLHPPFAILLPRELTQDANMLGYDIPRGTVVLVNNWAISRDPSLWENPEEFRPERFLETSIDYKGLHFEMLPFGSGRRGCPGSTFAMALYELALSKLVNEFDFRLGNGDRAEDLDMTEAPGFVVHKKSPLLVLATPRQS

SEQ ID NO: 3288 - protein, 280 aa, Listeria monocytogenes str. 4b H7858
MTLSFSDTYRLNNGIEMPRHGFGVYKLTDEARMRTALETAVDVGYRLFDTASFYHNEKELGDFFASSGLKRDEFFVTTKMWNTEQGYDETLRAFEKSQKKLQLDKIDLYLVHWPKQDTFFDTWRAVEKLYDEGLVRAIGVSNFEAHHLDRLRTSANVLPVVDQLETHPHFPNHLLHRYLEELHIVHQAWSPLGRGGVLQEQILIDLAEKHGKSPAQIVLRWHLQNNISIIPKSETPSRIRENAAIYDFELSEADMRQVERLNTGERVSHAPDVMYVRSEI

SEQ ID NO: 3289 - protein, 218 aa, Bartonella doshiae
IASIRLISKVPTLAAMAYKYSIGQAFVYPNNNLSYAANFLRMCFAVPCEEYQVNPVLTRAMDRIFILHADHDQNASTSTVRLAGSSGANPFACIAAGVACLWGPAHGGANEACLKMLQEIGSVKKIPEFIARAKDKNDPFRLMGFGHRVYKNYDPRAKIMQKTCHEVLKELNRQDDPLLDIAIELEHIALNDEYFIEKKLYPNVDFYSGITLKALGFP

SEQ ID NO: 3290 - protein, 154 aa, Glycine max
VGRSLFGGLSNSSPGLFTSSHEMTCKNMFSQQQRTFIQMRTVLKVVDNSGAKKVMCIQALKGKKGARLGDTIIASVKEAHPNGKVKKGKVVYGVVVRAAMQKGRCDGSEVKFDDNAVVLVDKQGQPIGTRVFGPVPHELRQKKHVKILTLAGHN

SEQ ID NO: 3291 - protein, 481 aa, Streptococcus mutans UA159
MPIINKTMLITYADSLGKNLKELNENIENYFGDAVGGVHLLPFFPSTGDRGFAPIDYHEVDSAFGDWDDVKCLGEKYYLMFDFMINHISRQSKYYKDYQEKHEASAYKDLFLNWDKFWPKNRPTQEDVDLIYKRKDRAPKQEIQFADGSVEHLWNTFGEEQIDLDVTKEVTMDFIRSTIENLAANGCDLIRLDAFAYAVKKLDTNDFFVEPEIWTLLDKVRDIAAVSGAEILPEIHEHYTIQFKIADHDYYVYDFALPMVTLYSLYSSKVDRLAKWLKMSPMKQFTTLDTHDGIGVVDVKDILTDEEITYTSNELYKVGANVNRKYSTAEYNNLDIYQINSTYYSALGDDDQKYFLARLIQAFAPGIPQVYYVGFLAGKNDLELLESTKEGRNINRHYYSSEEIAKEVKRPVVKALLNLFTYRNQSAAFDLDGRIEVETPNEATIVIERQNKDGSHIAKAEINLQDMTYRVTENDQTISFE

SEQ ID NO: 3292 - protein, 289 aa, Brassica napus
MSLFDTHNTWAFVFGLMGNVISFSVFLSPVPTFYRVWKKKTTEGFQSLPYVVALFSATLWLYYATQKKDVFLLVTINSFGCFIETIYISIFLAYAPKKARMLTVKLLLLMNFGGFCLILLLCQFLAKGTTRAKIIGGICVGFSVCVFAAPLSIIRTVIKTRSVEYMPFSLSLTLTISAVVWLLYGLALKDIYVAFPNVIGFALGALQMILYVVYKYCKTPPHLGEKEVEAAKLPEVTLDMLKLGTVSSPETITAVRQANKCTCGNDRRAEIEDGQNAKNGKQSSSATAT

SEQ ID NO: 3293 - protein, 428 aa, Mycobacterium tuberculosis H37Rv
MSVVGTPKSAEQIQQEWDTNPRWKDVTRTYSAEDVVALQGSVVEEHTLARRGAEVLWEQLHDLEWVNALGALTGNMAVQQVRAGLKAIYLSGWQVAGDANLSGHTYPDQSLYPANSVPQVVRRINNALQRADQIAKIEGDTSVENWLAPIVADGEAGFGGALNVYELQKALIAAGVAGSHWEDQLASEKKCGHLGGKVLIPTQQHIRTLTSARLAADVADVPTVVIARTDAEAATLITSDVDERDQPFITGERTREGFYRTKNGIEPCIARAKAYAPFADLIWMETGTPDLEAARQFSEAVKAEYPDQMLAYNCSPSFNWKKHLDDATIAKFQKELAAMGFKFQFITLAGFHALNYSMFDLAYGYAQNQMSAYVELQEREFAAEERGYTATKHQREVGAGYFDRIATTVDPNSSTTALTGSTEEGQFH

SEQ ID NO: 3294 - protein, 243 aa, Mesorhizobium loti MAFF303099
MDARQLKVEAARAALAHVSDGMRLGIGTGTTAEEFVRLLADKVATGMTVIGVPTSERTAALCRELGVPLSTLEETPELDLTVDGADEVDPELTLIKGGGGALLREKIVAAASQRMIVIADRSKMVETLGRFPLPIEVNQFGLRATEIAIAKTAADLGLSGPITLRMTGGQAFVTDGGHFILDASFGRIPDTRALSNALHAIPGVVEHGLFIGLASTAIIAGGDGIQTVHAARKPGSSTNHDVA

SEQ ID NO: 3295 - protein, 317 aa, Photorhabdus luminescens subsp. laumondii TTO1
MTDKLTSLRKLTTVVADTGDIAAMKLYQPQDATTNPSLILNAAQIPEYRKLIDEAIAWAREQSDSREQQIVDASDKLAVNIGLEILKLIPGRISTEVDARLSYDSERSVAKAKRLIKLYNEAGISNDRILIKLASTWQGIRAAEQLEKEGINCNLTLLFSFAQARACAEAGVYLISPFVGRILDWYKANSDQKEFAPHEDPGVISVTEIYQYYKQHGYDTVVMGASFRNSGEILELAGCDRLTIAPALLKELSEAQGEVERKLGYAGEIKARPEPLNEAQFYWEHHQDAMATEKLADGIRKFAIDQGKLEKMISDLL

SEQ ID NO: 3296 - protein, 372 aa, Oryza sativa (japonica cultivar-group)
MDDPMLNAVKEEESHGDGGGLEVVAGEDGAAAVAAGLAPGPMEGLHDAGPPPFLTKTYDMVDDAGTDAAVSWSATSNSFVVWDPHAFATVLLPRFFKHNNFSSFVRQLNTYGFRKVDPDRWEFANENFLRGQRHLFKNIKRRKPPSHTASNQQSFGPYLEVGHFGYDAEIDRLKRDKQLLMAEVVKLRQEQQNTKANLKAMEDRLQGTEQRQKQMIAFLARVMKNPEFLKQLMSQNEMRKELQDAISKKRRRRIDQGPEVDDVGTSSSIEQESPALFDPQESVEFLIDGIPSDLENSAMDAGGLVEPQDFDVGASQQQQIGPQGELNDNFWEELLNEGLVGEENDNPVVEDDMNVLSEKMGYLNSNGPTAGE

SEQ ID NO: 3297 - protein, 240 aa, Oryza sativa (japonica cultivar-group)
MGRGKIVIRRIDNSTSRQVTFSKRRNGIFKKAKELAILCDAEVGLMIFSSTGRLYEYSSTSMKSVIDRYGKSKDEQQAVANPNSELKFWQREAASLRQQLHNLQENHRQLMGEDLSGLNVKELQSLENQLEISLRSVRTKKDHVLIDEIHELNRKGSLVHQENMELYKKISLIRQENAELYKKIYETEGPSEVNRDSPTPYNFAVIEKTNVPVQLGLSTLPQHSDAEQSTAPKLGLQLNP

SEQ ID NO: 3298 - protein, 364 aa, Zea mays
MGSTAGDVAAVVDEEACMYAMQLASSSILPMTLKNAIELGLLEVLQKEAGGGKAALAPEEVVARMPAAPGDPAAAAAMVDRMLRLLASYDVVRCQMEDRDGRYERRYSAAPVCKWLTPNEDGVSMAALALMNQDKVLMESWYYLKDAVLDGGIPFNKAYGMTAFEYHGTDPRFNRVFDEGMKNHSVIIAKKLLDFYTGFEGVSTLVDVGGGVGATLHAITSRHPHISGVNFDLPHVISEAPPFPGVRHVGGDMFASVPAGDAILMKWILHDWSDAHCATLLKNCYDALPENGKVIVVECVLPVNTEATPKAQGVFHVDMIMLAHNPGGKERYEREFRELAKGAGFSGFKATYIYANAWAIEFIK

SEQ ID NO: 3299 - protein, 213 aa, Oceanobacillus iheyensis HTE831
MKFFIDTANIDDIRAANSLGILAGVTTNPSLVAKEGVSFHDRLREITKEVSGSVSAEVISEDAEGMIEEGKELAAIAPNITVKVPMTLEGLKAVKVFSELNIKTNVTLIFNANQALLAARAGATYVSPFLGRLDDIGQDGMTLISAIAEIFDRHSVSTEIIAASIRHPLHVTDAALNGAHIATIPYKVLEQLVKHPLTDQGIQKFLDDWNSQK

SEQ ID NO: 3300 - protein, 359 aa, Zea mays
MGSTAGDVAAVVDEEACMYAMQLASSSILPMTLKNAIELGLLEVLQKEAGGGKAALAPEEVVARMPAAPSDPAAAAAMVDRMLRLLASYDVVRCQMEDRDGRYERRYSAAPVCKWLTPNEDGVSMAALALMNQDKVLMESWYYLKDAVLDGGIPFNKAYGMTAFEYHGTDARFNRVFNEGMKNHSVIITKKLLDFYTGFEGVSTLVDVGGGVGATLHAITSRHPHISGVNFDLPHVISEAPPFPGVRHVGGDMFASVPAGDAILMKWILHDWSDAHCATLLKNCYDALPENGKVIVVECVLPVNTEATPKAQGVFHVDMIMLAHNPGGKERYEREFRELAKGAGFSGFKATYIYANAWG

SEQ ID NO: 3301 - protein, 359 aa, Zea mays
MGSTAGDVAAVVDEEACMYAMQLASSSILPMTLKNAIELGLLEVLQKEAGGGKAALAPEEVVARMPAAPSDPAAAAAMVDRMLRLLASYDVVRCQMEDRDGRYERRYSAAPVCKWLTPNEDGVSMAALALMNQDKVLMESWYYLKDAVLDGGIPFNKAYGMTAFEYHGTDARFNRVFNEGMKNHSVIITKKLLDFYTGFEGVSTLVDVGGGVGATLHAITSRHPHISGVNFDLPHVISEAPPFPGVRHVGGDMFASVPAGDAILMKWILHDWSDAHCATLLKNCYDALPENGKVIVVECVLPVNTEATPKAQGVFHVDMIMLAHNPGGKERYEREFRELAKGAGFSGFKATYIYANAWA

SEQ ID NO: 3302 - protein, 469 aa, Fragaria x ananassa
MAFFRTVTKLRSRLGQPPSLRDSVRCLQTQASSDLDLHSQLKELIPEQQERLKKLKKEHGKVQLGTITVDMVIGGMRGMTGLLWETSLLDPDEGIRFRGLSIPECQKVLPGATPGGEPLPEGLLWLLLTGKVPSRSKNMHYPVNNGVVPKFQIMCSRPLMLCLLEHIPMTQFTTGVMALQVQSEFQKAYDKGIPKSRYWEPTYEDSLSLIAQLPVVASYVYRRIYKGGRMIPVDDSLDYGGNFSHLLGFDDHKMQELMRLYVTIHSDHEGGNVSAHTGHLVASALSDPFLSFAAALNGLAGPLHGLANQEVLLWIKSVVDECGENITKDQLKDYVWKTLNSGKVVPGFGHGVLRKTDPRYTCQREFALKHLPDDPLFRLVSKLYDVVPPILTELGKVKNPWPNVDAHSGVLLNHFGLTEARYFTVLFGVSRSIGIGSQLIWDRALGLPLERPKSVTMESLESFCKKAAS

SEQ ID NO: 3303 - protein, 359 aa, Zea mays
MGSTAGDVAAVVDEEACMYAMQLASSSILPMTLKNAIELGLLEVLQKEAGGGKAALAPEEVVARMPAAPGDPAAAAAMVDRMLRLLASYDVVRCQMEDRDGRYERRYSAAPVCKWLTPNEDGVSMAALALMNQDKVLMESWYYLKDAVLDGGIPFNKAYGMTAFEYHGTDSRFNRVFNEGMKNHSVIITKKLLDFYTGFEGVSTLVDVGGGVGATLHAITSRHPHISGVNFDLPHVISEAPPFPGVRHVGGDMFASVPAGDAILMKWILHDWSDAHCATLLKNCYDALPENGKVIVVECVLPVNTEATPKAQGVFHVDMIMLAHNPGGKERYEREFRELAKGAGFSGFKATYIYANAWA

SEQ ID NO: 3304 - protein, 151 aa, Daucus carota
MKRLSSSDSLGALMSICPTTEEGSPGNNHVYSREFQSMLEGLDEEGCVEEMGQISEKKRRLSINQVKALEKNFEVENKLEPERKVKLAQELGLQPRQVAVWFQNRRARWKTKQLERDYGVLKANYDSLKLKNDTLQQENQSLLKEIRELNS

SEQ ID NO: 3305 - protein, 230 aa, Helicobacter hepaticus ATCC 51449
MGLYDRNYTNNAQFANEAVAERDSALVNFVKTTYKFFGASLFFAFIGAMIGFMYLEFVVEYRFFIFIAEIAALFGVMFSRSKPGLNIAMLFIFTTLTGVTITPLVAMVAFKAGAGAVAMAFAMTTIIFGVMSIFGIKTTKDLANMGKMLFIALIVVVVCSIINLFLGSSMFQVLISSAAAILFSLYVAYDTQNIVRGLYTSPVDAAINLYLDFYNIFVSLLSLIGLANRD

SEQ ID NO: 3306 - protein, 264 aa, Aspergillus nidulans FGSC A4
MAALQSLRSTYRMNSGHEIPVLGYGVDSAIMYGNEKACGRAIAASGIDRSQIFFTTKIPPDSMGYNATKRAIDSSLRTAEQEYFDLILLHAPYGGKEARRGSWKALVEAQRAGKTKSIGVSNYGIHHLDELEAYIQSSGDDGVRESKIDVGQYELHPWLDRSEIVEWLQKRNIIVQAYSPLAHGTRMREPLLKKLGYKYGKSPAQIMIRWGLQKGFVPLPKSVTPSRIQENTEVFDFELDEEDMKSLHTGEYSPTDWDPTLDYD

SEQ ID NO: 3307 - protein, 392 aa, Glycine max
MGLRFSSGSAPHSSSLNGSHCSGSARTGSKNVGFSATGKSQFSEIASGSDDREESLGRILKWPNLKVFSFEELISASRRFRYDIQGLVIGKGCFGPVYKGWLDENTLTPAKVGYGMAVAIKMLNQDNFRGFEEWQSEVNFLGRLSHPNLVKLLGYCWDEDELLLVYEFLPKGSLENHLFRRNIEPLSWNTRLKIAIGAARGLAFLHASEKQVIYRDFKASNILLDLNFNAKISDFGLAKLGPSGGQSHVTTRVMGTYGYAAPEYIATGHLYVKSDVYGFGVVLLEILTGMRALDTKRPTGQQNLVEWTKPLLSSKKKLKTIMDAKIVGQYSPKAAFQAAQLTLKCLEHDPKQRPSMKEVLEGLEAIEAIHEKSKESKTRNSYQSPRQRVVRV

SEQ ID NO: 3308 - protein, 158 aa, Streptococcus pneumoniae TIGR4
MTSLYDFSVLNQNNQATPLDSYRGKVLLIVNTATGCGLTPQYQGLQELYERYQDQGFEILDFPCNQFMGQAPGSAEEINAFCSLHFQTTFPRFAKIKVNGKEADPLYVWLQDQKSGPLGKRVEWNFAKFLIGRDGQVFERFSSKTDPKQIEEAIQTLL

SEQ ID NO: 3309 - protein, 399 aa, Zea mays
MLLSSHASAHASEKKIHARRSVFLAGCPGPVRNSSFLHTYSRKLLVRACSTCTYALVNRRPRAPLRPDTSPLPRTGPWRESAGACQSGKPRPPLVGPSSLRLLCWSAPPNSTMPAAASHPSPTGPLVARPPASSSPPAGRPASQTLARRAREKLDAMFGYRKADPDLEAGGSSLLYPGMTESPELRWAFVRKIYVILTVQLAMTAAVSAFVVKVPAVSNFFVSSNAGIALYIFLIVLPFIVLCPLHYYHQKHPVNLLLLGLFTVAISFAVGMTCAFTSGKIILEAAILTAVVVNSLTAYTFWAAKRGHDFNFLGPFLIAAIMVLMVFSLIQIFFPLGKISVMIYGGLASLIFCGYIIYDTDNIIKRHTYDQYIWAAVSLYLDVINLFLSLLQLLRAADS

SEQ ID NO: 3310 - protein, 271 aa, Mycoplasma pneumoniae M129
MDTFTSAVKINWFPGHMKKTHDQLKKLASSLDGVIEVVDARAPTLTQNPEITAYFTNKPKLTLALKADLAQTVANSNILWGTLKQGLQLKRLVIKKLQTLFQAKKNQLKAKGLLVHQFRLAVIGMPNVGKSSLINLLLNKNHLQVANRAGVTKSMSWNQISSEFYLSDTPGVFFKRIDEMAVGYKLVLTNVIKREVVPLEDVGAFAFCYLSKHYPQLLPYEGTDFTEFLHKFAISRKLLQKSNQLNINLACELFVSELINGKYGKLSFELD

SEQ ID NO: 3311 - protein, 422 aa, Pseudomonas syringae pv. tomato str. DC3000
MSDLKTAALEYHANPRPGKLSVELTKPTATARDLALAYSPGVAEPVREIARDPELAYKYTGKGNLVAVISDGTAILGLGDLGPLASKPVMEGKGVLFKRFAGIDVFDIEVDSESPQAFIDTVKRISITFGGINLEDIKAPECFEIEKALIEQCDIPVFHDDQHGTAIVTAAGMINALEIVGKSLESAKIVCLGAGAAAISCMKLLVSMGAKIENIFMVDRTGVIHSGRTDLNQYKAVFAHATEKRSLTDALDGADVFVGLSGPNLLSAENLKLMAKDPIVFACSNPDPEISPELAHATRSDVIMATGRSDYPNQVNNVLGFPFIFRGALDVRAKRINEEMKIAAANALRELAKLPVPQEVCDAYGGIKLEFGREYIIPKPMDTRLLGLIADAVAKAAIESGVATLPYPKHYPLTSVDDVFNG

SEQ ID NO: 3312 - protein, 494 aa, Burkholderia cepacia R18194
MKSESEHPGLAAALAWCRSGAKQHFIDGKWVPAASGRTMETLNPATADVLAHIAEGDKADVDLAVAAARRAFESSGWRGMSPHARTAVLLRLADAIEQHADELAALETLDNGMPAWFSAAVVKMTVDTFRYYAGWPTKILGTTVPTDPSAFIYTLREPIGVCGQINPWNVPLLLAGVKFGPALACGNTIVAKPSELASLTCLRLVEIFHEAGLPPGVMNVVTGYGQTVGAAISEHPGIDKVAFTGSTAIGKQILLASAGNLKRVTLELGGKSPHIVFPDADLDKALAAAVNGFTRNSGQICSSGTRLFVHRSIHDEFANEVAKLAARLKVGNPFDADTKLGPLISSKQRDRVMSYVAAGNDEGATLLTGGRQACDAGYYVEPTVFSGVSNAMRIAQEEIFGPVVCVIPFDTEEDVIAQGNDSTYGLAGGIWTRDIGRAHRIAAALKGGRIWINTFGETDPVMPFGGYKQSGLGREFGAESIQTYTEAKSVMLRY

SEQ ID NO: 3313 - protein, 484 aa, Sinorhizobium meliloti
MNLKDPSLFRQAALVGETWIEADPKNAIEVNNPATGEIIGRVPKLGAADTRTAIEAAARVQKEWAARTAKERSAVLRRWFELMIENKDDLGRILTMEQGKPLAEATGEIVYGASFIEWFAEEARRVYGDLVPGHQKDKRILVMKQPIGVVAAITPWNFPNAMITRKAGPALAAGCAMVLKPAAQTPFSAIAIAVLAERAGMPKGLFSVITGSAREIGAEMTSNPTVRKLTFTGSTEVGAELYRQSAATIKKLGLELGGNAPFIVFDDADLDAAVEGALIAKFRNNGQTCVCANRIYVQDGVYEAFSDKLAQAVAKLKTGNGMEDGVILGPLIDQPALKKVEEHVADALAKGARVVQGGRRHSLGGTFYEATVLADVTQAMAVAREETFGPVAPLFRFKDESDVIAQANDTEFGLASYFYAKDLARVFRVAEALEYGMVGVNTGLISTAEAPFGGVKLSGLGREGSKYGIEEFMEIKYVCLGGIA

SEQ ID NO: 3314 - protein, 340 aa, Actinoplanes sp. A40644
MEAVTIVGPGRLKTASVPVPEPLPGTVLVAPRYAGICGTDLELFHGTSSYLADGRAATPLIFGHEWCGRVVSADPGTGWRPGDRVAGQTMVPCGGCARCRAGRRGLCRRMREVGLYGLDGAAAQYIRVPGHALARLPDTVPDRTAALVEPAVTVVESFARTGCGFDDRVAVLGTGTIGLLAVQFARRVAGRVDAVGVDPAGLALAVRCGADRAIPVGETTAGSYSLVVEASGAPEAFAHALDLVEPGGRVGVIGVANEPTAGVVAGSVALRGVSVLGIQHGLDHYDRTIELFATGALTADPLIGATFPAGAAAEAFAFMESARSGPPKVLLDLTEWKGDR

SEQ ID NO: 3315 - protein, 74 aa, Triticum aestivum
MAFVPGCVQCGTRSNPCRCKVVGPTLGFVAFVVTGVVEWPLGAAVYLFRRRKGRRIMGHPARVVYPRVTTAIPI

SEQ ID NO: 3316 - protein, 106 aa, uncultured Rickettsia sp.
MLKEIGSSEYIPKYIAKAKDKNDPFRLMGFGHRVYKNYDPRAAVLKETCKEVLKELRQLDNNPLLQIAIELEAIALKDEYFIERKLYPNVDFYSGIIYKAMGIPSQ

SEQ ID NO: 3317 - protein, 146 aa, uncultured Rickettsia sp.
ANEAVINMLKEIGSSEYIPKYIAKAKDKNDPFRLMGFGHRVYKNYDPRAAVLKETCKEVLKELRQLDNNPLLQIAIELEAIALKDEYFIERKLYPNVDFYSGIIYKAMGIPSQMFTVLFAIARTVGWMAQWKEMHEDPEQKISRPR

SEQ ID NO: 3318 - protein, 499 aa, Pseudomonas syringae pv. syringae B728a
MQMTTLTRADWEQRARNLKIEGRAFIQGEYTAASSGETFDCISPVDGRMLAKVASCDAADAQRAVDSARSAFNSGVWSRLAPAKRKATMIRFAGLLEQNAEELALLETLDMGKPISDSLGVDIPGGARALSWSGEAIDKLYDEVAATPHDQLGLVTREPVGVVAAIVPWNFPLMMACWKLGPALSTGNSVILKPSEKSPLTAIRIAQLAIEAGIPAGVLNVLPGYGHTVGKALALHMDVDTVVFTGSTKIAKQLMIYAGESNMKRVWLEAGGKSPNIVFADAPDLQAAASAAASAIAFNQGEVCTAGSRLLVERSIKDRFLPMVIEALSAWKPGNPLDPATTVGALVDTQQMNTVLSYIEAGHSDGAKLVAGGKRILQETGGTYVEPTIFDGVNNAMKIAQEEIFGPVLSVLTFDTAEEAIQIANDTQYGLAAAVWTANISKAHLTAKALRAGSVWVNQYDGGDMTAPFGGFKQSGNGRDKSLHAFDKYTELKSTWIKL

SEQ ID NO: 3319 - protein, 174 aa, Enterococcus faecium
LYLGNRHARVEGETYYEFIDQFVQSATELFPELLLHWEDFGRGNAAAILEKYEDQITTFNDDIQGTGIVVLAGVLGGLNISGEQLKDQIILTFGAGTAGVGIANILLDEMIRQGVPEEEARQHFYQVDKQGLLFEDTEGLTPGQIPFARKRSEFINADELTNLEAVVKAIHPTI

SEQ ID NO: 3320 - protein, 49 aa, Oryza sativa (japonica cultivar-group)
MAGTANCIDILIAIILPPLGVFLKFGCGVIMEYLIKLLSVTLVSSMPFA

SEQ ID NO: 3321 - protein, 1150 aa, Gibberella zeae PH-1
MGTRTASSAVADASLRGPGRTHSTRSSRSSRVPSFPPPSPSASAAPAAPAPATSTGTGANYNQSHTRQLSHSHSQSQSRSQSQSLSQAQSQAYASRSHSHSHSHSHSRSASNAANSHPPPHHSQHQRTSSSARTTSQNDHESSRLAANPKHHRTSSKDDRHPPPTRGPDPSRAHRRSSSSRSKNNNHNPPPEMAPSASAPSNGTSHASAAPPTNHADAPPRASTSKHARSRTVIPTQSGKWMLGKTIGAGSMGKVKLARKEDGSEQVACKIIPRGSTDDGHQSRADKERADQSKEIRTAREAAISTLLNHPHICALHDVVRTNHHWYMLFEYVNGGQMLDYIISHGKLKEKQARKFSRQIASALDYLHRNSIVHRDLKIENILISKTGDIKIIDFGLSNLFAPRGHLKTFCGSLYFAAPELLQARAYTGPEVDVWSFGIVLYVLVCGKVPFDDQSMPALHAKIKRGLVDYPAWLSSECKHLLSRMLVTDPKQRATMQEVLTHPWMAKGFNGPPDNYLPNREPLTTPLEPEVILAMQGFNFGTPESINAQLTKIIESDEYQRAIKLYQREKELPQPTKDAEKKRAFGFDFYKRRNSGNSRDTLSAPSSEALQMGNDPMNAFSPLLSVYYLVKEKQDRDHADMVPPAASQSREKEKEKEREREREREEKREREREREKEREREREREREAREKEKAREPELPEIAAPQAAHTNSSAYEMPGEKPTGGRSRPRARTHGEDDMPELPKQTPAPPPEPRVEQIQKKEGTAAGILRRFSTRKRREPERLDRDRSHPPVVQVHSPAEPSPLAPRKSFSIRRGRRDREDASDTQIRSSSNQGQHGELLSPPMSSGGNREGRRGSALGRSTSVNSAEMRRRKDHPATNESDQSVGNEESSSSRRAHGHSRSVSLRAKSIGHARRESIQQRRQRRDAAQEANVPEETDQELEQSGVSTERLDDTELSKPVFLKGLFSVSTTSGKSVPAIRTDIKRVLKQLNVDYTEIKGGFRCRHSPSIDLNKVQDPPMSPGNTPGHKRRFSFGGLIRGDDRDRDDFRDSDRPPTTPRTPGRSDRDRSFSNSETSFDSNSGRNAGPSRQVPGETSTQVQSDLGGSMVLEFEIFIVKVPLLSLHGIQFKRMAGNTWQYKSMADHILRELRL

SEQ ID NO: 3322 - protein, 420 aa, Listeria monocytogenes EGD-e
MSQKIQVENGVLKTPNNPVIPFIEGDGTGPDIWAAAKRVLDAAVKKAYNGEKEIAWKEVLAGEKAFKQTGEWLPQATLDTIDEYLIAIKGPLTTPIGGGIRSLNVALRQELDLYVCLRPVRYFKGVPSPVKRPEDTDMVIFRENTEDIYAGIEFKEGSIESKKLIDFLKSEFGVDKIRFPETSGIGIKPISKEGTERLVRSAIEYAIKEGRKSLTLVHKGNIMKFTEGAFKNWGYDLCEREYGDKVFTWNEYDRIKEAEGTEVADAKQNEALAAGKILVKDSIADIFLQQILTRPAEFDVVATMNLNGDYISDALAAQVGGIGIAPGANINYLTGHAIFEATHGTAPKYAGLDKVNPSSVILSGTLLLEHIGWGEAAALINQSMEKTIAAKTVTYDFARLMDGATEVKCSEFADELIKNF

SEQ ID NO: 3323 - protein, 373 aa, Listeria monocytogenes EGD-e
MTLSKGLENVYVAETSISSIIDDMLTYVGYGIDDLMENNASFEEVIYLLWHLRLPNKDEFKKFKREIQENMAVSETIITSLRMQNHQKLHPMSVLRTTVSMLGVFDTEAELDDGEAVYRKGLRLQAKMPTIVAAFSRIRRGLDPIPPREDLNMAANFLYMITGEEADELSVEAMNKALVLHADHEFNASTFTARVCVATLSDVYSGVTAAIGALKGPLHGGANERVFDMLEEIDQAGDVRNYIQEKIDTKQKIMGFGHRVYRGGDPRAQHLREMSRKLTAEKGEEKWFDISLQVEESVWELKHLKPNVDFYSASVYHALGIDRDLFTLVFSVSRVSGWLAHIFEQYRDNRLIRPRAIYVGPENRSYLPVEERI

SEQ ID NO: 3324 - protein, 470 aa, Lactobacillus delbrueckii
MVLGGVREQGKNMFAVQVNDEIFVLDAGLKYPDSSLFGIDVVIPDMEFFKQYGDQVVGIFLTHGHADSIGALPYILRDWDIPVFGSKLTIELAKIDVQRENKRRNNQLFNVIDADTEIDFKNASVSFFHTTHSVPDSLGIVIHAPQGQIVYTGDFKFDPSARPAYRTDMARLAEIAGNGVLALLPDSSNAEAVLPNASENEVGTYITNVFRNAKGRIIVAGKASNLNRVQQVFNAAAATGRRVLLTGRDVAKIVHTAMKLGYLEVPDGLLMKAKELKDVPDEKTVILETGRMGEPLQSLQKMANNRHRMITIHEGDLVFIATTPSHAVETTVAITSDMVYRAGGTVIELGRNMHTSGHATGRDLQTLIDLLKPRILVPVIGDYRLLEAVKDLAVETGMDPDDVYITQNGDCLEYDTKRGQFFRGDAVPGEDTMIDGSGVGDVGNIVLRDREVLSDDGIFIAVVTIDRKKK

SEQ ID NO: 3325 - protein, 485 aa, Burkholderia fungorum LB400
MRIDHLINGKSGAAKDYFETVNPATQEVLAEVARGGAEEVDAAVRAAKDAFPAWAARPAAERAKLVRKLGELIAKNVPEISETETKDTGQTISQTRKQLVPRAADNFSYFAEMCTRVDGHTYPTDTHLNYTLFHPVGVCALISPWNVPFMTATWKVAPCLAFGNTAVLKMSELSPLTAAMLGNLALEAGIPAGVLNVVHGFGKETGEPLVAHPDVHAVSFTGSTATGNRIVQTAGLKKFSMELGGKSPFVIFDDADFERALDAAVFMIFSNNGERCTAGSRILVQRGIYARFAERFIERAKRLSVGDPLSDSTIVGPMISQGHLAKVRSYIELGPKEGATLACGGLDLPELPDALRKGNFVQPTVFVDVDNRMRIAQEEIFGPVACLIPFDDEADAIELANDISYGLSSYIWTENTGRALRVAAAVAAGMCFVNSQNVRDLRQPFGGTKASGVGREGGTWSYEVFLEPKNVCVSLGSHHIPRWGV

SEQ ID NO: 3326 - protein, 322 aa, Candida tenuis
MSASIPDIKLSSGHLMPSIGFGCWKLANATAGEQVYQAIKAGYRLFDGAEDYGNEKEVGDGVKRAIDEGLVKREEIFLTSKLWNNYHDPKNVETALNKTLADLKVDYVDLFLIHFPIAFKFVPIEEKYPPGFYCGDGNNFVYEDVPILETWKALEKLVAAGKIKSIGVSNFPGALLLDLLRGATIKPAVLQVEHHPYLQQPKLIEFAQKAGVTITAYSSFGPQSFVEMNQGRALNTPTLFAHDTIKAIAAKYNKTPAEVLLRWAAQRGIAVIPKSNLPERLVQNRSFNTFDLTKEDFEEIAKLDIGLRFNDPWDWDNIPIFV

SEQ ID NO: 3327 - protein, 182 aa, Arabidopsis thaliana
MASSMLSSATMVASPAQATMVAPFNGLKSSAAFPATRKANNDITSITSNGGRVNCMQMQVWPPIGKKKFETLSYLPDLTDSELAKEVDYLIRNKWIPCVEFELEHGFVYREHGNSPGYYDGRYWTMWKLPLFGCTDSAQVLKEVEECKKEYPNAFIRIIGFDNTRQVQCISFVAYKPPSFTG

SEQ ID NO: 3328 - protein, 201 aa, Chlamydomonas reinhardtii
  misc_feature (75)..(75): Xaa can be any naturally occurring amino acid
MLLTRKNVAVRPARAARRDVRAMSLLGNLFGGGSKPTSSTSNFHQLSALDIDKKNVDFKSLNNRVVLVVNVASKXGLTAANYKEFATLLGKYPATDLTIVAFPCNQFGGQEPGTNAEIKAFASARGFSGAGALLMDKVDVNGANASPVYNFLKVAAGDTSDIGWNFGKFLVRPDGTVFGRYAPTTGPLSLEKYIVELINSR

SEQ ID NO: 3329 - protein, 318 aa, Pseudomonas aeruginosa UCBPP-PA14
MTWPAEAPLMSPPQRLRAGLLRGCLRLLFRGLVRPPMPVALQRGVLRGLSLATLGAGGVVRERRSLAGVPCEWLRPRGVEARRRVLYLHGGAYLIGSPATHRAITTHLARRCAAEVCAVDYRRAPEHPFPAARDDALAVYLALLEAGHSPRQLLLAGDSAGGHLALSLALELKARGLPLPAGLLLFSPWTDLSCQRLHTPEAGDPLLSRAWLESAVRLLLPADAEPGSAALSPLHADLAGLPPLLVQVGEDELLRDDSLRLAQRAGEQGVAVRLQRYAGCWHVFQAHAGVLASADRALDEAAAFVVECSAEGGQCRTS

SEQ ID NO: 3330 - protein, 367 aa, Triticum aestivum
  misc_feature (192)..(192): Xaa can be any naturally occurring amino acid
  misc_feature (202)..(202): Xaa can be any naturally occurring amino acid
  misc_feature (228)..(228): Xaa can be any naturally occurring amino acid
MGKGGKGEAAAAVAGEGENMAAWLVAKNTLKIMPFKLPPLGPYDVRVRMKAVGICGSDVHYLKEMRIAHFVVKEPMVIGHECAGIIEEVGDGVKHLAVGDRVALEPGISCWRCRHCKGGRYNLCDDMKFFATPPYHGSLADQIVHPGDLCFKLPDNVSLEEGAMCEPLSVGVHACRRADVGAEKSVLIMGAXGPIGLVTMLXARAFGAPRIVIADVDDHRLSVAKSLXGADAVVKVSGNTEDLAGEIERIQAAMGGDIDVSLDCAGFSKTMSTALEATRPGGRVCLVGMGHNEMTVPLTSAAIREVDVVGIFRYKDTWPLCLEFLRSGKIDVKPLITHRFGFSQGEVEEAFEVSARGRDAIKVMFNL

SEQ ID NO: 3331 - protein, 392 aa, Corynebacterium melassecola
MTIDLQRSTQNLTHEEIFEAHEGGKLSISSTRPLRDMRDLSLAYTPGVAQVCEAIKEDPEVARTHTGIGNTVAVISDGTAVLGLGDIGPQASLPVMEGKAQLFSSFAGLKAIPIVLDVHDVDALVETIAAIAPSFGAINLEDISAPRCFEVERRLIERLDIPVMHDDQHGTAVVILAALRNSLKLLDRKIEDLKIVISGAGAAGVAAVDMLTNAGATDIVVLDSRGIIHDSREDLSPVKDALAEKTNPRGISGGINEAFTGADLFIGVSGGNIGEDALKLMAPQPILFTLANPTPEIDPELSQKYGAIVATGRSDLPNQINNVLAFPGIFAGALAAKAKKITPEMKLAAAEAIADIAAEDLEVGRIVPTALDPRVAPAVKAAVQAVAEAQNA

SEQ ID NO: 3332 - protein, 208 aa, Cynodon dactylon
MAAKSSEKGSNNGKESSMADVYRGELTPLQRHVAFFDRNKDGVIYPAETYEGFRAIGAGVPLSAVGAAFVNGFLGPKTIPENEKVGPFKFPIYVKNILKGKHGSDSGVYDAHGRFVPEKFEEIFKKHAHTRPDALTAKELQELLQANREPKDFRGWLGGFTEWKVLYALCKDKDGFLHKDTVKAVYDGSLFDKMEQERKAKKESAKKK

SEQ ID NO: 3333 - protein, 441 aa, Arabidopsis thaliana
MDKTSQLPDELLVKVLSFLPTKDAVRTSLLSMRWKSLWMWLPKLEYDFRHYSVSEGQGLARFITLSLLGHKAPAIESLSLKLRYGAIGSIKPEDIYLWVSLAVHDSNVRELSLKLCTFAERPTKLPKSLYKCKSIVILKLKDEILVDVPRKVCLPSLKTLFLGRVTYSDEDSLHRLLSNCPVLEDLVVERDRIDNLGKLSVVVKSLQRLTLKMSCPCHLDGIMMNTPSLKYLKVTDERQESDSDNESDSDSPRYFYDFEDMPKLEEADFVLTFQNIKKFFKFVTSIKRLSLCLGVYTEESLYHEGLVFNQLEQLKICSCDSDWSILLSRLLESSPNLRELEAYVIEDHPDRRVDLPNQWGNQLNCVPKCLLSSLETFKWSEMYGLLQNQMDVAKYILRNARCLKSATIFFPTTYAKETRDEMIEELSLSFQGPETCQVFFH

SEQ ID NO: 3334 - protein, 125 aa, Zea mays
  misc_feature (67)..(67): Xaa can be any naturally occurring amino acid
MSFAAGSSEDQLNSSPLAMDRRPARTRSDPPHSSRGAVHDAVAVEQKQHRRPQGTGAPPVYFTAELXLACLFVAVSLALLPLVLPPLSPPPSLLLLVPVGLLAVLLALAFVPLDAHSHLAVGSSR

SEQ ID NO: 3335 - protein, 109 aa, Castanea sativa
GTGASCADVLRVMQHEPELMFETLNHRAEECCNGNGNGISALANSLAKSFRNMPYLVANSAASSSCSLTAAAMNNNGFYYCNEDNEYNAAADSATTAGEDEWSYCYACN

SEQ ID NO: 3336 - protein, 375 aa, Mycobacterium avium subsp. paratuberculosis str. k10
MSTLEDNQPRIHKGLAGVVVDTTAISKVVPETNSLTYRGYAVQDLAAHCSLEQVAYLLWYGELPDDQQLALFSQRERAARRLNRSQLSLLHKLPDTCHPMDVVRTFISSMGAEDPDEDDNSASANHAKALRMFAVLPTIVAADMRRRRGLEPIAPHSHMSYAQNFLHMCFGDVPEQVIVDAFEQSMILYAEHSFNASTFAARVVTSTQSDIYSAVTAAIGALKGSLHGGANEAVMHDMLEIGTPDRAAEWLQGKLSRKEKVMGFGHRVYKNGDSRVPTMKQALQRVAAVRDGQKWLDIYQILERGMARANGIKPNLDFPTGPAYYLMGFDIGAFTPIFVMSRITGWTAHIIEQTASNALIRPLSEYVGPPQRALS

SEQ ID NO: 3337 - protein, 194 aa, Ustilago maydis 521
MSELRRKLVIVGDGACGKTCLLIVFSKGTFPEVYVPTVFENYVADVEVDGRHVELALWDTAGQEDYDRLRPLSYPDSHVILICFAVDSPDSLDNVQEKWISEVLHFCHSLPIILVGCKKDLRHDPKIVDELRKTSQRPVSAEEGMAVAQKIGAVRYLECSAKTGEGVREVFEHATRAALVQRSRGSRKKGCTVL

SEQ ID NO: 3338 - protein, 270 aa, Methylobacillus flagellatus KT
MNELHVSRENFIIPGPEGTIPVRLYRRAQAGGDVPLVLYFHGGGFNAGCLDDADFPAGFIAYHCPAVVLSVGYALAPQHPFPAAPEDAYAATRWAARNTCRLNVTAKLLVVAGDDAGGSIAAGLSMMARDRGEFSIAAQVLIAPMLDPSMTLLGDAAGLKSELTAAQCAQRYRQYLPKCTQRMHPYAAPLESLRLAGLPAAMIATAECDVLHIEAEKYANVLIQAGVPTQVSRFSGVQHAELLAHQPMLREVVEFLRRQAMHAGLPIDSG

SEQ ID NO: 3339 - protein, 247 aa, Glycine max
MASSLRISRLLSRSFLSASTTTPLFSRGGSGALGAGLSKFSTAAAIEEPIKPPLKVEHTQLLIDGKFVDAATGKTFPTLDPRTGDVISHVAEGDHEDVDRAVAAARKAFDRGPWPKMTAYERQRILLRAADLFEKHNDELAALETWDNGKPYEQSAQIEIPMLVRLFRYYAGWADKIHGLTVPADGPYHVQTLHEPIGVAGQIIPWNFPLVMFAWKVGPALACGNTIVLKTAEQTPLSALYASKLLH

SEQ ID NO: 3340 - protein, 189 aa, Triticum aestivum
MASFYAAIGFILPFLLAIALPQSTGSPAVAPSTTGSLSIEDACKQTAKLYDLCMATLSPDRSSLTADAVGLTRAAILAVQKNASETATYLTNIDEDENVNKTAELQQCLEDCGERYEAAVEQLADPTIALDMGAYDESQVLVSAGQAEGKLGHEGGQDTPEHQSILMARNTEVDQLCNITLAIAKLIPR

SEQ ID NO: 3341 - protein, 314 aa, Aspergillus flavus
METPFAAPWHQFVEDLGQTPCLPGKDLDSILAGWGQLAGTLATRYGFPPPDESVTTEDVQLDGLWLRCYTPPNATGQEPVGLYFHGGGWVMGGVNEEDGFCRVISRQCQMRLVSVEYRKAPETRYPGALNDGVSAALWALSRYENQPLILMGTSAGGNLAFGTALRLIDQDMADKVSGVVALAPITVHPDAVPEHLKEQYTAYEENAELTVNSRAAMQVFFDCYKAPVDDVYTSCLLHPRLLALPKVYIAELGLDTLRDDARLMKGALDTAKVPVMYDAYPGYPHCSFMFPFKSLGEHQRTFFGGVAKAVRWMS

SEQ ID NO: 3342 - protein, 294 aa, Saccharomyces cerevisiae
MKTLVHVASVEKGRSYEDFQKVYNAIALKLREDDEYDNYIGYGPVLVRLAWHISGTWDKHDNTGGSYGGTYRFKKEFNDPSNAGLQNGFKFLEPIHKEFPWISSGDLFSLGGVTAVQEMQGPKIPWRCGRVDTPEDTTPDNGRLPDADKDAGYVRTFFQRLNMNDREVVALMGAHALGKTHLKNSGYEGPWGAANNVFTNEGYLNLLNEDWKLEKNDANNEQWDSKSGYMMLPTDYSLIQDPKYLSIVKEYANDQDKFFKDFSKAFEKLLENGITFPKDAPSPFIFKTLEEQGL

SEQ ID NO: 3343 - protein, 163 aa, Candida albicans SC5314
MSEEKVRVPETEEERQERLAKQEEIDGRSVYVGNVDYQSTPEQLEEFFHGVGVIERVTILFDRFSGLPKGYAYIEFEQTESVQKAIDELHGKEFRGRELRVTAKRTNLPGFRRGRGRGGFRARGRGRGGFRGRGRGRGGFNSRGTRNGDSEQADGDAENEETD

SEQ ID NO: 3344 - protein, 83 aa, Brassica napus
MDIISHLSDDLLLRILSFVPTKDVVATSLLSKRWECLWTSVSKLGYDDSYHHTGDYKNFSQFVYRSLLSNKAPVLDKLHLKLG

SEQ ID NO: 3345 - protein, 164 aa, Triticum aestivum
  misc_feature (32)..(32): Xaa can be any naturally occurring amino acid
  misc_feature (118)..(118): Xaa can be any naturally occurring amino acid
MEGRMFGLETPLMTALQHLLDVPDGEAGGPGXNAAGEKQGPTRAYVRDARAMAATPADVKELPGAYAFVVDMPGLGSGDIKVQVEDERVLVISGERRREEKEDAKYLRMERRMGKMMXRKFVLPENADMEKISAVCRDGVLTVSLEKLPPPETKKPKTIQVQVA

SEQ ID NO: 3346 - protein, 238 aa, Triticum aestivum
  misc_feature (49)..(49): Xaa can be any naturally occurring amino acid
HTQAHSIQGSRRSRFEKPAWASAEEEDLPATDMPRVVGVLSALLERVTXRNDAATGPGALEPASGSAFRAMTKPGISVRAYMARIARFAGCSPACFVVGYIYLDRLLRRRRALAVDSYSVHRLLITTVLSAVKFMDDICYNNAYFAKVGGISLPEMNYLEVDFLFGVGFELNVSPETFGHYCAILQSEMLCLELEPEPLLPPNAAAPGSAMLCCLSEDDGTSATTSSSSSTQQQQLAA

SEQ ID NO: 3347 - protein, 338 aa, Sinorhizobium meliloti
MKAVVCSEPGRLALVARSGPEAPPPGSVRLAVSRVGICGTDYHIFEGKHPFLEYPRVMGHEISARVIEGGPGTRLAPGTLVVVNPYLSCGECIACRKGKPNCCTAIRVLGVHTDGAFCEEIVMPEQNLYPAEGLSPEAAAAVEFLAIGAHAVRRSAAGRGVRSLVIGAGPIGLGTAVFSRIAGHDVRLLDTSEERLAFATEKLGFSPGILAGDDAALAQATGGDGFDVVFDATGNAQSMERAFGHVAHGGTLVFVSVVKEEIRFSDPEFHKREMTLVASRNATREDFDHVIQSLAAGLVPIEALVTHRTTLEDLVRDLPRWVHDKSGLVKAVVAVSAG

SEQ ID NO: 3348 - protein, 386 aa, Aspergillus flavus
MTGLDMETIFAKIKEEYSRTDDVGKRKIQGHIRELQVGFYSDWDVVMRLSSGPLQVALAKVGIDLGIFRSLKESDTPITLAEFVKKTGASPRLLGRILRTQAAFGLIKETGPQEYTSSAFTDVFANPAAAGAVVQLLDISGPCTQILPDFLAERHYQDITSNKDCVFQKAFDSDLTMFEWMPQHPKHMESLGHLMALERPVSWVDHFPVLEELGDFPAPDKVLMVDIGGGFGQQSKALRAKFPNIPGRVIVQDIPQTLANAQPAAGVEFMEHNFFEPQPIRNAKFYYLRHVFHDWPDEQCVLILKQIIPVMGPESEILIDEMVIPSTGVPWQAAFTDLLMMNSLGGVERTRAEWDDLMKQAGLEIIQSKVYDSKEQTILVAVPRRT

SEQ ID NO: 3349 - protein, 492 aa, Aspergillus nidulans FGSC A4
MSLASLKRKDLFQQHGLIGDKWVSSSGGGTFTVTNPATLETLATLPEMNGADTESAITAAHTAFQSFRKTTARQRATWLRKWHALCVENIDDLALILTVENGKTLAEAKGEVLYAASFLEWFAGEAERVHGEVVPASNANQRILTVKQPLGVAACLAPWNFPIAMITRKVGAALAAGCTTVWKPAGETPLSALAQAVLAREAGFPSGTINVITTLNSVAEVGAALCNSKLVRKLSFTGSTRIGKLLASQCSQNLTKLSLELGGNSPFIVFDDAKVETAVEACILAKFRNSGQTCVTANRIFVQEGIYDRFSAALVEKVKALKVGNGVEEGVIIGPLTHERAVEKAVAHIKDAQEKGASLLLGGSPCQPNNLPGYFLEPTVLGKMSTEALTTREEVFAPVVALYPFKTEEEVLAKANDCDVGLGSYVITESMPRMWRVAESLEVGMVGINMGTLSAAESPFGGVKESGYGREGGRQGIEEYMTVKSILMNVAA

SEQ ID NO: 3350 - protein, 343 aa, Sinorhizobium meliloti 1021
MKAIVIHTAKDLRVEECAVEKPGPGEVEIRLAAGGICGSDLHYYNHGGFGTVRLKEPMILGHEVSGHVAALGEGVSDLAIGDLVAVSPSRPCGACDYCLKGLPNHCFHMRFYGSAMPFPHIQGAFRERLVAKASQCVKAEGLSAGEAAMAEPLSVTLHATRRAGEMLGKRVLVTGCGPIGTLSILAARRAGAAEIVAADLSERALGFARAVGADRTVNLSEDRDGLVPFSENKGTFDVLYECSGAQPALVAGIQALRPRGVIVQLGLGGDMALPMMAITAKELDLRGSFRFHEEFATAVKLMQGGLIDVKPLITHTLPLGEALKAFEIASDKGQSMKTQIAFA

SEQ ID NO: 3351 - protein, 234 aa, Arabidopsis thaliana
MGRGKIVIRRIDNSTSRQVTFSKRRSGLLKKAKELSILCDAEVGVIIFSSTGKLYDYASNSSMKTIIERYNRVKEEQHQLLNHASEIKFWQREVASLQQQLQHLQECHRKLVGEELSGMNANDLQNLEDQLVTSLKGVRLKKDQLMTNEIRELNRKGQIIQKENHELQNIVDIMRKENIKLQKKVHGRTNVIEGNSSVDPISNGTTTYAPPQLQLIQLQPAPREKSIRLGLQLS

SEQ ID NO: 3352 - protein, 106 aa, uncultured Rickettsia sp.
MLKEIGSSENIPKYIAKAKDKNDPFRLMGFGHRVYKNYDPRATVLKETCKEVLKELEQLENNPLLQIAIELEAIALKDEYFIERKLYPNVDFYSGIIYKAMGIPSQ

SEQ ID NO: 3353 - protein, 392 aa, Pseudomonas putida KT2440
MLNAEQRAIIKATVPLLESGGEALTTHFYKMMLSEYPEVRPLFNQAHQASGDQPRALANGVLMYARHIDQLEQLGGLVGQIINKHVALQILPEHYPIVGSCLLRAIEEVLGKDIATPAVIDAWGAAYGQLADILIGAEENLYKEKEEAEGGWRGTREFRLVRREQESSEIVSFYFAPVDGMPVLKAEPGQYIGLKLDIDGAEQRRNYSLSALCDGKEYRISVKREAGGKVSNYLHDELKVGDTLQLFPPAGDFTLAASDKPLVLISGGVGITPTLAMLQAALQTRREVHFIHCARNGAVHAFRDWIDGLAARHPQLKRFYCYAEPEGGAAADAVGLLSEDLLAEWLPQERDVDAYFLGPKGFMAAVKRQLKGLGVPEQQSRYEFFGPAAALE

SEQ ID NO: 3354 - protein, 106 aa, uncultured Rickettsia sp.
MLKEIGSSENIPKYIAKAKDKNDPFRLIGFGHRVYKNYDPRAAVLKETCKEVLKELGQLENNPLLQIAIELEAIALKDEYFIERKLYPNVDFYSGIIYKAMGIPSQ

SEQ ID NO: 3355 - protein, 319 aa, Listeria monocytogenes EGD-e
MKRIAILTSGGDAPGMNAATRAVVRKAIYEGLEVYGINYGFLGLVNGDIRKLELGSVGDLLHRGGTFLYSARYPEFATEEGQLKGIEQLKKHQIDGLVVIGGDGSYHGAEALTKRGFPTIGIPGTIDNDISGTDFTIGFDTALNTVLDALDKIRDTATSHERTFIIEVMGRDAGDIALWSGLAGGAEAIIVPEESFNMDDVVDRLNKGRERGKKHSIIVVAEGVMSGNEFAKQLAEYGDYHARVTVLGHVQRGGSPTAFDRVLASRLGARSVELLLENRGGLAVGIRENRIVENDISEILKEKHTLDQKLFDLASILSI

SEQ ID NO: 3356 - protein, 298 aa, Oryza sativa (japonica cultivar-group)
MAGSERTVVWFRRDLRIDDNPALASAARDGAVLPVFIWCPADEGQFYPGRCSRWWLKQSLPHLSQSLESLGCPLVLIRAESTLEALLRCIDSVGATRLVYNHLYDPVSLVRDDKIKKELSALGISIQSFNGDLLYEPWEIYDDSGLAFTTFNMYWEKCMELPIDASPSLAPWKLVPVPGLESVRSCSVDDLGLESSKDEESSNALLMRAWSPGWRNAEKMLEEFVSHGLLEYSKHGMKVEGATTSLLSPYLHFGEVSVRKVYQLVRMQQIKWENEGTSEAEESIHFFMRSIGLREYSR

SEQ ID NO: 3357 - protein, 191 aa, Glycine max
MADSDNDSGGAHNGGKGSEMSPREQDRFLPIANVSRIMKKALPANAKISKDAKETVQECVSEFISFITGEASDKCQREKRKTINGDDLLWAMTTLGFEDYVEPLKGYLQRFREMEGEKTVAARDKDAPPLTNATNSAYESANYAAAAAVPGGIMMHQGHVYGSAGFHQVAGGAIKGGPAYPGPGSNAGRPR

SEQ ID NO: 3358 - protein, 152 aa, Magnetospirillum magnetotacticum MS-1
MPRLRSALVALALGLVAVPALAVQPDEVLKDPAMEARARHISEGLRCLVCQNQSIDDSDAPLAKDLRVLVRERLKEGDSNEQVVDYVVARYGEFVLLRPVFGWHTLLLWLSPLLAVGLGAFGIWRLSRRRAPKAEGLSEAEAAEVEALLKRP

SEQ ID NO: 3359 - protein, 341 aa, Escherichia coli O157:H7
MKALSKLKAEEGIWMTDVPVPELGHNDLLIKIRKTAICGTDVHIYNWDEWSQKNIPVPMVVGHEYVGEVVGIGQEVKGFKIGDRVSGEGHITCGHCRNCRGGRTHLCRNTIGVGVNRPGCFAEYLVIPAFNAFKIPDNISDDLASIFDPFGNAVHTALSFDLVGEDVLVSGAGPIGIMAAAVAKHVGARNVVITDVNEYRLELARKMGITRAVNVAKENLNDVMAELGMTEGFDVGLEMSGAPPAFRTMLDTMNHGGRIAMLGIPPSDMSIDWTKVIFKGLFIKGIYGREMFETWYKMAALIQSGLDLSPIITHRFSIDDFQKGFDAMCSGQSGKVILSWD

SEQ ID NO: 3360 - protein, 112 aa, Bartonella bacilliformis
ANEACLKMLQEIGSVKKIPQFIARAKDKNDPFRLMGFGHRVYKNYDPRAKIMQKTCHEVLKELNIQDNPLFDIAMELEHIALNDEYFINKKLYPNVDFYSGITLKALGFPTE

SEQ ID NO: 3361 - protein, 388 aa, Thermotoga maritima MSB8
  misc_feature (1)..(1): Xaa can be any naturally occurring amino acid
  misc_feature (96)..(96): Xaa can be any naturally occurring amino acid
  misc_feature (159)..(159): Xaa can be any naturally occurring amino acid
  misc_feature (284)..(284): Xaa can be any naturally occurring amino acid
  misc_feature (334)..(334): Xaa can be any naturally occurring amino acid
  misc_feature (348)..(348): Xaa can be any naturally occurring amino acid
  misc_feature (374)..(374): Xaa can be any naturally occurring amino acid
XGSDKIHHHHHHVDALEVHRFLKGKIRTALPVEKVDRETLSLLYTPGVADVARACAEDPEKTYVYTSRWNTVAVVSDGSAVLGLGNIGPYGALPVXEGKAFLFKAFADIDAFPICLSESEEEKIISIVKSLEPSFGGINLEDIGAPKCFRILQRLSEEXNIPVFHDDQQGTAVVVSAAFLNALKLTEKKIEEVKVVVNGIGAAGYNIVKFLLDLGVKNVVAVDRKGILNENDPETCLNEYHLEIARITNPERLSGDLETALEGADFFIGVSRGNILKPEWIKKXSRKPVIFALANPVPEIDPELAREAGAFIVATGRSDHPNQVNNLLAFPGIXKGAVEKRSKITKNXLLSAVEAIARSCEPEPERIIPEAFDXKVHLNVYTAVKGSA

SEQ ID NO: 3362 - protein, 358 aa, Zea mays
MGSTAGDVAAVVDEEACMYAMQLASSSILPMTLKNAIELGLLEVLQKEAGGGKAALAPEEVVARMPAAPSDPAAAAAMVDRMLRLLASYDVVRCQMEDRDGRYERRYSAAPVCKWLTPNEDGVSMAALALMNQDKVLMESWYYLKDAVLDGGIPFNKAYGMTAFEYHGTDARFNRVFNEGMKNHSVIITKKLLDFYTGFEGVSTLVDVGGGVGATLHAITSRHPHISGVNFDLPHVISEAPPFPGVRHVGGDMFASVPAGDAILMKWILHDWSDAHCATLLKNCYDALPENGKVIVVECVLPVNTEATPKAQGVFHVDMIMLAHNPGGKERYEREFRELAKGAGFSGFKATYIYANAW

SEQ ID NO: 3363 - protein, 112 aa, Bartonella bacilliformis
ANEACLKMLQEIGSVKKIPQFIARAKDKNDPFRLMGFGHRVYKNYDPRAKIMQKTCHEVLKELYIQDNPLFDIAMELEHIALNDEYFINKKLYPNVDFYSGITLKALGFPTE

SEQ ID NO: 3364 - protein, 420 aa, Haloarcula marismortui ATCC 43049
MGYDYDKVEVPDEGQQIQVTEDDELDVPENPIIPIIHGDGIGTDVGPAAQKVLEAAANATGRDISWMRIYAGQSARDKYDENLPDDTVEAIKEFNVAIKGPLTTPVGAGFRSLNVALRKTLDLYANVRPTYHIEGVPSPVKDPEEMDMVTFRENTEDVYAGIEWEAGTDEVEEVKEFVEDEMNFDETIHDGPVGIGVKPITEFGTKRLVREAIDYALEEDRDSVTLVHKGNIMKFTEGAFRDWGYEVAEEEYGEHVITEDELWDEYDGEAPEDSLVVNDRIADNMLQQLLTRTDEYDVIATMNLNGDYMSDAAGAQIGGLGIAPGANFGSARCLAEPVHGSAPKYAGEDKVNPTAMILSGRLMLEYMGWKDAGQLVRDAVEETISSGNVTYDLERQIEGGTKLATSEFAEKVVENIEKLA

SEQ ID NO: 3365 - protein, 443 aa, Rhizobium sp. NGR234
MYRTNTPNLENYWMPFTANRQFKAAPRLLASAEGVYYRDIDGNQVLDGTAGLWCVNAGHARKEISQAVERQLNTLDFAPSFQMGHPIAFQFAEKLAEIAPGEPGKKLDRIFYTGSGSESVDTALKIAIAYQRAIGQGTRTRLIGRERGYHGVGFGGISVGGLVNNRRVFPQVPGADHLRHTHDLARNPFTKGGLPEHGAELADDLERLVALHGAETIAAVIVEPVAGSTGVLLPPKGYLERLRATADKHGILLIFDEVISGFGRLGAPFAVDYFGVTPDIITTAKGLTNGVVPMGAVFTSSKVHDALMHGPEAQIELFHGYTYSGHPVACAAGLAAMEIYEKEALLTRASELATYWEDAVHGLRSRKNVIDIRTIGLVAGIELASRSEAAGARAYDVFVDCFKRGLLIRVTGDIIALSPPLTIEREQVDELMSILADALDRAD

SEQ ID NO: 3366 - protein, 196 aa, Glycine max
  misc_feature (33)..(33): Xaa can be any naturally occurring amino acid
  misc_feature (177)..(177): Xaa can be any naturally occurring amino acid
LKLKLDAAEDKIYVDVGMTNNLCLSIQLTELLXSFMCPSGIDDFPMATIDHIKAGLSVLAKYRRPIVVHAEIQQDFENHLELNEDNLDPRAYLTYLNTRPPSWEEAAIKQLVSVTKDTRKGGPLEGAHVHIVHLSDSSASLDLIKEAKSHGDSISVETCPHYLAFTSEEIPNGDTRXKCSPPIRDAYNKDKLWEAV

SEQ ID NO: 3367 - protein, 162 aa, Pseudomonas syringae pv. tomato str. DC3000
MSAFHDIRLKALGGQELPLADFKNKVVLVVNVASKCGLTPQYAALENLYQQYRDKGLVILGLPCNQFAGQEPGTEQEIAEFCQLNYGVTFPLGEKLDVNGPNRHSLYRLLAGEGAEFPGDITWNFEKFLVGKNGGVSARFSPRTAPDDPAVIQAIEKALAHN

SEQ ID NO: 3368 - protein, 386 aa, Aspergillus oryzae
MTGLGMETIFAKIKEEYARTDDVGKRKIQGHIRELQVGFYSDWDVVMRLSSGPLQVALAKVGIDLGIFRSLKESDTPITLAEFVKKTGASPRLLGRILRTQAAFGLIKETGPQEYTSSAFTDVFANPAAAGAVVQLFDISGPCTQILPDFLAERHYQDITSNKDCVFQKAFDSDLTMFEWMPQHPKHMESLGHLMALERPVSWVDHFPVLEELGDFPAPDKVLMVDIGGGFGQQSKALRAKFPNIPGRVIVQDIPQTLANAQPAAGVEFMEHNFFEPQPIRNAKFYYLRHVFHDWPDEQCVLILKQIIPVMGPESEILIDEMVIPSTGVPWQAAFTDLLMMNSLGGVERTRAEWDYLMKQAGLEIIQSKVYDSKEQTILVAVPRRT

SEQ ID NO: 3369 - protein, 366 aa, Zea mays
  misc_feature (86)..(86): Xaa can be any naturally occurring amino acid
AGRNKDDAEEAISLVEALAVQLTQREGELIYEKAEVKKLANFLKQATVDARKVAEEERALALAEIEKARAAIEKVEKALDVHDSTXAAEEEEIEELRKEVREARRIKMLHQPSKVMDMEFELQALRTLISEKTQLCNQLKKELAMIKRLEDDSSGLFELEGSNTLGSQLCIIPRVDGASNITNCPIQWYRVISGGTRELISGATKFMYAPEPFDVGRLLQAEIVLNADKIIVQTDGPVDNAAGLERYVDSLMKRTDIEFNVVVTQMNGKDYSSNSVHVFHIGKLRIKLRKGWSTKARESYSTTMKLCGSRGGGNAAARAVFWHPRKGSSYTLAFETDRDRNAAIMIARKFASNCNIALAGPGDQGT

SEQ ID NO: 3370 - protein, 420 aa, Zea mays
  misc_feature (55)..(55): Xaa can be any naturally occurring amino acid
STIEEASLEHHKELELPYTKSQRSERRSKIKREISIMKIGRHPNIVRLNEVLAGXTKIYIVLELVTGGELFDRIARHGKLRENEARKYFQQLIDAIDYCHSKGVYHRDLKPQNLLLDSRGNLKVSDFGLSTLSQNGAGLLHTTCGTPNYVAPEVLGSNGYDGSAADIWSCGVILYVLMAGYLPFEENDLPSLYEKITAAKYSCPYWFSPGAKSLIQRLLDPNPRTRITIGEIRADPWFEKNYVAIRRGEDENVSLDDVQAVFDNIEDKYVSEEVTHKDGGPLMMNAFEMITLSQGLDLSALFDRQQEYVKRQTRFVSRKPAKTIVATIEVVAESMSLKVHSQNYKLRLEGAASNRASQFAVVLEVFEVAPSLFMVDVRKVAGDTPEYHRFYENLCSKLCSIIWRPTEVSAKSTPLRTTTC

SEQ ID NO: 3371 - protein, 160 aa, Ustilago maydis 521
MAAENAPMELDSPSTKQPRFQVKKWNAVCLWSWDIQVEDRLLLVVQCQTDAIGCWDVAVDLALDRLPHQCAICRNHIMDLCIECQANQGSATTEECTVAWGQCNHAFHFHCISRWLKTRQVCPLDNRDWELQNFNSLAPFILTRLALILLAPAHSNRYGR

SEQ ID NO: 3372 - protein, 428 aa, Tropheryma whipplei str. Twist
MTRQSFFIKNVTLPGLGARTLFLSGGLIQEIICKDIEEHQFLSTKNTDKASCRVIDAEGFIALPGLVDLHTHLRNSRDGSIRDVTSAAIAGGYTTVSSMPNMHPVQDSPEAVNILKAIAKEDAVCDIRPVGAVTKGLRGNEITDMHSLLDAGVNIFSDDGNCVHDPGIMHQALSFAGRNNCVIAQHAQDPTLTKSAQGDTQGPIVAPKSLWPSIAESTIVARDILLARAANARLHVCHVSSQESVYAIAWGKSLGVQVTAEVTPHHLLFYDSLVMTGDTRFKVNPPLRSKESVECLRDALIRGVIDVVATDHAPHRNKSPFWHSAPNGMTGLEFSVSVIQKIFVNSGHLTWPEVVRIMSNKPAEILGMTPNTVKEGSAANFFLYNPDVTRFVTFDDSLGPSVNSPYAGMNLPGKVMYTFYEGRLVFEN

SEQ ID NO: 3373 - protein, 255 aa, Zea mays
MGHASAHAFIIASVFLPVDPRPSVHCRRYRHADQPIAIGFVSSLSLSLSLVMVRACLQAAVTVSRMMAPLKHVRGLEFAADVGYVDFLSRVNRVEEEARRNGSWDAPHPWLNLFVSARDIADFDRAVIKGMLADGIDGPMLVYPMLKSKWDPNTSVALPEGEVFYLVALLRFCRSGGPAVDELVAQNGAILRACRANGYDYKAYFPSYRGEADWARHFGAARWRRFVDRKARYDPLAILAPGQKIFPRVPASVAV

SEQ ID NO: 3374 - protein, 168 aa, Zea mays
MAAASSATSVHDFTVKDASGKDVDLSTYKGKVLLIVNVASQCGLTNSNYTELSQLYEKYKDQGFEILAFPCNQFGGQEPGTNEEIVQFACTRFKAEYPIFDKVDVNGDNTAPIYKFLKSSKGSLFGDNIKWNFSKFLVDKEGHVVERYAPTTSPLSIEKDIKKLLGSY

SEQ ID NO: 3375 - protein, 208 aa, Zea mays
MASDRVLGTVKWFNGTKGFGFITPDDGSEDLFVHQSSIKSDGYRSLNDGDAVEYTVGSGNDGRAKALDVTAPGGGPLAGGERPDGGNGGGRGGYGGGDRGYGGGGDRGYGGGGDRGYGGGDRGYGGGGDRGYGGDRGYGGGGGYGGGYGGGGGGGGRGCFKCGEEGHMARDCSQGGGYGGGGGGGRGSECYNCGQEGHISRDCPNKRR

SEQ ID NO: 3376 - protein, 151 aa, Brassica napus
  misc_feature (137)..(137): Xaa can be any naturally occurring amino acid
MAFPIDHSLADLTKLNLLPKPHGHASDMFPFRLSVFPRVHLSLRTSTSRVLSSLGSKVDPNGSVLIETTTPPEPSPDVTGGVQDVYGEDAATEDMPITPWSLSVASGYTLLRDPHHNKGLAFSQRERDAHYLRGLLXPTVISQDLQVKKMM

SEQ ID NO: 3377 - protein, 149 aa, Oryza sativa
MSLVRRSNVFDPFADFWDPFDGVLRSLVPATSDRDTAAFANARVDWKETPESHVFKADLPGVKKEEVKVEVEEGNVLVISGQRSKEKEDKNDKWHRVERSSGQFMRRFRLPENAKVDQVKASMENGVLTVTVPKAEVNKPEVKAIEISG

SEQ ID NO: 3378 - protein, 181 aa, Brassica napus
MASSMLSSAAVVTSPAQATMVAPFTGLKSSSAFPVTRKANNDITSIASNGGRVSCMKVWPPVGKKKFETLSYLPDLTEVELGKEVDYLLRNKWIPCVEFELEHGFVYREHGSTPGYYDGRYWTMWKLPLFGCTDSAQVLKEVQECKTEYPNAFIRIIGFDNNRQVQCISFIAYKPPSFTGA

SEQ ID NO: 3379 - protein, 304 aa, Glycine max
MANLPNSKLYGKEKMKGEQELEDEESFSRAMLLCSSVVVSMALQSATELGVFDVLQEAGAKLSAKEIASKLSCDNNPEADSMLDRLLALLASHSILNCSLILDHQNLGTFQRLYTITPVARFFARNSDGVSLGPLMALLQDKIFLHSWSELKDSIREGGIPFNRVYGTHAFEYPRLDARFNQVFNTAMINHTTIVMKKVLECYKGFENIKMLVDVGGGLGININLITSKYPHIQGINFDLPHVLEHAPSYPGVEHVGGDMFENVPKGDAIFMKWILHDWSDEYCLKLLKNCYDAIPDDGKVIVV

SEQ ID NO: 3380 - protein, 103 aa, uncultured Rickettsia sp.
IPQYIAKAKDKNDPFRLMGFGHRVYKNYDPRAAVLKETCKEVLKELEQLENNPLLQIAIELEAIALKDEYFIERKLYPNVDFYSGIIYKAMGIPSQMFTVLFA

SEQ ID NO: 3381 - protein, 267 aa, Saccharomyces cerevisiae
MSTSREDSVYLAKLAEQAERYEEMVENMKTVASSGQELSVEERNLLSVAYKNVIGARRASWRIVSSIEQKEESKEKSEHQVELICSYRSKIETELTKISDDILSVLDSHLIPSATTGESKVFYYKMKGDYHRYLAEFSSGDAREKATNASLEAYKTASEIATTELPPTHPIRLGLALNFSVFYYEIQNSPDKACHLAKQAFDDAIAELDTLSEESYKDSTLIMQLLRDNLTLWTSDMSESGQAEDQQQQQQHQQQQPPAAAEGEAPK

SEQ ID NO: 3382 - protein, 117 aa, Zea mays
NASGGAATAAALAANGTAPAGTAASAADSAVQALLQTCAAKYASARDALAGAGDSIALDDYDSASVHVSAAAEYPQVCRTLFRRQRPGQYPAELAAREETLGQLCSVSLDIIALLSS

SEQ ID NO: 3383 - protein, 496 aa, Schizosaccharomyces pombe
MSEDLFVSINFPNGKSVKQPIGLYINGEWHKSAETWETVDPSIEEVIAKVYLAGEKEIDYAVKSAKEAFKTWKKVPGSEKGELLMKLAELTEKHADTLAAIEAMDSGKPLVSNARGDVDGTIALLRYCAGWADKIYGQVIPTGPEKLAYAKRTPIGVCGQIVPWNYPLNMAGWKIAPALAAGNCIIIKSAETTPLSLLYFATLVEEAGFPKGVVNIISGLGTVAGSYMAKHPGIDKIAFTGSTKVGVIVQQLAASNLKAVTLECGGKSPFLVFEDADLDQAVKWAALGIMYNSGQICTSNSRIYVQDSVYDKFIELFKKHVIQDYIVGMPFDDNTVVGPVVNKTQYNRIKNYIEQGKKEGAKLVLGDEPLPLKQGYFISPTIFADCSENMTIVKEEIFGPVVAISKFKTEDEAIEKANNTTYGLAAMCFTKDLERAHRVSDELEAGMVFINSTENSDIQAPFGGIKMSGIGNELGSNGIEMYTQIKAVHINFNNKL

SEQ ID NO: 3384 - protein, 506 aa, Vibrio parahaemolyticus RIMD 2210633
MIYAQPGSENAIVNFKSHYDNFIGGEWVKPTGGEYFDNISPINGQAYCKVARSGEADINLALDAAHNIKAKWAKTSVTERSNILLKIADRIEQHLEELAVAETWENGKPVRETLAADLPLVVDHFRYFAGCIRAQEGSAAELDEHTASYHFPEPIGVVGQIIPWNFPMLMAAWKLAPALAAGCCVVLKPAEQTPTSILVLMEKIGDLLPPGVINVVNGFGSEAGQALATSNRIAKLAFTGSTQVGNHILKCAADNLIPSTVELGGKSPNIYFSDIFDYEDEYLDKCIEGTLLGFFNQGEVCTCPSRVLVHEAIYDKFVEKLTERAQLIKQGNPLDTDTQVGAQASQEQFDKILSYLEIGREEGAKVVFGGGVSEQPESISQGYYIQPTMLEGHNKMRIFQEEIFGPVIAITKFKDEAEALEIANDTEYGLGAGVWTRDANVAYRMGRNIEAGRIWINCYHAYPAHAAFGGYKKSGIGRETHKMMLDHYQNTKNLLISYSIDPLGFF

SEQ ID NO: 3385 - protein, 307 aa, Methanothermobacter thermautotrophicus str. Delta H
MLILNVNHMNITQGMGVAELIEEMGRSGVLGAGRVHRATKLLRGMIDDLEMAIFMSVAGPLVPGGMRRIIRDLIDDGTISALITSGANLTHDLLEAFGGAHYRDYGFDDEKLHQEGIGRIGDVYTRSEDFEVFESENQEIFSSIFSAKPHISIQELIHEIGGHLDDDMSIIRTAHLRGVPIYAPGLIDSMLGLQLWMYTQDNRICLDAVKDMHSLSDLVFSHERIGAIILGGGLPKHYTLASTLLRGGVDAAVQITMDRSETGSLSGAPLEEAKSWAKAQAGSNLVTVVGDATALFPVILAGALSEL

SEQ ID NO: 3386 - protein, 314 aa, Glycine max
MGAGDKTAAGMPRIGMGTAVQGPKPDPIRRAVLRAIEVGYRHFDTAAHYETEAPIGEAAAEAVRSGAVASRDDLFITSKLWCSDAHRDRVVPALRQTLRNLQMEYVDLYLVHWPVSMKPGRFKAPFTAEDFVPFDMRAVWEAMEECHRLGLAKAIGVANFSCKKLETLLSFATIPPTVNQVEVNPVWQQRKLREFCRGKGIQLCAYSPLGAKGTHWGSDAVMDAGVLQEIAASRGKSVAQVCLRWVYEQGDCLIVKSFDEARMRENLDVDGWELTEEEHRRIAEIPQRKINLGKRYVSEHGPYKSLEELWDGEI

SEQ ID NO: 3387 - protein, 178 aa, Triticum aestivum
  misc_feature (63)..(63): Xaa can be any naturally occurring amino acid
  misc_feature (77)..(77): Xaa can be any naturally occurring amino acid
  misc_feature (84)..(84): Xaa can be any naturally occurring amino acid
  misc_feature (91)..(91): Xaa can be any naturally occurring amino acid
  misc_feature (94)..(94): Xaa can be any naturally occurring amino acid
  misc_feature (111)..(111): Xaa can be any naturally occurring amino acid
  misc_feature (130)..(130): Xaa can be any naturally occurring amino acid
  misc_feature (132)..(132): Xaa can be any naturally occurring amino acid
  misc_feature (138)..(138): Xaa can be any naturally occurring amino acid
  misc_feature (147)..(147): Xaa can be any naturally occurring amino acid
MSSSPSFGLLALAAVLLALNLAQHGSLAATVGPRVIVVGAGMSGISAAKRLSEAGITDLLILXEATDHIGGRMHKTXFAGINVXFRPNWGXRAXNGGKMNPSGPSSIHLKXRNFRSRLRLLAQNFYKEDXGXYDEDYXKKRMNWADXVEEWGKTLALSRSARQFIHRLTTQPTAARAC

SEQ ID NO: 3388 - protein, 386 aa, Listeria monocytogenes EGD-e
MKHVFPTYKRFPIDLVNGTGTVVTDKNGKTYLDFTSGIAVCNLGHCPTNVAEAVQQQLGNIWHTSNLYECALQDSVAELIADGKERLVFFCNSGTESNEAALKLARKYTGKEKIITFEKSFHGRTFGSMSATGQAKIHQGFGELVPGFTYVPYNDIEAFRAEIDENTAAVMLEVIQAEGGVIPANAAFLLEVQLLCKKMGALLIIDEVQTGLGRTGTLYGFEQIGLDPDIFTLAKGLGNGLPIGAMVGKSDLISAFGPGSHGSTFGGNKLALAAAKEILLTMKQTGFLEEVNAKADYFRNLLEANLEVLDNVSDIRGGGFLIGIELENAAEPVITELRDKGLLILTAGTNVLRILPPLTVSYAEIDQAIYLLKSVLENQLIGSEEG

SEQ ID NO: 3389 - protein, 504 aa, Bixa orellana
MESTGRAPLGNGRIGNPGGLVVPEIKFTKLFINGRFVDNVSGQTFDTRDPRTGDVLATIAEADKDDLDLAVKNAREAFDHGPWPRMSGYERARIMTKFADLVEAFIEELAALDTADAGKTLSMGKAVDIPAAVQIMRYYAGAADKLHGQPLKMNQDTQGYTLKDPIGVVGHIIPWNYPTMMFFLKNAPALAAGCTMVVKPAEQTPLSALFYAHLARMAGVPDGVVNVVPGFGPTAGAAVSSHMDVDSVSFTGSQEVGRAIMRAAAQSNLKNVSLELGGKSPVIIFDDADVDMAVSLSQLACFTNKGEICVATSRVYVQEGIYDALVKKIVEAAREWRFDTKANMGPQVDKKQFERVLKYIDLGKREGATLLTGGKTNGDKGYYIQPTIFLDVREDMNIAQDELFGPVMALMKFKTVDEAIQKANCTKYGLAAGIVTKELNLANTVSRSIRAGAVWVNCYFGFDPDAPFGGYKMSGFGKDRGVLAIDQYLKAKTVNTAIPNSPWY

SEQ ID NO: 3390 - protein, 310 aa, Zygosaccharomyces rouxii
MVTLQNSTSTLKLNTGQTIPQVGLGTWRSKENEGYKAVIEALKAGYRHIDGAAVYGNEGEVGKAIQDSGVPRNEIFLTTKLWCTHQRNPQEALDQSLQRLGLDYVGLYLVHWPVPLRTENIKDGNLFQFAEKPDGSKDVDLEWNFIKTWELMQKLLESGKTKAIGVSNFSVNNLKDLLAAPTTKVTPAVNQVEFHPLLPQEELIQYCSEKGIVIEAYSPLGGENAPILSDPTVQEIAKANGVEAGHVVISWAVQKGLVTLPKSVTPSRIVGNLKVLTLSDSDVAKVDGLLKAKGERRTCYQDFSPFPIFQ

SEQ ID NO: 3391 - protein, 294 aa, Listeria monocytogenes EGD-e
MTKTLQDRMILPGNGTIPYIGLGVFQVTEQEFIAGAVEKAIEVGYRLFDTAAVYNNEAIVGQAIASSAVSREELFISSKVWNGDLGYDETLFAFERTLRNLKLDYLDLYLIHWPVAGKYRDSWRAMERLHDEKLIKSIGVANFKQHHLSDLLVAANEKPVLNQVETHPLLPQNDLRKYLVEQNIAHAAWSPLAKGILMQNPVITEIAKKHQASVDQVILQWHLNRNTIIFPKSITSSRIEENSRLSYFQLDASDMEKIDRLETGKRVGPDPDDLEYFLSSIERERAYLASENEE

SEQ ID NO: 3392 - protein, 289 aa, Zea mays
MEIFVLLRFRLQDNIGGGKVLFQGKSDYQNVMVFQSSTYGKVLVLEGVIQVTERDECAYQEMITHLPLCSIKDPKKVLVIGGGDGGVLREVSRHTSVEQIDICEIDKMVVDVSKQFFPHLAVGFEDPRVSLHIGDGVAFLKNAPEGTYDAVIVDSSDPIGPAQELFEKPFFQSVARALRPGGVVCTQAESIWLHMHIIEDIFVNCRQVFKGSVNYAWTTVPTYPSGVIGFMLCSTEGPAVDFQHPVFNIEEDEHSTKSKGPLKFYNSEIHTASFCLPSFAKRVIESKAS

SEQ ID NO: 3393 - protein, 164 aa, Candida albicans SC5314
MSSPKVIIVSSDNEKFPVEPKIAEKSILIKNMINDLHPDGLEEDFEIPTPNVRANVLCKVLEWCEHHKNTVFQDDEDEDAKKSVPVEEWDRNFLKVDQEMLYEIILAANYLNIKPLLESGCKMVAEMIKSKSPEELRRTFNIINDFSPEEEAAIRKENEWAEDR

SEQ ID NO: 3394 - protein, 194 aa, Brassica napus
  misc_feature (19)..(19): Xaa can be any naturally occurring amino acid
  misc_feature (71)..(71): Xaa can be any naturally occurring amino acid
  misc_feature (93)..(93): Xaa can be any naturally occurring amino acid
  misc_feature (111)..(111): Xaa can be any naturally occurring amino acid
  misc_feature (142)..(142): Xaa can be any naturally occurring amino acid
STHASEKLEGAPSMLSSAXVATSPAQAPWMLPFTGCEVHHVAIPQRTPRIATLMLLLSQAAGGRVSCMKAXHPLGKRKLETLSYLPDLTGAEXGIEADYLVRNKRMTCVEXQLEHGFVYREHGSTPAILRWPVIDTMRKLPXCGCTDYAQVLNEVQESMTEDPSPSIKIIGYDNNRQEQRISLIDYKPPSLTAA

SEQ ID NO: 3395 - protein, 302 aa, Triticum aestivum
MKTLLIVTILAMATTIATANMQVDPGYQVHWPQQQPFPQPQQPFCQQPQQTIPQPHQTFHHQPQQTFPQPQQTYPHQPQQQFPQTQQPQQPFPQPQQTFPQQPQLPFPQQPQQPFPQPQQPQQQFPQSQQPQQPFPQPQQQFLQPQQPQQSFPQQQQPLIQLSLQQQMNPCKNFLLQQCNPVSLVSSLISMILPRSDCQVMQQQCCQQLAQIPQQLQCAAIHSVVHSIIMQQEQRQGVQIRRPLFQLVQGQGIIQPQQPAQLEVIRSLVLRTLPTMCNVYVSPDCSTINAPFASIVVGIGGQ

SEQ ID NO: 3396 - protein, 178 aa, Glycine max
MASSMISSPAVTTVNRAGAGMVAPFTGLKSMAGFPTRKTNNDITSIASNGGRVQCMHVWPPIGKKKFETLFYLADPDDAQLAKEGEYPLKKGWIPCLEIQVEHRFVYREHNRAPRYYHGRLWTMWKLAMFGCTDASQGVKELQEAKTAYPNGFIRIIGFDNVRQVQWINFIGYKPPGF

SEQ ID NO: 3397 - protein, 197 aa, Oryza sativa (japonica cultivar-group)
MASERVKGTVKWFDATKGFGFITPDDGGEDLFVHQSSLKSDGYRSLNDGDVVEFSVGSGNDGRTKAVDVTAPGGGALTGGSRPSGGGDRGYGGGGGGGRYGGDRGYGGGGGGYGGGDRGYGGGGGYGGGGGGGSRACYKCGEEGHMARDCSQGGGGGGGYGGGGGGYRGGGGGGGGGGCYNCGETGHIARECPSKTY

SEQ ID NO: 3398 - protein, 378 aa, Oryza sativa (japonica cultivar-group)
MDPYTSRAPASGGVAAGDDDEEAACLQAFELMCIFTVPMTLKAAIELGLLDALAAAGDGRALTADELAAARLPDAAPDKAEAASSVDRMLRLLASFDVVKCSTEAGPGGEPPRRRYSPAPVCRLFTAGGNSHRGSLAPSVLFGVDEDYLCTWRQLAAAVGGGGPSAFERAHGMRMFEYMGTNRRLNTLFNQAMAQQSMIVIDKLLDRFHGFDGVGVLVDVGGGTGATLEMITSRYKHITGVNFDLPHVISQAPSIPGVKHIAGNMFESISNIGDAIFLKMILHMQNDEDCIKILKNCHQALPDNGKVIAVEIVLPTIPDLAQTARYPFQMDMIMLSNSRGGKERTELEFAKLATDSGFSGALRTTYILANYWVLEFSK

SEQ ID NO: 3399 - protein, 162 aa, Triticum aestivum
  misc_feature (58)..(58): Xaa can be any naturally occurring amino acid
  misc_feature (73)..(73): Xaa can be any naturally occurring amino acid
  misc_feature (78)..(78): Xaa can be any naturally occurring amino acid
  misc_feature (105)..(105): Xaa can be any naturally occurring amino acid
  misc_feature (126)..(126): Xaa can be any naturally occurring amino acid
  misc_feature (129)..(129): Xaa can be any naturally occurring amino acid
MAPSVMASSATTVAPFQGLKSTAGMPVARRSGNSSFGNVSNGGRIRCMQVWPIEGIKXFETLSYLPPLTVEDXLKAVXVPAPSNWVPCPDSSKGPVCPTVENHRXPGYYQRKYWTIWNCQGSVDRXTQXLKDPRRQKGSPILTVKLKLFNPKTPGSGEKPQK

SEQ ID NO: 3400 - protein, 214 aa, Listeria monocytogenes str. 4b H7858
MRFFIDTANVEEIKKANRMGFIAGVTTNPSLVAKEGRDFNEVIQEITSIVDGPISGEVVSLEADEMIAEGRVIAKIHPNMVVKIPMTGEGLAAVKVLTEEGIKTNVTLVFSATQALLAARAGATYVSPFLGRLDDIGDDGLVLIRDIADIFEIHGIPTEIISASVRHPIHVIECAKAGADIATVPFKVFEQMLKHPLTDSGIDKFLADWEAAKK

SEQ ID NO: 3401 - protein, 412 aa, Rickettsia hulinii
ELKIRGKIFKLPILKASIGEDVIDISRVSAEADCFTYDPGFMSTASCQSTITYIDGDKGILRHRGYDIKDLAEKSDFLEVAYLLIYGELPSGEQYNNFTKQVAHHSLVNERLHYLFQTFCSSSHPMAIMLAAVGSLSAFYPDLLNFKEADYELTAIRMIAKIPTIAAMSYKYSIGQPFIYPDNSLDFTENFLHMMFATPYTKYTVNPIIKNALNKIFILHADHEQNASTSTVRIAGSSGANPFACISTGIASLWGPAHGGANEAVINMLKEIGSSEYIPKYIAKAKDKNDPFRLMGFGHRVYKNYDPRAAVLKETCKEVLKELGQLDNNPLLQIAIELEAIALKDEYFIERKLYPNVDFYSGIIYKAMGIPSQMFTVLFAIARTVGWMAQWKEMHEDPEQKISRPRQLYTGG

SEQ ID NO: 3402 - protein, 371 aa, Oryza sativa (japonica cultivar-group)
MASGISRTPATGVTAGGGDDEEAAWLHALELISGFTVSMTLKAAIQLGLIDALTAAADGRALTAGELVAQLPAVDDAEAATSVDRMLRLLASFNVVRCSTEAGPGGDPLRRYSPAPVCRWFTAGDNHQGSLAPRLMLDVDEDNLSTWHQMAAAVVSGGPSAFERAHGMPLFEYMGTNHRFNMLFNQAMSQQSMMVMNKLLDRFHGFDGISVLVDVGGGTGVTLKMIISRYKHITGVNFDLPHVISQAPSLPGVNHVAGNMFESVPKGDAIFLKSMLLRNDEECIKILKNCHYALSDNGKVIVVDIVLPETPKPVPEAQNPLRMDVMMLNNLRGGKIRTEQEYAKLAMDSGFSGSFRTTYIFANFMAIELCK

SEQ ID NO: 3403 - protein, 105 aa, Lactococcus lactis
MLYGKENRDEAEFLEPIFGSESEQVDLPKYKLAQQSIEPRVAYQLVQDEMLDEGNARLNLATFCQTYMEPEAVKLMSQTLEKNAIDKSEYPRTTEIENRCVNMIA

SEQ ID NO: 3404 - protein, 120 aa, Davidia involucrata
MGRSGVVIKVGIVAVLMCMVVSAPHAEAAITCGTVTVSLAPCLNYLKKGGPVPPACCNGIKSLNAAAKTTADRQAACNCLKTASTSIAGINLSYASSLPGKCGVNVPYKISPSTDCSKVQ

SEQ ID NO: 3405 - protein, 267 aa, Oryza sativa (indica cultivar-group)
EPHDYIGLSAAAASPTPSSSSCSSSPNPGGEARGPRLTLRLGLPGSESPEREVAAAGLTLGPLPPTTTKAASKRAFPDSSPRHGASSGSVAAAAAACQDKAAPAAAPPAAKAQVVGWPPVRNYRKNTLAASASKGKGEDKGTAEGGPLYVKVSMDGAPYLRKVDLKMYSSYEDLSMALEKMFSCFITGQSGLRKSSNRDRLTNGSKADALQDQEYVLTYEDKDADWMLVGDLPWDLFTTICRKLKIMRGSDAAGIAPRSIEQSGQSR

SEQ ID NO: 3406 - protein, 289 aa, Oryza sativa (japonica cultivar-group)
MLRLLASCNVVKCSTEAGPAGEPLRRRYSPAPVCRWFTAGGNSHHGSLAPSVLFGIDEDYLSTWHQLAAAVGGGGAVAFERAHGAPMFEYMGTNRRLNTLFNQAMAQQSMIVINKLLDRFHGFDGVGVLVDVGGGTGGTLEMIMSRHKHITGVNFDLPHVISQAPSLPGVKHVAGNMFESIPNGDAIFLKSILHLQNDEDCIKILKNCHQALSDNGKLIAVEIVLPAIPEPVPTAQYPFQMDMIMLNNFRGGKERTELEFTKLAMDSSFSGTLRTTYIFANYWALEFNK

SEQ ID NO: 3407 - protein, 176 aa, Gossypium barbadense
LFSFILILTHFLLKSSIRIQVLGWICVAISVSVFAAPLNIMARVIRTESVEFMPFTLSFFLTLSAVMWFAYGLFIKDLCVALPNVLGFILGMLQMLLYAIYRHSEKVNIEEKKLPAEQMKSINVVLTTLGASEVHPVVLDIHTDDTKEEDNKNNEPTGEPDKQTDVKMEDANESPV

SEQ ID NO: 3408 - protein, 157 aa, Lactococcus lactis
FVDPELEWDFRLKNVISINTSGHKYGLVYTGVGWVLWRDKKYLPEELIFKVSYLGGELPTMAINFSHSASQLIGQYYNFVRYGFDGYKAIHERTHKVAMYLAEEIEKTGMFEIMNDGSQLPIVCYKLKENSNLGWNLYDLADRLFNEGMASACLSTS

SEQ ID NO: 3409 - protein, 195 aa, Sinorhizobium meliloti 1021
MSSSNFQRKRPVARDRKGNPSIDAMTTFQGTAMCDLFVRNATVVTEERTFDGGISVSNGRIDELVVGQRDIAAARQIIDASGLLLLPGLVDAHVHFSEPGRGHWEGFETGSRAAAAGGITTFVEMPLNAQPATIDAAALVMKKAAAKQSHIDYALWGGLVDDNLDDLADLRRGGVVGFYRERHCRGGGRGLAGAT

SEQ ID NO: 3410 - protein, 387 aa, Gibberella zeae PH-1
MPRLPFPAFKSLVIQPLRITPTAINRSYYSTMMRAARYYGREDIRVEQVPQPSVKAGQVKVAPAFVGICGTDLHEYLGGPNFCPTTPHPITKESIPVTLGHEFSGIITEVGPDVEGFEVGQPCAIQPTLFCGHCAACHNHAENVCHSGGFIGLSGSGGGLSESVCVNATHVHPLPQDLPLEIGALVEPLSVSWHAMTAAPDINPDSRVVILGGGPIGLAMILCLKAKGVDEIIVSEVATSRQKFARELGATWVVNPIEENLNEIVLALTEGKGADVVFDCAGVPMSIKSACEVVRPKGTVVNLAIWEKEIPFNPNWITMKESSYKSVLGYTHKDFQAVIANLASGAIKPSQMITRKIKLENIVEDGIKALIHDKNNQVKVLVDMSDR

SEQ ID NO: 3411 - protein, 317 aa, Methanosarcina mazei Go1
MDFGASAKNLSTPVKGAKIVPNMTVDELVKEYAGCAFGAGRLAEAVDIYYEMLASGKTTKFFGLAGAMTPAGMRNIIADLIRDGYIDVLVTTGANMVHDTVEALGLHHYKGSDCANDIQLRHECIDRIYDVYLPDQHFTDLEEFLQGVYSGLPQENLSIRQVLTEIGKNLDDDSSILKTAAEMGVPVYCPALQDSVIGLQAWLYKEGNPLHVDAFADMHEFMDICYGAESAGTMLLGGGVPKNYILQSMLVTPRSFDYAIQLTMDRPETGGLSGATLDEAQSWGKVGEDAKSVTVYADSTITLPLIVSAVRTRLSKR

SEQ ID NO: 3412 - protein, 125 aa, Triticum aestivum
MAETAVIAPPPQPMAPPQPVEENATAAPSQPMAPLQPMAESATAAPPPPNATQQPMVENATVVVVVPPPPPDGTTTFLCLILAFFIPPLGVFLKYKCEIEFWICLILTFLAYAPGIIYAVWVIVK

SEQ ID NO: 3413 - protein, 386 aa, Gloeobacter violaceus PCC 7421
MAKHRFLAGKKIDPQPIGAGISVSALIDNTFLAYNAGRLREAARLLVERMLRPGVTVGVTLSGALTPTGLGMAAIIPLMEAGFIDWIISTGANLYHDTHHGIGLDLRRGRADISDVVLREEGVVRIYDIFFDYDVLLSTDRFFREIFKAPEFQAAMGTAEFHYLAGKYIAERERQLGLENKSLLAAAYRLGVPIYTSSPGDSSIGMNIAAMALDGKGPRLDVSLDVNETAAIVLDAKRSGGESGVWILGGGSPKNFMLQTEPQIQEVLGIQEKGHDYFLQVTDARPDTGGLSGATPSEAVSWGKVDPDRLPDTVVCYVDSTIALPLLTAYALDNAESRPLKRLYDRRGEVMAKLKAEYEAAQAAGGRDHNVGEPAPEHISSQAAGR

SEQ ID NO: 3414 - protein, 336 aa, Triticum aestivum
  misc_feature (60)..(60): Xaa can be any naturally occurring amino acid
  misc_feature (82)..(82): Xaa can be any naturally occurring amino acid
MKTLLILTIIAVALTTTTANIQVDPSGQVQWPQQQQPFPQPQQPQQIFPQPQQTFPHQPXQQAFPQPQQTFLHQPQQQFPQXPQQPQQPFPQQPQQQFPQPQQPQQPFPQQPQQQFPQPQQPQQPFPQPQQPQLPFPQQPQQPFPQPQQPQQPFPQLQQPQQPLPQPQQPQQPFPQQQQPLIQPYLQQQMNPCKNYLLQQCNPVSLVSSLVSMILPRSDCKVMRQQCCQQLAQIPQQLQCAAIHGIVHSIIMQQEQQQQQQQQQQQQQQQGIQIMRPLFQLVQGQGIIQPQQPAQLEVIRSLVLGTLPTMCNVFVPPECSTTKAPFASIVADIGGQ

SEQ ID NO: 3415 - protein, 255 aa, Phytophthora infestans
MSVNVPTKILPSGARIPMIGLGVYQSEPGPETYNAILTSLKLGYRHIDTAEIYGNEEDVGRAVRDSGIPREEIFVTTKLFTTNWGYSKALAAGKASNDRLGIVYIYLYLLHAPGPPKERADTWRAVEDLREQETLRDIGVSNFNETLLATLRKTAHIKPAVNQVELHPWMMRQSLVNYQDGRPCLGLYCRRDRSYTRPSAGGVRRRQRIRDAAHRDRLKSNLESVKLKVTPEQVVKLASPDSYLRTAGCDQDRVM

SEQ ID NO: 3416 - protein, 513 aa, Glycine max
MIAYLEHFVHGNDTESMPNDDVSALDGAFHFGATAAAGKDFGGMKSVKPRAVIRPALAGDVERAVKEAARTTYLTVAARGNGHSINGQAMAEKGLVLDMRAMEDHFTLLSLDDGSLYVDVSGGALWEDVLKRCVSEFRLAPRSWTDYLGLTVGGTLSNAGVSGQAFRYGPQTANVTELEVVSGKGETLVCSESQNSELFFATLGGLGQFGIITRARVPVQQAPDMVRWIRVVYTEFGDFTRDAEWLVTLREGDGFDYVEGFVFVNSDDPCNGWTTVPVGPNQYFDPVRIPSTAGPVLYCLELALHYRNQDHPSAVDMEVDRLLGRLRFVEGLKFSVDVTYMEFLLRVKRVEEDAKANGIWDAPHPWLNMFVSKSNIAEFDREVFKKILKHGVGGPILVYPLLRSKWDSRHSVVVPDSNIFYIIALLRFIPPPPKGPPTELLVEQNHEIIQLCYNRGFDFKLYLPHYQSKENWMRHYGDKWSRFVERKANFDPLAILAPGQKIFSRIPQPLSIT

SEQ ID NO: 3417 - protein, 348 aa, Oryza sativa (japonica cultivar-group)
MVEQLRREISIMRMVRHPNVVGIREVLASRARVFVVMEYARGGELFAKVARGRLTEEHARRYFQQLVAAVGFCHGRGVAHRDLKPENLLLDEEGRLKVTDFGLAALPEQLRQDGLLHTQCGTPAYVAPEVLRKRGYDGARADLWSCGVVLYVLLCGFLPFQHENYAKMYQKIFKAEYQVPPWVSGDARRLIVRLLVVDPAKRISIPEIMRTPWFKKGFVPPVPTSPVSPKKWEEDDVLLDGGDSGAMSPRTCNAFQLISSMSSGFDLSGMFESEQKAATVFTSRAPAATVIQKLEAVGRSLGYSATRGKGWKLRLEATASVQRDVKSVGCISFSFFARGYVQAKSRDV

SEQ ID NO: 3418 - protein, 456 aa, Oryza sativa (japonica cultivar-group)
MARRAREEEADQVERKLVLGRYELGRLLGQGTFAKVYYGRDLRSGESVAIKVIDKARLRRTEGMVEQLRREISIMRMVRHPNVVGIREVLASRARVFVVMEYARGGELFAKVARGRLTEEHARRYFQQLVAAVGFCHGRGVAHRDLKPENLLLDEEGRLKVTDFGLAALPEQLRQDGLLHTQCGTPAYVAPEVLRKRGYDGARADLWSCGVVLYVLLCGFLPFQHENYAKMYQKIFKAEYQVPPWVSGDARRLIVRLLVVDPAKRISIPEIMRTPWFKKGFVPPVPTSPVSPKKWEEDDVLLDGGDSGAMSPRTCNAFQLISSMSSGFDLSGMFESEQKAATVFTSRAPAATVIQKLEAVGRSLGYSATRGKGWKLRLEATADGANGRLAVTVEALEVAADVAVVEFAHDAGDELEFNKFCAVDVRPGLADIVWAWQGDRPAAPDVAAATVECSPA

SEQ ID NO: 3419 - protein, 341 aa, Escherichia coli O157:H7 EDL933
MKALSKLKAEEGIWMTDVPVPELGHNDLLIKIRKTAICGTDVHIYNWDEWSQKTIPVPMVVGHEYVGEVVGIGQEVKGFKIGDRVSGEGHITCGHCRNCRGGRTHLCRNTIGVGVNRPGCFAEYLVIPAFNAFKIPDNISDDLASIFDPFGNAVHTALSFDLVGEDVLVSGAGPIGIMAAAVAKHVGARNVVITDVNEYRLELARKMGITRAVNVAKENLNDVMAELGMTEGFDVGLEMSGAPPAFRTMLDTMNHGGRIAMLGIPPSDMSIDWTKVIFKGLFIKGIYGREMFETWYKMAALIQSGLDLSPIITHRFSIDDFQKGFDAMCSGQSGKVILSWD

SEQ ID NO: 3420 - protein, 171 aa, Candida albicans SC5314
MGNELLSTARIYTFKIPDAYNNVIDFDQFKNKVILIVNVASLCGFTPQYKELQLLYEKYHERGLEILGFPCNQFGNQEPLQEEEIVESCRRNFGVSFPIMKKTKVNIDCDGHESELYKYLKSEKPGEVGFKGVRWNFEKFIVNRKGEVVARFNSLITPLQLEGFIEQLLSE

SEQ ID NO: 3421 - protein, 92 aa, Zea mays
MTMTSRFVAAASSSSSSCPLARLISRRGLAGAADGHGPAKVPLWKDPLSPSKWKEEHFVLASLSMWGALFYGGFKFFGGKKEDKIEVASGQT

SEQ ID NO: 3422 - protein, 405 aa, Thermoplasma acidophilum
MAYIQVKDDGTLQVPDRVTIGYIEGDGIGPDISKTTINVLNAALEIAYGGKRSIEWKKILAGDEAYDKTGDRLPQSSLDELKKCVVALKGPLTTPIGEGFRSLNVTLRQYLDLYANIRPVRYFPGVPSPVVHPEYMNMVVFRENTEDLYAGIEWRYDSDGPKKVREFLASTFNINLTADTGIGIKPISKFKSTRLVRKAIQYAIANKRKSVTLVHKGNIMKYTEGAFKEWGYEVAKTEFGNYTVTETEYLQDPEKYSNKIVIKDRITDNMFQQVLTRTQEYDVIATPNLNGDYLSDALAAQVGGIGLAPGANIGDHYAVFEAVHGTAPKYAGMDVANPTSLILSGEMMLQHIGWNEAANILDEAIMQTYKDQKLTQDIARLLNVKALKCSEFGEEIINRMKKPVH

SEQ ID NO: 3423 - protein, 307 aa, Pseudomonas aeruginosa PAO1
MTSKLEQLKQYTTVVADTGDFDAIARLKPVDATTNPSLLLKAAALPRYAEHLRQATAGSGGDAGLACDRFAVAVGKDILGVIPGRISTEVDARLSFDSEATLARAHRLIELYDEQGIDRERVLIKIASTWEGIRAAEILEREGIQTNLTLLFSFAQAVACADAGVFLISPFVGRIYDWYKKSENRDYAGAEDPGVQSVSRIYRYYKANGYKTVVMGASFRNLGQIEQLAGCDRLTISPDLLQQLADAQGELPRLLLPGEGEPRQVLDESAFRWQMNEDAMATEKLAEGIRLFARDQEKLEYQLATRH

SEQ ID NO: 3424 - protein, 339 aa, Ustilago maydis 521
MAANIPSFTLNTGAKLPSVGMGCWQGQPGPGRDNELVDALVRAIKVGYRHLDTATGYRNEAEVGQAVRQSGVARSEIFVTTKLRPGGVHDVVQELENSLNELGIDYIDLWLLHWPQGFTKDDGGFGTGESFGLEHQKHLGPTFNETWAKMEDVFLNSHKGKVKAIGVSNFSIKNLEILAKTSKVTPAVNQIEAHPYLPEHELVKYCKHKSIHVTAYSPLGQYNASIHEDKDLNEIAKKHDVTAATVALSWAVQRGTSVAPKSTNEKRMKQNITLIKLTDEEMKQVDVISQDPTRSTRLNYFVVNKETGTVLGWTMDEMGWEVGFLEEPGKSTKRIAERK

SEQ ID NO: 3425 - protein, 381 aa, Staphylococcus aureus subsp. aureus MRSA252
MLTEQEKDIIKQTVPLLKEKGTEITSIFYPKMFKAHPELLNMFNQTNQKRGMQSSALAQAVMAAAVNIDNLSVIKPVIMPVAYKHCALQVYAEHYPIVGENLLKAIQDVTGLEENDPVIQAWAKAYGVIADVFIQIEKEIYDQMMWIGFKPFKITNIKQESEDIKSFTVETDAYDFSQYVPGQYITVDVSSDKLPYRAKRHYSIVSGDKNHLTFGVKRDVTTEHEGEVSTILHDEIKEGDMINLAAPVGGFVLENTTEPQLFLGSGIGVTPLVAMYEAASAKGLDTQMVQVAENEQHLPFKDNFNSIANHYDNAKLYTHLKGEQGYIGAEELKAFLANKPEIYICGGTKFLQSMIEALKSLNYDMDRVHYETFIPRLSVVV

SEQ ID NO: 3426 - protein, 455 aa, Mycobacterium tuberculosis H37Rv
MSTTQLINPATEEVLASVDHTDANAVDDAVQRARAAQRRWARLAPAQRAAGLRAFAAAVQAHLDELAALEVANSGHPIVSAEWEAGHVRDVLAFYAASPERLSGRQIPVAGGVDVTFNEPMGVVGVITPWNFPMVIASWAIAPALAAGNAVLVKPAELTPLTTMRLGELAVEAGLDEDLLQVLPGKGTVVGERFVTHPDIRKIVFTGSTEVGKRVMAGAAAQVKRVTLELGGKSANIVFHDCDLERAATTAPAGVFDNAGQDCCARSRILVQRSVYDRFMELLEPAVHSIVVGDPGSRATEMGPLVSRAHRDKVAGYVPDDAPVAFRGTAPAGRGFWFPPTVLTPKRGDRTVTDEIFGPVVVVLTFDDEADAISLANDTAYGLSGSIWTDDLSRALRVARAVESGNLSVNSHSSVRFNTPFGGFKQSGVGRELGPDAPLQFTETKNVFIAVGEEM

SEQ ID NO: 3427 - protein, 279 aa, Crocosphaera watsonii WH 8501
MPFIQWYPGHIAKAERQLKEQLNRVDVIFEVLDARIPLASHHPDVPGWIGDKPRLVVLNRTDMIPESVRQGWLNWFAAQGETLYCTNAKQGKGIKALKKAAQAAGVQMNERRQQRGMRPRAVRAVVIGFPNVGKSALINRLLGRKVAASARRAGVTRQLQWIRISDALELLDAPGIIPAKLENQEDAVKLAICEDIGEAAYDNQQIGAALIDLLVELNFDNILSSRYQLDPQNITGEEYIESLGNSKFKGDTERATMQLLNDFRKGVMGKIPLELPQLI

SEQ ID NO: 3428 - protein, 323 aa, Gibberella zeae PH-1
MSSALDQLKATGTTVVSDSGDFASIGKYKPQDATTNPSLILAASKKEEYAKLIDVAIDYAKQKGGSVDQQVDDALDRLLVEFGKEILKIIPGKVSTEVDARYSFDTEASVNKALHLIELYGEQGISKDRILIKIAATWEGIKAAEILQRDHGINTNLTLMFSLVQAIGAAEAGAYLISPFVGRILDWFKASTKKEYTKEEDPGVLSVKQIFNYYKKFGYNTIVMGASFRNTGEITELAGCDYLTISPNLLEDLLNSSDSVPKKLDASQASSLDIEKKSYIKDEALFRFDFNEDQMAVEKLREGISKFAADAVTLKGILKEKLS

SEQ ID NO: 3429 - protein, 497 aa, Gibberella zeae PH-1
MGSRMTPEAIKPVMLIDGQANACLIQLVGASDGNSFPLFNPATGEKVADVPEATEDDTNRAVAAAQRAFPEWSAMDPAKRGSYLKKLASLIKEHNEELALLEAKSMGRPLAEFFEGHIAASSYEHYAEAWPHIQGQASLNTPGYVTMTLRQPFGVVAAIIPWNASLLFFASKSAPALIAGNTVVVKSSEKAPLGAAKFAELIHKAGFPPGVFNVLSGHGNPSGATLASHMDVRAISFTGSSPTGRAIQEAAAKSNLKKVILELGGKSPVIIFDDADLEQAAKDTMYSIQWNSGQVCMANSRVYVQDSIADNFIQACKKALSAAKSGNPTEKGINHGPQADKVQYEKVMSYINEGKKSGTLELGGNGNLDKTGGFFVEPTIFLNTPEDAKVMKEEIFGPVVNINVIKTEEEAIEKANDTEYGLYAAVYTKNVDRAMRVTQKLNSGYVGINCTSPTTARDLPFGGYKSSGQGREGWLYSLDNFLEVKSVMMKVDSGSKL

SEQ ID NO: 3430 - protein, 466 aa, Sinorhizobium meliloti
MDTRPEPFEPPAPVPRTGIPSRLEIIRTVLRNPLELWGEPSYTLPWIETKFINQRTLIVNDPGLIRYILVENAANYEMSNVRRLILRPILRDGLLTAEGEVWKRSRKAMAPVFTPRHAQGFAGQMLRVCEAFVDRYAGASSEPFVTNVAVDMTELTFEILAETLFSGEIAVEKQGFAANVEELLHRMGRVDPMDLLVAPSWVPRLTRIGGRKVLDRFRGVVSETMSLRRRRTTEAPGDVPNDFLTLLLQLEGPDGLSTSEIEDNILTFIGAGHETTARALAWCFYCVANTPAYRETMEQEIDSVLASGADPVDWLGRMPHVLAAFEEALRLYPPAPSINRAAIEEDAWTSPEGERVPIRKGISVLVMPWTLHRHALYWQKPRAFMPERFLPENRDKINRFQYLPFGAGPRVCIGATFALQEAVIALAVLMHRFRFDLTDETHPWPVQRLTTQPRGGLPMKVSARVK

SEQ ID NO: 3431 - protein, 205 aa, Populus euramericana
TFDVNTKTGGPFGTIRHPDELAHGANNGLDIAVRLLEPLKEQFPNLSYADFYQLAGVVAVEITGGPEVPFHPGRPDKSDPPPEGRLPDATKGSDHLRDVFGHMGLSDKDIVALSGGHTLGRCHKERSGFEGPWTPNPLVFDNSYFKELLSGEKEGLIQLPTDKTLLEDPVFRPLVEKYAADEDAFFADYAEAHMKLSELGFAEAY

SEQ ID NO: 3432 - protein, 226 aa, Triticum aestivum
  misc_feature (58)..(58): Xaa can be any naturally occurring amino acid
  misc_feature (70)..(72): Xaa can be any naturally occurring amino acid
WYYLKDAVLDGGIPFNKAHGMSAFEYHGTDPRFNRVFNEGMKNHSIIITKKLLELYKXGFNGLDTLVDVXXXGIGATVGAITAHYPTVKGINFDLPHVISEAPPFSGVTHVGGDMFQKIPSGDTILMKWILHDWSDEHCATLLKNCYDALPAHGKVVLVECILPVNPEATPEAQGGFHLDMIMLAHNPGGRERYEREFEALAKGAGFGAIKTTYIYANIWVIEFTK

SEQ ID NO: 3433 - protein, 434 aa, Exiguobacterium sp. 255-15
MLARAVEYLEKDEQANVEFVFWVNPDYIGEYDARQQYFFQALEHFAKNCKTHDMPIRFIEGQEKDFLEATEMADVLLFNAEYVEPFKSRDDGIMKKRGDKKTERLLDRHLLHPHAVKKNDGSYYKVFTPYKNAFLKKDVDKPYPVKLNLLKERYHKRRQNNAFMLDYFKRAASDTDFAVGEETARKRLRSFLKNNLSAYEEQRDLPAVDGTSLMSRYLRTGEIGIRTIFDAVQQEQDSKGKQTYLTELIWREFYYTILMHYPESKRLPVNEQYTKIEWETDEKGFKAWAEGKTGYPIVDAAMRQLNTTGWMHNRLRMIVASFLTKDLLVDWQKGERYFQQKLVDYEAASNIGGWQWAASVGTDAVPYFRVFNPTTQSKKFDKDGTFIRTYLPELKDLPKTSIHEPTEQQRKDYDYPMPIVEHDMARKRAIARFK

SEQ ID NO: 3434 - protein, 268 aa, Triticum aestivum
  misc_feature (218)..(218): Xaa can be any naturally occurring amino acid
  misc_feature (249)..(249): Xaa can be any naturally occurring amino acid
RRFLIFVLAMTMSIITTARQLNPSEQELQSPQQPVPKEQSYPQQPYPSHQPFPTPQQYSPYQPQQPFPQPQQPTPIQPQQPFPQRPQQPFPQPQQQLPLQPQQSFPQPQHPIPQQPQQSFPQQPQRPEQQFPQQPQQIIPQQTQQPFPLQPQQPFPQQPQRPFAQQPEQIISQQPFPLQPQQPFSQPQQPFPQQPGQIIPQQPQQPSPLQPQQPFSQXQPQRPQQPFPQQPTTINSSGTHNKPFPLQPXQPGPQTNKKDHFGQQPKTN

SEQ ID NO: 3435 - protein, 341 aa, Schizosaccharomyces pombe
MSQTTTETIIPLDSSVKDKLDPEYVNFYNKYVCSNLPIVKTHTYPVDFLRNNGNVMPGQSELLPVESTEDITIPRKHTKAPSGVPSRIFRPHGTAPEGGWPCFLWFHGGGWVLGNINTENSFATHMCEQAKCVVVNVDYRLAPEDPFPACIDDGWEALLYCYENADTLGINPNKIAVGGSSAGGNIAAVLSHKVAASPANFPPLVLQLLVVPVCDNTANAKTHKSWELFENTPQLPAAKMMWYRRHYLPNEKDWSNPEASPFFYPDSSFKNVCPALICAAGCDVLSSEAIAYNEKLTKAGVESTIKIYEGCPHPVMAMDAVLEKGRILNKDATNALLAAFA

SEQ ID NO: 3436 - protein, 112 aa, Populus deltoides x Populus maximowiczii
TFVGKKWFVTYHAYAMGRMESIWGKNCRDFVPERWLENGIYRQESPFKFPVFHAGPRMCLGKDMAYIQMKSIAASVIERFEIDVQNKEKCPDHLLSLTLRMKGGLQVKVKER

SEQ ID NO: 3437 - protein, 490 aa, Zea mays
MAREQLEESIVADGNGKEEEVGVMGIGAADGADDQHGGGKLSMKSLLWHGGSVWDAWFSCASNQVAQVLLTLPYSFSQLGMLSGVLLQIFYGFLGSWTAYLISVLYVEYRSRKEKEGVSFKNHVIQWFEVLDGLLGPYWKAAGLAFNCTFLLFGSVIQLIACASNIYYINDRLDKRTWTYIFGACCATTVFIPSFHNYRIWSFLGLGMTTYTAWYLAIAALLNGQAEGVAHSGPTKLVLYFTGATNILYTFGGHAVTVEIMHAMWKPAKFKYIYLLATLYVFTLTLPSSAAMYWAFGDELLTHSNAFSLLPKTRWRDAAVILMLIHQFITFGFACTPLYFVWEKVIGMHDAKSIFKRALARLPIVVPIWFLAIIFPFFGPINSAVGALLVSFTVYIIPALAHVLTYRTASARMNAAEKPPFFLPSWTGMFVLNMFIVVWVLVVGFGLGGWASMVNFVRQIDTFGLFAKCYQCPKPPVPAAAQSPAPLPHH

SEQ ID NO: 3438 - protein, 373 aa, Thermosynechococcus elongatus BP-1
MGSWPSWDCSASSCNGWPNPWGSAMKAAVLYGKEDVRIETVPDPTPGPGEVVIRVRAATTCGTDLKVWRRGGHARMLTPPILFGHEAAGEIVALGAGVTGWQVGDRVVANNSAPCGQCFYCQRQAFSLCPHLEFNNGTFAEYLKLPASIVRQNLLPIPESLPFALAALTEPLACVLHGVARSGFDPAMVATWPSPPQIVVLGDGAIGLMFVGVLAQQGARVLAFGGSNQRLAIATTFGAEQTINHHQCGDIPAVVKDWTEGRGADIVIEATGVPEVWETAIACGRPGATINLFGGCPRETTIRVDTERLHYEELTLKGVFHNTPSFVRQALQLIASGTLPFEKLISGQAPLMEIETVLQAMKARQVIKVALQP

SEQ ID NO: 3439 - protein, 251 aa, Zea mays
MAAKCYPTVSDEYLAAVAKAKRKLRGFIAEKNCAPLMLRLAWHSAGTFDVATKTGGPFGTMKCPAELAHGANAGLDIAVRLLEPIKEQFPILSYADFYQLAGVVAVEVTGGPEVPFHPGRQDKPEPPPEGRLPDATQGSDHLRQVFSTQMGLSDQDIVALSGGHTLGRCHKERSGFEGAWTANPLIFDNSYFTELLSGEKEGLLQLPSDKALLSDPSFRPLMQRYAENEDVIFAEYAEARLKLSLWGFGQV

SEQ ID NO: 3440 - protein, 177 aa, Plantago major
MASSMLSTSSTAVAGRAQATMVAPYAGLKSTSVFPATRKTGNAKLARNAGKVRCMQVWPPLGKKKYETLSYLPDLTVEQLAKEIDYLLRSKWIPCLEFELEHGFVYRENNRSPGYYDGRYWTMWKLPMFGCTDASQVIAELEECKKEYPNAWVRIIGFDNVRQVQCISFIAAKPPGL

SEQ ID NO: 3441 - protein, 285 aa, Zea mays
  misc_feature (153)..(153): Xaa can be any naturally occurring amino acid
MLWKEADSKPDWVKDLDVVGENFEERWLKASKRSAAKKLSKLSRSHNESLLWIKKIPDIIAIDDEIYSNDDDPERWDMQIFRSIDSNSVKGFPKDPREATSKNLVFGKNVLIDMSVHTAYVNVIRGAQHFIYIENQYFLGSSFNWDSHRDVEXTMQMMYEIIYKALKEVGLDGTYEPQDYLNFFCLGNREAEDTTCTSSGPFSASNPQDQARKNRRFMVYVHSKGMIVDDEYVIIGSANINQRSMEGTRDTEIAMAAYQPQHTWANMLSAPRGQIFGYRKIQCTC

SEQ ID NO: 3442 - protein, 404 aa, Oryza sativa (japonica cultivar-group)
MEGKGVLEGRYEMGRVLGHGNFGRVHAARDVRTGRAVAMKVVSKDKVERAGMAEQIKREIAVMKMVSHPSVVELHEVMATRTKVYLALELVRGGELFDRIARHGRVGEGVARRYFRQLVSAVDFCHGRGVYHRDLKPENLLLDEAGNLKVADFGLSALACHARPDGLLHTACGTPAYVAPEVLAGNGYDGAKADLWSCGVILYVLLAGALPFQDDNLVCMYRKMRRGDFCCPPWVTTDARKLIKSLLDPNPGTRITVAGLLETPWFRKTAPVPRPIIADPAAAPVDTRGNAGDDKDEPPEVLNAFHLISLSEGFDLSPLFEHDPAASPGRATARAGGTRFATREAASGVVARLEALAMGGARVAPSLLMVDVKKDGGDAMEYRPFFSEELRPALKDIVWSPAAT

SEQ ID NO: 3443 - protein, 242 aa, Zea mays
FGSRWPEGVPTAASVQEILFFQAQTMEMMYKIIADELKATDNKDMHPEDYLNFFCLGNREEPPSNGSPESEKSTDKSAAALASKYRRFMIYVHAKGMIVDDEYVILGSANINQRSLAGSRDTEIAMGAYQPHYAWSTKNGHPHGQVYGYRTSLWAEHLGTVDDRFKDPSSLECVRFVNQIAVENWQRFTAEEMSTLQGHLLKYPVKVEADGKISPLSDQECFPDVGGKILGAPTSLPDSLTM

SEQ ID NO: 3444 - protein, 84 aa, Glycine max
MEYQRQRSHQSQGRSRWVPASYFSFESLLLLSCLTASLLILPLLLPPLPPAPFLLLLLPIAILLVLIISAFMPSNVRDITQKKK

SEQ ID NO: 3445 - protein, 486 aa, Bacillus firmus
MNSGVHVGNSDSLKAVWFRRDFRLHDHTALKHAIEAIEKHGGKWLAFFYLDPKTASVEPVHHDYFFQTVMQFKQMLKTNGGDLYIITGTIEGGQLSKLLQAFPEIDAVYANDDRVGDGRLRDEAAEHFLAKQSIPFYTFEDAYLTEPDQVLKKDGTPYKVFTPYYKAWAKERKRTPAVIKRDVLLGSVHKGTAPDREAETLFNNLIKKCSYDWSAIGEEHAIKRLQMFTKKRLSGYKANRDFPSITGTSRLSPYIKTGAVSSRSIYYHILNAEADSYSAETFLKELAWRDFYRMVHFYEPDCKDREIMEGYRELNWSHDQDDLTSWKRGETGFPIVDAGMRQLLNEGWMHNRLRMITASFLTKDLLIDWRLGERYFERMLIDYDPSSNIGGWQWAASVGTDAVPYFRIFNPVTQSKRFDENGTYIRTYIPELNHVPDHYIHEPWKMSEEEQVKYKCRLDEDYPLPIVDHSKQRKKALSFFKGDDEE

SEQ ID NO: 3446 - protein, 240 aa, Zea mays
GVAMEGDDDGPEWMMEVGGAGATGKGKGGALDKNKKRFSEEQIKSLESMFATQTKLEPRQKLQLARELGLQPRQVAIWFQNKRARWKSKQLERDYSALRDDYDALLCSYESLKKEKHTLLKQLEKLAEMLHEPRGKYSGNADAAGAGDDVRSGVGGMKDEFADAGAAPYSSEGGGKFAHFTDDDVGALFRPSSPQPSAAGFTSSGPPEHQPFQFHSGCWPSSTEQTCSSSQWWEFESLSE

SEQ ID NO: 3447 - protein, 498 aa, Oryza sativa (japonica cultivar-group)
MATCAADLAPLLGPVAANATDYLCNRFADTTSAVDATYLLFSAYLVFAMQLGFAMLCAGSVRAKNTMNIMLTNVLDAAAGALFYYLFGFAFAFGTPSNGFIGKQFFGLKHMPQTGFDYDFFLFQWAFAIAAAGITSGSIAERTQFVAYLIYSAFLTGFVYPVVSHWIWSADGWASASRTSGPLLFGSGVIDFAGSGVVHMVGGVAGLWGALIEGPRIGRFDHAGRSVALKGHSASLVVLGTFLLWFGWYGFNPGSFTTILKTYGPAGGINGQWSGVGRTAVTTTLAGSVAALTTLFGKRLQTGHWNVVDVCNGLLGGFAAITAGCSVVDPWAAIICGFVSAWVLIGLNALAARLKFDDPLEAAQLHGGCGAWGILFTALFARQKYVEEIYGAGRPYGLFMGGGGKLLAAHVIQILVIFGWVSCTMGPLFYGLKKLGLLRISAEDETSGMDLTRHGGFAYVYHDEDEHDKSGVGGFMLRSAQTRVEPAAAAASNSNNQV

SEQ ID NO: 3448 - protein, 189 aa, Glycine max
  misc_feature (142)..(142): Xaa can be any naturally occurring amino acid
MAINHETWAFVFGLLGNVISFMVFLAPLPTFYQIYKKKSTEEFQSLPYVVALFSSMLWIYYALVKKDASLLLITINSFGCVIETIYLAIFLIYAPSKTRLWTIKLLLMLNVFGFGAMLLSTLYLTTGSKRLTVIGWICLVFXISVFAAPLCIIKRVIKTKSVEFMPFSLSFFMTINAGMWYFYGLLLKD

SEQ ID NO: 3449 - protein, 143 aa, Triticum aestivum
  misc_feature (58)..(58): Xaa can be any naturally occurring amino acid
  misc_feature (72)..(72): Xaa can be any naturally occurring amino acid
  misc_feature (82)..(82): Xaa can be any naturally occurring amino acid
  misc_feature (124)..(124): Xaa can be any naturally occurring amino acid
  misc_feature (142)..(142): Xaa can be any naturally occurring amino acid
MAPTVMASSATSVAPFQGLKSTAGLPVSRRSSSAGLSSVSNGGRIRCMQVWPIEGIKXFETLSYLPPLSTEXLLKQVDYLIXRSKWVPCLQFNKVGSFSRGAKQFPPGNTMGQYWAMWELPMFXGCTDATQVLNEWRRSKKXT

SEQ ID NO: 3450 - protein, 351 aa, Streptococcus agalactiae 2603V/R
MRAATYLSANELSLTDKAKPQVIKPTDAVVRLVKTTICGTDLHILGGDVPACKPGTTLGHEGIGIVEEVGSAVNHFKVGDKVIISCVTACNTCYYCKHQLPSHCEDGGWILGHLIEGTQAEYVHIPHADGSLYHAPEGVCDDALVMLSDILPTSYEIGVLPSHIKPGDTVCIVGAGPIGLSALLTAQFYSPAKIIMVDLSQKRLEASKKFGATHTILSTSTQEVKEEIDKITKGRGVDVVLECVGYPATFDICQNVVSIGGHIANVGVHGKPVEFNLQDLWIKNITLNTGLVNANTTEMLLEVLETGKIDATQLVTHHFKLSEIEEAYKVFKAAEENNTLKVIIENDITPA

SEQ ID NO: 3451 - protein, 379 aa, Leptospira interrogans serovar Lai str. 56601
MNLNGAELMIRFLEFAGVEIVSGIPGGASLPIYDALYESKIRHILARHEQGAGFIAGGMARANGKPGVCFASSGPGVTNLITAVADAKMDSIPLIVITGQVPVSMIGTDAFQEIDTFSLSVPITKRSYLVKKIEDLIQILPQAWKTAIEGRPGPVWIDVPKDVASAKIDWDISREKEIWNIQKIEFKDTIDLEWKKTFKELLSKAKKPVFYIGGGLNRPLAAELFCILLEKLNFPTVSTLMGLGICPYEHPRFLGMLGMHGSRAANLVLEEADLLVALGVRFDDRATGKLNEFCPNAKIVHVDIDATEIGKLKNPNLFLKHGVENFITQILEEDLSSEHLSSEEWLNQVQTLKTLYGFSIPKRIKFYIRFRFYKVSRTF

SEQ ID NO: 3452 - protein, 452 aa, Mesorhizobium sp. BNC1
MSDFDLVLSGRVVLPDVVVENGYVAVRDGRVEHVGKGDAPSARERHVLGNALILPGAIDAQVHSLSQKHQEDFIWSTRSAAAGGVTTIVDMPYDEGNLVCSAAAVRKKVDHASSQARVDFALYGTIDPMEGPARIAEQAEAGVAAFKFSTFGTDPVRFPRISPALLEECFVAVAKTGLTAGVHNEDDEMVHHAMARVKAAGISDYRAHAMSRPPLTELLATLQIYEIGAQTGCPAHVVHCSLSRGYEIARSYRDQGYAATIEACIHYLTLDEDNDVKRLGGKAKINPPLRPRAEVEKLWEHVRRGNVTLVSTDHVSWSENRKNNSDMLANSSGVPGLEVMVPLFVKGALARDIPLTWAAKLMAESPARHFRIDHAKGALTAGRDADITVLFPRPKIYDAAESGHNVVGWSPYNGIELPWTVGLTYLRGRQVFDGTETAAPGTGRFVRPEARH

SEQ ID NO: 3453 - protein, 351 aa, Staphylococcus aureus subsp. aureus MRSA252
MKALVKTREGHGNLELLDKEVATPLDDKVKIKVHYAGICGTDIHTYEGHYKVNFPVTLGHEFSGEIVEVGADVKDFKVGDRVTSETTFYVCNECEYCESKDYNLCNHRKGIGTQVDGAFTNYVIAREESLHHIPDEVSYQSAAMTEPLACAHHGVSKIQVNSGDVAVVMGPGPIGLLVAQVLKSKGATVVVTGLDNDKVRLDKAEALHMDYVVNLQQTDLKTYINGITDGYGADVVVECSGAVPAARQGLDILRKKGFYSQIGIFKDAEITFDMEKVIQKEITVVGSRSQKPADWEPSLQLMADGLVNAEALVTKIYDISKWDEAYQHLKSGEGIKALLKPLDLDENEGEN

SEQ ID NO: 3454 - protein, 415 aa, Spinacia oleracea
MASFTTTTAAAASRLLPSSSSSISRLSLSSSSSSSSSLKCLRSSPLVSHLFLRQRGGSAYVTKTRFSTKCYASDPAQLKNAREDIKELLQSKFCHPIMVRLGWHDAGTYNKDIKEWPQRGGANGSLSFDVELRHGANAGLVNALKLLQPIKDKYSGVTYADLFQLASATAIEEAGGPTIPMKYGRVDATGPEQCPEEGRLPDAGPPSPAQHLRDVFYRMGLDDKDIVALSGAHTLGRSRPERSGWGKPETKYTKDGPGAPGGQSWTAEWLKFDNSYFKDIKEKRDADLLVLPTDAALFEDPSFKVYAEKYAADQEAFFKDYAEAHAKLSNQGAKFDPAEGITLNGTPAGAAPEKFVAAKYSSNKRSELSDSMKEKIRAEYEGFGGSPNKPLPTNYFLNIMIVIGVLAVLSYLAGN

SEQ ID NO: 3455 - protein, 220 aa, Glycine max
SDGKTFYCLEMAKYFNPGEAEAMNQSVAYLLSKLSYIPSTLFLSEVSYVEFLDRVHVSEKKLRAQGLWEVPHPWLNLLIPRSEIHNFAEEVFGNILKDTNNGPILIYPVNQTRWNSKTSLITPEEDIFYLVAFLSLALPNSTGADSLEHILAQNKRVIDFYTGAKMRVKQYLPHYSTQEEWQVHFGSRWETFVERKRAYDPLALLAPGHKIFQKAVSSSC

SEQ ID NO: 3456 - protein, 119 aa, Populus deltoides x Populus maximowiczii
AGDMFQAVPPAEAILLKCILHDWSDEDCVKILKRCKQAIMSEGQQKAGKVIIIDMVRENQNGDEGSIETQLIFDLAMMVVVSGVERNEKEWAKLFFDSGFLNYKIHPVPGTRAVIELYP

SEQ ID NO: 3457 - protein, 347 aa, Staphylococcus aureus subsp. aureus MRSA252
MKALKLYGVEDLRYEDNEKPVIESANDVIVKVRATGICGSDTSRYKKMGPYIQGMPFGHEFSGVVDAIGSDVTHVNVGDKVTGCPAIPCYQCEYCLKGEYARCEKLFVIGSYEPGSFAEYVKLPAQNVLKVPDNVDYIEAAMVEPSAVVAHGFYKSNIQPGMTVAVMGCGSIGLLAIQWARIFGAAHIIAIDIDAHKLDIATSLGAHQTINSKEENLEKFIENHYANQIDIAIESSGAKVTIGQILTLPKKGGEVVLLGIPYDDIEIDRVHFEKILRNELTVCGSWNCLSSNFPGKEWTATLHYMKTKDINVKPIISHFLPLEKGPETFDKLVNKKERFDKVMFTIY

SEQ ID NO: 3458 - protein, 121 aa, Exiguobacterium sp. 255-15
MAFNKEQFIEDLKGMTVLELNELVKTIEEEFGVSAAAPVAAAGAGAAAAEEQTEFDVILTSAGSGKINVIKAVRELTGLGLKEAKALVDGTPAPVKEGVSKEDADAIKAKLEEAGASVEVK

SEQ ID NO: 3459 - protein, 426 aa, Aquifex aeolicus VF5
MNKTTFENVYYWEGKAQIPQEGQFIKLKEDKTLEVPDNPIIPFIEGDGIGPEITQAMLLIINTAVEKTYNGSKKIYWVELLAGDKAEEKTGERLPQETLDVLKESIVGIKGPLGTPVGKGVRSINSALRRAFDYYSAVRPVYWMGQATPIPNPERVDLVVFRENTDDVYAGVEFFAGTPEAKKVREFLIKEMGAKEEGFPEDVGITVKPMSEFKTKRHVRKALRYALENNKKNVAVIGKGNIMKATEGAFINWAFEVAEEPEFKGKVVTDPEAEPGEGQVKLTKVITDQMLMQLVLKPEAWDVIIAQNLNGDYVSDLAASLIGGPGFVPSGNIGDGYALFESTHGTAWDIAGKGIANPLSLTLSGAMMLEYIGWKEAAQKVYDAVRRTLAEHIGTPDIASGFQKQGIEAKAVGTMEFAEEISKRIE

SEQ ID NO: 3460 - protein, 100 aa, Triticum aestivum
MAPTVMASSATSVAPFQGLKSTAGLPVSRRSNGASLGSVSNGGRIRCMQVWPIEGIKKFETLSYLPPLSTEALLKQVDYLIRSKWVPCLEVQQRSGFIFR

SEQ ID NO: 3461 - protein, 499 aa, Vitis vinifera
MELLSCLLCFLAAWTSIYIMFSARRGRKHAAHKLPPGPVPLPIIGSLLNLGNRPHESLANLAKTYGPIMTLKLGYVTTIVISSAPMAKEVLQKQDLSFCNRSIPDAIRAAKHNQLSMAWIPVSTTWRALRRTCNSHLFTSQKLDSNTHLRHQKVQELLANVEQSCQAGGPVDIGQEAFRTSLNLLSNTIFSVDLVDPISETAQEFKELVRGVMEEAGKPNLVYYFPVLRQIDPQGIRRRLTIYFGRMIEIFDRMIKQRLQLRKIQGSIASSDVLDVLLNISEDNSNEIERSHMEHLLLDLFAAGTDTTSSTLEWAMAELLHNPETLLKARMELLQTIGQDKQVKESDISRLPYLQAVVKETFRLHPAVPFLLPRRVEGDADIDGFAVPKNAQVLVNAWAIGRDPNTWENPNSFVPERFLGLDMDVKGQNFELIPFGAGRRICPGLPLAIRMVHLMLASLIHSYDWKLEDGVTPENMNMEERYGISLQKAQPLQALPVRV

SEQ ID NO: 3462 - protein, 422 aa, Oceanobacillus iheyensis HTE831
MTQAEKIVVENGKMNVPDTPIIPFIEGDGTGPDIWASAQKVIEAAVDKAYDGKKSIEWMEVYAGQKAYDKTGEWLPKDTLDKINEYKIAIKGPLTTPIGGGIRSLNVALRQELDLFTCLRPVRYFEGVPSPVKRPEEVDMVIFRENTEDIYAGIEWQKGSDEVKKVINFLKEEMGVKNIRFPETSGIGVKPVSEEGTKRLVRSAIDYALNEGRKNVTLVHKGNIMKFTEGAFKNWGYEVAEQEYGDKVFTWAEYDRIVEAEGKDAANKAQDEALASGKILVKDAIADIFLQQVLTRPKEFDVVATMNLNGDYISDALAAQVGGIGIAPGANINYDTGHAIFEATHGTAPKYAGLDKVNPSSVILSAVLMLEHLGWREAADLITKSMDKTIGSKVVTYDFARLMDGAKEVKCSEFGQELIKNM

SEQ ID NO: 3463 - protein, 174 aa, Plantago major
MASAMMSSAATVTAQTSMVGQFSGLKFGSTFPIAKKTGRVSSPSSGLKVRCMQVWPPTGKKKYETLSYLPDLTVEQLAKEIDYLLRSKWIPCLEFELEHGFVYRENARSPGYYDGRYWTMWKLPMFGCTDASQVIAELEECKKEYPNAWVRIIGFDNVRQVQCISFIASKPPGL

SEQ ID NO: 3464 - protein, 373 aa, Oceanobacillus iheyensis HTE831
MTASTKGLEGIVATQSSISSIIDDQLSYVGYRIDDLAENSSFEEIIYLLWNQKLPNKSELDELKSQLAENMDIPDAIINHLRSYDLNTVHPMAALRTAISLLGLYDNEADVMDEQANKRKAVRIQAQIATIVTTFSRIRKGQEPVKPKKDLSYAENFIYMLNGKEPEDIEVEAINKALVLHADHELNASTFTARVCVATLSDIYSGITAAIGALKGPLHGGANENVMKMLTEIGEEENAIPYIKEKLANKDKIMGMGHRVYRTGDPRAKFLREMSKELTKLTGQEKWYNMSVKIEDYIKENKGLPANVDFYSASVYHSLGLDHDIFTPLFAVSRTSGWIAHILEQYENNRLIRPRAEYTGPELRDYVSIEQRG

SEQ ID NO: 3465 - protein, 140 aa, Brassica napus
TAYIQTIRSAQHFIYIENQYFLGSSYAWPNYKDAGADNLIPMELALKIVSKIRAKERFAVYVVIPLWPEGDPKSGPVQEILYWQSQTMQMMYDVIVRELKAVQSDAHPLDYLNFYCLGKREQLPENMPATNGSAGSDSYK

SEQ ID NO: 3466 - protein, 159 aa, Plantago major
MSDEEHQFEAQADAGASKTFPQQAGTIRKNGYINIKNRPCKVVEVSTSKTGKHGHAKCHFVAIDIFNGKKLEDIVPSSHNCDVPHVNRVDYQLIDISEDGFVSLLTDNGSTKDDLRLPTDDALATQIKEGFAEGKDLVVSVMSAMGEEQINAIKDVGPK

SEQ ID NO: 3467 - protein, 476 aa, Burkholderia fungorum LB400
MLHAAQFYIDGGWVEPTSPVWFDIVDPSTETPFEKLALGNAQDVDRAVAAARRAFASWSATSVADRVALLKRIVTIYERRYDEFAELMRREMGAPITFARNGQAARGPAHLNALIDVLERFEFEEQRGSTRIVLEPIGVCGLITPWNWPVNQIVVKIAPALAAGCTMVLKPSEYSPLSALLFADVLDEAGVPAGVFNLVNGDGPGVGSAIASHPDIDMVSFTGSTRAGVLVAQSAAETVKRVAQELGGKSANILLDDVDLDQAVTRGVAACFTNSGQSCSIPTRMLVPRHLMNDAAQIAKRAAQAYRLGPTDDPATQLGPLVNANQFKRVQALIQIGIDEGARLVTGGTGRPDGIDTGYYARPTVFADVTPQMTIAREEIFGPVLSMIPYDSEEQAIDIANGTDYGLAAYVQSADLARARKVGRALRAGGVHLNYPPADFGAPFGGYKRSGNGREWGEAGLREYLETKALAGYGVD

SEQ ID NO: 3468 - protein, 319 aa, Oceanobacillus iheyensis HTE831
MKRIGVLTSGGDSPGMNAAIRAVVRKAIYHDLEVYGIKNGYQGLMDGNIEKMTLGSVGDIIHRGGTILFSARSEEFKTDEGQFRAIEQLNKHNIDGLVVIGGDGSFQGAKKLTEKGFPCIGVPGTIDNDIAGTDYTIGFDTSLNTIIDAVDKVRDTATSHERTYIIEVMGRDAGDLALWAGLAVGAESILIPEEKEDFSSIVQRLKNGHDRGKKHSIILLAEGVGSGFEFGKRIEEVAELETRVTVLGHIQRGGSPTGQDRVLASRLGARAIELLIDNQGGRMVGIQKNVLVDYTFDEVFNVEHTIDKGMYKLSKELSI

SEQ ID NO: 3469 - protein, 486 aa, Saccharomyces cerevisiae
MVQRLLPGAHICRRSFNSSAIIKSSALTLKEALENVIPKKRDAVKKLKACYGSTFVGPITISSVLGGMRGNQSMFWQGTSLDPEHGIKFQGLTIEECQNRLPNTGIDGDNFLPESMLWLLMTGGVPTFQQAASFRKELAIRGRKLPHYTEKVLSSLPKDMHPMTQLAIGLASMNKGSLFATNYQKGLIGKMEFWKDTLEDSLNLIASLPLLTGRIYSNITNEGHPLGQYSEEVDWCTNICSLLGMTNGTNSSNTCNLTSQQSLDFINLMRLYTGIHVDHEGGNVSAHTTHLVGSALSDPYLSYSSGIMGLAGPLHGLAAQEVVRFLIEMNSNISSIAREQEIKDYLWKILNSNRVIPGYGHAVLRKPDPRFTAMLEFAQKRPIEFENDKNVLLMQKLAEIAPKVLLEHGKSKNPFPNVDSASGILFYHYGIRELLFFTVIFGCSRAMGPLTQLVWDRILGLPIERPKSLNLEGLEALTKASNVNKL

SEQ ID NO: 3470 - protein, 112 aa, Glycine max
  misc_feature (68)..(68): Xaa can be any naturally occurring amino acid
ARVPFVDKEFIRVAGNIDPEGKMINKDEGRIEIWTLQMTFDDEDHPYMAKHILYNHNEQSSDGVGYGXIDGLKAYDEQHATDRFMLNTGHTITCNTYTANELYHYRMISERV

SEQ ID NO: 3471 - protein, 354 aa, Aspergillus nidulans FGSC A4
MAASFVPRQAFPNYASIPRSYFLGHHRAGLNKMRNMLSSIDYVIECRDTRVPFTSVNPMFEEALGKTRRLIVYTKRDLGSEAGSREQKSLEKQIRSFNRGTPVFFVSPHHLDPRSKSRTNNRPDVNTILTHLREDAQGPDRLVGCRVMVVGMPNVGKSTLINNLRNRGVGKAKAVHTGDQPGITRKIGTPVKIIERDNGAHVYVLDTPGVFMPYVPDAENMLKLALCGCVKDSVISPVTLADYLLYHINLHDPTVYQRWSLPTNEVHPLLDSFARSTGLLAKGGIPNMDLAALHFIQKWRGGGLGRFILDDLQEERRRRESSDEDKASISITQALKAEKSARRQQATDPSVRQK

SEQ ID NO: 3472 - protein, 276 aa, Triticum aestivum
  misc_feature (256)..(256): Xaa can be any naturally occurring amino acid
MGMDRTLYLWRSSEERAADMSTRRTEDGAVKCALRHFRRELVTRGLRFMAAAWGGLSPLPGAAAARVLRRPRVRPRVRGRVGKLYTYIVQPWAPTVMASSATSVAPFQGLKSTAGLPVSRRSNGASLGSVSNGGRIRCMQVWPIEGIKKFETLSYLPPLSTEALLKQVDYLIRSKWVPCLEFSKVGFIFREHNASPGYYDGRYWTMWKLPMFGCTDATQVINEVEEVKKEYPDAYVRIIGFDNMRQVQCVSFIAFXPPGCEESGKGLNSSLTTGHI

SEQ ID NO: 3473 - protein, 178 aa, Glycine max
  misc_feature (91)..(91): Xaa can be any naturally occurring amino acid
  misc_feature (100)..(100): Xaa can be any naturally occurring amino acid
  misc_feature (122)..(122): Xaa can be any naturally occurring amino acid
  misc_feature (149)..(149): Xaa can be any naturally occurring amino acid
MASSMISSPAVTTVNRAGPGMVAPFTGLKSMAGFPTRKTNNDITSIASDGGRVQCMQVWPPVGKKKFETLSYLPDLDDAQLAKEVEYLLKXGWIPYLEFXLKHNFVYHKHNKSPIYYNKRYXTICKRAIFICTNTSHILNKRARTNTTXGNNCIRMITCGRHRQLQYISCISYERPSY

SEQ ID NO: 3474 - protein, 248 aa, Anthurium andraeanum
MTAKAKRGAAVAAEARVAKKRVVKLNKGPWTAEEDQKLVEYVDAHGDRKWTSLPTKAGLNRCGKSCRLRWLNYLRPGIKRGNISEAEEDMIIRLHNLIGNRWSLIAGRLPGRTDNEIKNYWNTHLSKKPLTISDLNDKLNDDGGSRSDVDEPPSSGQSQGPLDSRRPAEPRISEASNEVAFNVDELVNLPAILDFDDLLDSGSCSDGIITSSQIFWTPNFSAHDQQDISDFDDLGMLMDIMDYVICPP

SEQ ID NO: 3475 - protein, 113 aa, Rickettsia helvetica
ANEAVINMLKEIGSSENIPKYIAKAKDKNDPFRLIGFGHRVYKNYDPRAAVLKETCKEVLKELGQLENNPLLQIAIELEAIALKDEYFIERKLYPNVDFYSGIIYKAMGIPSQ

SEQ ID NO: 3476 - protein, 335 aa, Nepenthes alata
YQWAFAIAAAGITSGSIAERTQFVAYLIYSSFLTGFVYPIVSHWFWSVDGWASASRASNLLLGSGVTDFAGSGVVHMVGGVSGLWGALIEGPRIGRFDRSGRSVILRGHSGSLVVLGTFLLWFGWYGFNPGSFLTILKAYGNNGGYFGQWSAVGRTAVTTTLAGSTAALTTLFGKRLLVGHWNVTDVCNGLLGGFAAITSGCSVVDPWAAIICGFVSSWVLIGFNKLAEKVKYDDPLEAAQLHGGCGMWGLIFTGLFATKKYVSEVYGGSPDRPHGLFMGGGGKLLAAQLIQIVVIFGWVTATMGPLFYGLKWLKLLRVKSEHEMAGMDMTSHGG

SEQ ID NO: 3477 - protein, 504 aa, Mesorhizobium sp. BNC1
MEETMQTAHTWKADRQQSLRGHTVPTALLIAGEWIERDKSFTVTNPATNEEIARVSDGTAEDALRALEAATASQEAWAAWAPRQRANLFHRAHRLMLERATAFAEVMTLESGKPLAEAKAEFALSADFFLWYAEQIAHLHGTFASGSPGGYRIIATHRPVGPCFLVTPWNFPLLMIARKGGAALAAGCTTIVKSARETPLTAALFAQTLLEAGFPAGTVNLIHTTSSASISEALLADPRLRKVSFTGSTEVGSRLLSGAAQNIVNASMELGGDGPFVVLEDADIDLAVRQAIICKFRNAGQACVAANRIICHAAVVDEFTQKFVDETRKLRVGDGFEPGTDVGPIISSPQLERVDRMVAMLKDAGAELLTGGKRKGVTGNFYEPTVMRIKGSAPACRNEELFAPIAVIYSVDSVAEAIRFANDTIYGLAAYVFTRNVDRAIAVSEKLDFGMVGINRGIMADPAAPFGGIKSSGLGREAGHDGIYEFLEPQYLALTVNEAAGISQ

SEQ ID NO: 3478 - protein, 495 aa, Gibberella zeae PH-1
MTSTTQISLPNGKKYDQPTGLFINNEFIAATGDEFVVTNPHTEEEVIKLKGASKEDVDKAVQAARKAFEGEWSELAAVDRGAFLYKIADLIDRDRELIAAIDAFDNGKPFSACLAGDLDESYNVFRYYAGAADKISGKTIETSPAKLAYVLQEPLGVCGQIIPWNFPFMMLAWKVAPALACGNTVILKPAEQTPLSALYFGNLVKEAGLPAGVVNVLPGLGPSTGKAIAGHMDIDKVAFTGSTNTGRAIMKDAANNLKNITLECGGKSPSIVFADAELEQAVKWCHFGIMDNKGEVCTSTSRIYVHEDIYDKFLEKFVEVTKENDKLGAPFDESTVQGPQVSKTQYDRVLSYIEEGRKSGAKLLYGGSKHGGKGYFLQPTVFADTTEDMKIMKEEIFGPVVSIAKFSTDEEAIKKANDTSYGLAAALFTEKIARAHKVARKLQAGMVWINSSGDSHFGIPFGGYKSSGIGRELGQYALDAYTQPKAVHVNLGFEL

SEQ ID NO: 3479 - protein, 460 aa, Magnaporthe grisea 70-15
MATTKSAFLHRSLKEFPAQVVEAKDKTLVFSDGTKVLDSTCGAAVACIGYNNDLSERVKQAMIRQMDKFPYCNSFFGHEVGEQLAQELMDGTGGAMSKAYIVNSGSEAMEGTMKMARQYFLELQPPQPSRINFIAREGSYHGTTLGALSMSGHVGRRSKFLDLLLPNVARVSRCDAYRGMKEGQSVAEYVEQLADELDKKFQELGPETVCAFVAEPVVGATLGCVPAVPGYFEAMRKVCDKYGALLILDEVMSGMGRSGTLHAWQQEGVVPDIQTIGKGLGGGYAPVAAFMINHRVADTLESGTGEFMHGHTYQGHALGCAAALEVQRIVREENLIDNVKQRGVQLEKLLQQHLGNHPNVGNIRGKGLFWGIEFVADKASKEPFPRSVDLANKVNRAGVKEFGVSLYPGTGTKDGVLGDHVILAPAYNCTADEIEEIVIKTKETVARVLRVKNAETATSA

SEQ ID NO: 3480 - protein, 130 aa, Leptospira interrogans serovar Copenhageni str. Fiocruz L1-130
MTNAVLNEKNHSVTSEETKKERVRILAPRVDIYSDEENIYLLADLPGVEEKDVQVQLEKDQLIISGKTSNKDIQGELRYSEFRTGEYKRTFTLTESVEEDRISAVYKNGVLNLTLPKRKPLTKKIEVRSE

SEQ ID NO: 3481 - protein, 279 aa, Exiguobacterium sp. 255-15
MEQKLKLWFTEHQTEDYGITFRVNHVYESEQTEFQRLEMVETDEFGTMLLLDGMVMTTDRDEFVYHEMVAHVPLFTHPNPKSVLVVGGGDGGVIREVLKHPSVEKAVLVEIDGKVIEYSKKYLPNIAGGLDDARVEVIVGDGFMHIAEAVNEYDVIMVDSTEPVGPAVNLFTKGFYSGISKALKEDGIFVAQSDNPWFTPELIRDVQRDVKEIFPITKLYIANVPTYPSGLWTFTIGSKKHDPLAVAPERFHEIETKYYTPELHTAAFALPKFVKDLTI

SEQ ID NO: 3482 - protein, 411 aa, Oceanobacillus iheyensis HTE831
MANLRDEALHLHKVKQGKLEINTKVPVKDAKDLSLAYSPGVAEPCKEIYDRKETVYDYTMKGNMVAVVSDGSAVLGLGNIGPEAALPVMEGKAVLFKGFAGVDAFPICVDTHDVEQIVQTVKLLEPNFGGVNLEDIAAPNCFIIEDRLKSETNIPIFHDDQHGTAIVTVAGLINALKLVGKKFSDIKVVANGAGAAGIAIIRLLQSFGVRDMIMCDSKGAIYEGRPYGMNTVKDSVAKYTNANKVEGSLSDVLEGADVFIGVSVGGALTKDMVRSMNDDAIIFAMANPDPEILPEDAKEAGARVIGTGRSDFANQVNNVLAFPGIFRGALDVRATRINEEMKVAAAEGIATLISDDELHDDYVIPSPFDERVAPLVASHVAKAAMSTGVARMNVDPEEVAEKTRKLTQQEK

SEQ ID NO: 3483 - protein, 425 aa, Bacillus israeli
MIVAEGQKITMTNGTLNVPNDPIIPFIEGDGTGPDIWRAASKVLEAAVEKAYNGEKKIVWKEVLAGEKAFKETGEWLPQETLDVIREYMIAIKGPLTTPVGGGIRSLNVALRQELDLFVCLRPVRYFNGVPSPVKRPQDTDMVIFRENTEDIYAGIEYAKGTEEVKKVIEFLQKELGVNKIRFPETSGIGIKPISEEGTKRLVRAAINYAIEHGRKSVTLVHKGNIMKFTEGAFKNWGYELAEQEFGDKVFTWAEYDRIVEKEGKEAANKAQEEAEKAGKIIIKDAIADIFLQQILTRPREFDVVATMNLNGDYISDALAAQVGGIGIAPGANINYETGHAIFEATHGTAPKYAGLDKVNPSSVILSGVLMLEHLGWKEAADLIIQAMEKTIASKVVTYDFARLMDGATEVKCSEFGNELIKNMG

SEQ ID NO: 3484 - protein, 441 aa, Gibberella zeae PH-1
MKSVVFKGVKQVALEDRPKPMIQDPTDIIVKVKYTAFELHVFRGHQPSGTGFIMGHEFTGVIDQVGSAVKSLEVGDAIVSPFTVSCGECFFCKRGYSSRCDKSLLFGTVLLDGAQAEYVRIPYAQSTVMKAPKEVEDLKLCLMADIFPTGCYAASNGLDSLDKERVQESIVVLIGCGPVGICALIAALEYKPKAILAVDGIESRLSLAKDLGAEPWNYLTQKQDLEKRVKDLSDGRGADVIIEVVGHSSALDMGFKLLRPWGIISSVGVHNGEIPWTGNEAYGKNLTIKMGRCPVRSIFENSLKLLAKKQHLLEFMTATVMPLSNAPEGYELFDSMKVQKVIFDAEKIRSAFLMIKPDVASSDATDIRFEMKRNGDSYILNGILSSGSDDLRCDVYIVVGKIDASNPNTHRRQFVFLVPVRFPGVAVHHILNVFSAGRTLS

SEQ ID NO: 3485 - protein, 258 aa, Plantago major
VIFHTFCEDIASQLPAVVVSVEYRLAPENRLPIAYDDALNAILWAKDQALGKGGRDPWMEYADFTKVFILGSSAGANIAYHVALRALDFDISPLQIKGVMMNQGYFGGVARTASEIRLKDDAYVPLYVNDVLWTLALPTNLNRDHEFCNPISGGTYLGRIYRLPKIYIKGDYGDPLVDRSVQLAQYLINNGRTVFYRFNAGGFHGIELQNTTAAQELYDDFKYFVNNPFIMNENGISKEPLSYDMKEIMSGGVSRASA

SEQ ID NO: 3486 - protein, 294 aa, Triticum aestivum
  misc_feature (40)..(40): Xaa can be any naturally occurring amino acid
  misc_feature (143)..(143): Xaa can be any naturally occurring amino acid
RGAAVDGLLLLDRDDEYAALMLSKEGAGAGGGGGACGEDXGTEGTNAARAACVHWIVKTNARFLFGGKTAYVSVTYLDRFLAQRRVDRGKEWALQLLSVACLSLAAKVEEHRVPRLPEFRPDEYDFDSASILGTGSLSNPSPXLQMIAGTPFPYLSCFVARFRHDERKAIVLRAVKCIFASIKAMSSVEYQPSTMALASILVARGGREGTGTAPNLEEELKAILGSSWQQLHTGHVYSCYSVMIQEEDRSTQSGREVASSGVSAAAPAGSPGTSVAMAMVRGGVVEQDPVERAG

SEQ ID NO: 3487 - protein, 409 aa, Novosphingobium aromaticivorans DSM 12444
MIAQPLTIIGGRLVPGSGEPVAGNLRCEGGRIVALGDVAPQDGDTVFDAGGALVAPGLVDLGVFAVDKPAFHFGGITRAALMPDQAPPLDHPARVRFAAQSGKPDMWVHPLAAATRGLEGTELAELALMRDAGAKAVSTGRAWIGDSGVMLRLLRYCAMLRLVVVTHAEDAAITGSAVATAGEVATRLGLPSAPAEAEALAVARDIALAEMSGCHVHFRQVTTAQALDLVRTAKARGVRVTAGVTPAHFVLSDLELVGFRTFCRLSPPLRSDADRKAVIAAIADGTIDVIASGHDPRGPEDKRLPFADAEPGMAGAETLLPLTLTLVRDGVIDLARAFELLAGNPARLLGVDAGRLETGAEADIAIVDPARPWIVNSGKMAASAGNTPFDRRPVEGRVTALFKGGKQVH

SEQ ID NO: 3488 - protein, 321 aa, Haemophilus influenzae R2846
MIKKIAVLTSGGDAPGMNAAIRGVVRSALAEGLEVFGIYDGYQGLYNNKIKQLNRYSVSDVINRGGTFLGSARFPEFKDPNIRAKCAEILRSHGIDALVVIGGDGSYMGAKLLTEEHSFPCVGLPGTIDNDVAGTDYTIGYQTALQTAVDAIDRLRDTSSSHQRISIVEIMGRHCSDLTISAGIAGGCEYIVASEIEFNREELIQQIERSIIRSKRHAIIAITELLTDVHSLAKEIEARVGHETRATVLGHIQRGGSPCAFDRILASRMGAYAVDLLLQGKGGYCVGIQNEQLVHHDIIDAINNMQRVFKADWLKVAKRLE

SEQ ID NO: 3489 - protein, 177 aa, Corynebacterium glutamicum ATCC 13032
MSTYQDDRFPGPDPYAPLGEKPSFTLTSTDLENGAKLAEAQLGGTDISPQLSWSDLPEGTKSLAITCLDPDAPTGAGFWHWAVFNIPTTVTEIPTGAGDETLGGIEGVVSLKGDSGKRGFYGAQPPAGHAPHRYLFAVHALDVEKLDIAPDATPTVLGFNLYFHTLGRSIVWGWYEN

SEQ ID NO: 3490 - protein, 384 aa, Rhodopseudomonas palustris CGA009
MSSQPLMFFLAFLAVLALIGAAAWLVRRFAGNRLGTNASRGRMPRLAVIDAAAVDGRRRLVLVRRDNVEHLLMIGGPSDIVIEPNIVRATPARDPLPTRAGVEPRLTTPEPGQWEADTAAELPEPELPPLPTRPLRPALAEEPRRAPPPMPERRPADPFASLVPEPIARPEPPLQPLPRTEPPMPRVEAPIMRAEPPIMRADPPILRPEPPITRPEPPVLRPEPPVLRPEPPVLRPEPPRPEPRMEPAPRPRAEPAMPRPPRPEPKPAPGPLRTERPAPPPAPPAPPPAPAAPVAAALATADQNLAEMANRLEAALRRPPNAPAEPAPPVAPEPPARPNPPAPRAAEPATEEPTADTSPAAGKTGFESLEDEMAALLGRPKSPT

SEQ ID NO: 3491 - protein, 1158 aa, Streptococcus agalactiae
MFKSNYERKMRYSIRKFSVGVASVAVASLFMGSVAHASELVKDDSVKTTEVAAKPYPSMAQTDQGNNSSSSELETTKMEIPTTDIKKAVEPVEKTAGETSATDTGKREKQLQQWKNNLKNDVDNTILSHEQKNEFKTKIDETNDSDALLELENQFNETNRLLHIKQHEEVEKDKKAKQQKTLKQSDTKVDLSNIDKELNHQKSQVEKMAEQKGITNEDKDSMLKKIEDIRKQAQQADKKEDAEVKVREELGKLFSSTKAGLDQEIQEHVKKETSSEENTQKVDEHYVNSLQNLAQKSLEELDKATTNEQATQVKNQFLENAQKLKEIQPLIKETNVKLYKAMSESLEQVEKELKHNSEANLEDLVAKSKEIVREYEGKLNQSKNLPELKQLEEEAHSKLKQVVEDFRKKFKTSEQVTPKKRVKRDLAANENNQQKIELTVSPENITVYEGEDVKFTVTAKSDSKTALDFSDLLTKYNPSVSDRISTNYKTNTDNHKIAEITIKNLKLNESQTVTLKAKDDSGNVVEKTFTITVQKKEEKQVPKTPEQKDSKTEEKVPQEPKSNDKNQLQELIKSAQQELEKLEKAIKELMEQPEIPSNPEYGIQKSIWESQKEPIQEAITSFKKIIGDSSSKYYTEHYFNKYKSDFMNYPLHAQMEMLTRKVVQYMNKYPDNAEIKKIFESDMKRTKEDNYGSLENDALKGYFEKYFLTPFNKIKQIVDDLDKKVEQDQPAPIPENSEMDQAKEKAKIAVSKYMSKVLDGVHQHLQKKNHSKIVDLFKELEAIKQQTIFDIDNAKTEVEIDNLVHDAFSKMNATVAKFQKGLETNTPETPDTPKIPELPQAPDTPQAPDTPHVPESPKAPEAPRVPESPKTPEAPHVPESPKAPEAPRVPESPKTPEAPHVPESPKTPEAPKIPEPPKTPDVPKLPDVPKLPDAPKLPDGLNKVGQAVFTSTDGNTKVTVVFDKPTDADKLHLKEVTTKELADKIAHKTGGGTVRVFDLSLSKGGKETHVNGERTVRLALGQTGSDVHVYHVKENGDLERIPSKVENGQVVFKTNHFSLFAIKTLSKDQNVTPPKQTKPSTQGSQVEIAESQTGKFQSKAANHKALATGNETVAKGNPTSTTEKKLPYTGVASNLVLEIMGLLGLIGTSFIAMKRRKS

SEQ ID NO: 3492 - protein, 182 aa, Triticum aestivum
MYLHSTAMAPTVMASSATSVAPFQGLKSTAGLPVSRRSNGASLGSVSNGGRIRCMQVWPIEGIKKFETLSYLPPLSTEALLKQVDYLIRSKWVPCLEFSKVGFIFREHNASPGYYDGRNWTMWKLPMFGCTDATQVINEVEEVKKEYPDAYVRIIGFDNMRQVQCVSFIAFKPPGCEEFGKA

SEQ ID NO: 3493 - protein, 331 aa, Arabidopsis thaliana
MFTCINCTKMADRGEEDEEDEARGSTTPNTKEAVKSLTTQIKDMASKFSGSHKQSKPTPGSSSSNLRKFPDFDTASESVPYPYPGGSTSSTPAWDLPRSSYHQSGRPDSRFTSMYGGERESISAQSCDVVLEDDEPKEWMAQVEPGVHITFVSLPSGGNDLKRIRFSREVFDKWQAQRWWGENYDRIVELYNVQRFNRQALQTPGRSEDQSQRDSTYTRIDSARESRDWTQRDNNFRPPGGSVPHHFYGPPMDAARITTSSRDEPPSMSNASEMQGEWVEEDEPGVYITIRQLPDGTRELRRVRFSRERFGEVHAKTWWEQNRDRIQTQYL

SEQ ID NO: 3494 - protein, 314 aa, Azoarcus sp. EbN1
MPLSSQAKALLDMVYRVGAPRFHELSVDQARHSFRKLQWAFGLPSPAVAATVEVAMTRVDGSTLNARLYRPLESSRDDELPLLIYFHGGGWCVGDLESYDVLCRQLANGSGCAVLSIDYRLAPENPFPAAVEDAIFSIEWAAEQAQRLGIDRGCIALGGDSAGGNLSIVGALLAHERASVAIRFMFLVYPSTEIASDRPSRQLFGQGYLLDGESLEWFYGHYLPAGNDEDWRASPMRAPSLAGLPPILLVTAECDPLADDCMAFAERVRAEGGEIEHVAVDGVVHGFITLGQFFPEATHAVDRITAGLRRAVRP

SEQ ID NO: 3495 - protein, 260 aa, Oryza sativa
MSPAEASREENVYMAKLAEQAERYEEMVEFMEKVAKTTDVGELTVEERNLLSVAYKNVIGARRASWRIISSIEQKEESRGNEAYVASIKEYRSRIETELSKICDGILKLLDSHLVPSATAAESNVFYLKMKGDYHRYLAEFKSGAERKEAAENTLVAYKSAQDIALADLPTTHPIRLGLALNLSVFYYEILNSPDRACNLAKQAFDDAIAELDTLGEESYKDSTLIMQLLRDNLTLWTSDNAEDGGDEIKEAAKPEGEGH

SEQ ID NO: 3496 - protein, 159 aa, Ralstonia solanacearum GMI1000
MTLTLTSPAFAAGAEMPGRLTCEGTDTSPPLAWTGLPAGTRSLALIVDDPDAPDPAAPRMTWVHWVLYNIPPATAALAEDAARSHLPSGTREGTNGWQRTGYGGPCPPIGRHRYFHKLYALDTELPDLGTPDKAALERAMHGHVLAQAELVGTYQKHKR

SEQ ID NO: 3497 - protein, 243 aa, Oryza sativa (japonica cultivar-group)
MRGVSGVEAKDSLTIVALQSPVTVERPVRGDLEEHVPKPYLARALAAPDIYHPDGTTTDDHEHHHLSVLQQHVAFFDRDDNGIIYPWETYEGCRALGFNMIMSFLIALVVNVSMSYPTLPGWLPSPFFPIYIHNIHRSKHGSDSGTYDNEGRFMPVNFENIFSKYARTSPDRLTYREVWQMTEGNREVLDLFGWFAAKLEWTILYVLARDEEGYLAREAIRRMYDGSLFEYVAMQREQHAKMS

SEQ ID NO: 3498 - protein, 496 aa, Ferroplasma acidarmanus
MEKIFGNIINGIEETGGERIELKSPVDGSLIGYIIDTDKDTVERAIQSSREAFNKFYLESTIKSRQELIGKLTDIVQEKATIYADLESKNTGKTIRQSTFMDIPLAISHIRYFAETDEFKFQRKITHPEYPGTEGIVQNAPMGVVASIAPWNVPFLMAVWKIIPPVLAGNAVVIKPSHYTPLTAIELVKDMKAAGFPDGLVNLVNGTGRTTGNLLVNSDHVDMVSFTGSTPTGSRIMEQAAKNIKKVSLELGGKSPNIVFADADLDHAVKGVIFGIFLNAGQLCESASRLIIEESIMDKFLQKVKTYLDSMKSGNPMDFETDISAITTKEQKEKIESLISQTVKSGGNIFYSKNMQGTPDKGTYFPPTLLTGLTPGQQISDEEIFGPVLTVYPFKSEKEAIDLANSTKYGLAAGIWTKDIEKAGRVASMIEAGTVWVNEYHLLSAAAPRGGFKKSGIGRELGLEGILEYTQTRHIFYGNNESGMSDVAYGILIKTE

SEQ ID NO: 3499 - protein, 213 aa, Oryza sativa (japonica cultivar-group)
MGVEVCVKAAVGHPDTLGDCPFSQRVLLTLEEKKVPYEMKLIDVQNKPDWFLKISPEGKVPVFNGGDGKWIPDSDVITQVIEEKYPTPSLVTPPEYASVGSKIFSCFTTFLKSKDPNDGSEKALLTELQALEEHLKAHGPFINGQNISAADLSLAPKLYHLQVALEHFKGWKIPEDLTNVHAYTEALFSRESFIKTKAAKEHLIAGWAPKVNA

SEQ ID NO: 3500 - protein, 168 aa, Triticum aestivum
GRIEKWVLRNAFDDEEKPYLPKHILYRQKEQFSDGVGYSWIDGLKDHAKAHVSDSMMTNASFVYPDNTPTTKEAYYYRTVFEKFYPKNAARLTVPGGPSIACSTAKAVEWDAAWSELLDPSGRAALGVHDAAYEEKAPASVDPVVDNVSRSPAHDVKRLKTAISAAAV

SEQ ID NO: 3501 - protein, 405 aa, Mesembryanthemum crystallinum
MVLEATMICIDNSEWMRNGDYTANRFQAQADAVNLICGAKTQSNPENTVGILTMAGKGVRVLVTPTSDLGKILACMHGLDMGGEMNLAAGIQIAQLALKHRQNKKQQQRIIVFAGSPVKYDKKVLETIGRKLKKNSVALDVVDFGEDEDGKSEKLEALVAAVNNNDTSHIVHVPAGPNALSDVLISTPIFTGDGEGGSGFAAAAAAAAAGGVSGFDFGVDPNLDPELALALRVSMEEERARQEAAAKRAAEEAGRQEKGGEQQSSSQDATMGESSSAANPEAEKKNDLTDDENALLQQALAMSMDEPASTTTVRDTDMADATGDDQDLQLALQLSVQDSAKESTSQSNPEEVGKLLADQSFVSSILASLPGVDPNDPSVKDLLASMQNQSEKKDEDKPPSEEEKK

SEQ ID NO: 3502 - protein, 475 aa, Gibberella zeae PH-1
MRLLTRPSSCAIARGLCRNSTFPCSISRASVSTLHAKINSPPPRIVRSEGCWLETHQGHRILDASSGASVVSIGHNDSRVKEAIIAQLDQVAYCYNPFFTTEAAEKISRFLTDSTDGHMSKVFVVSSGTEAVEAALKIARQYFTELPTPQPNRTKFIARKQSYHGNTLGSLSVGGHKARRGVYEPVLATNVSHVSPCYPYREMKEGETEEQYVERLAKELDDEFKRVGPDTVCAFIAETVSGTSLGCAPAVPGYFKAMREVCDRHGALLIMDEVMSGMGRTGTLHAWEQEGVVPDLQTVAKGLGAGYMPVGALLVGNKVANTLEQGSGAFSHSQTYQGHPVACAAAFSVQMAMKEDKMLQNTQEVGKVLGKKLKERLAGHKNVGDVRGRGLFWGLEFVRDKDTKEPFPLDDQIAGKLHKAGLTSDHGISLIPATGNVDGMQGDMVIVSPPLTVTKEEVDMVVDRIEKVVTSVLGS

SEQ ID NO: 3503 - protein, 161 aa, Ustilago maydis 521
MVSFYDLKAKKPSQEDYTFDQLKGKVVLVVNTASKCGYTPQFAELEELNKKYADQGLQIIGFPCNQFAGQDPGSDESIGEFCQRNYGVTFPMMAKSDVNGSNTNEVFQFLKKEKAGILGTEMIKWNFTKFLIDKEGNVIERYGSNTKPSAIAPAIEKLLSQ

SEQ ID NO: 3504 - protein, 483 aa, Thermococcus kodakaraensis
MCLIAGGMGGNLREKLIKMAIAGKHRGPESFGVWTDGGVLKSDDFSKLTEIPDGRIGLLQCRLAITGSKSFTQPFINDLALVHNGEIYNHAALREYLERRGVSFESDVDSEVVLRLIEFLREEHLSYPEIVKKLFWMLEGDYAVAFSDGERIYLFRDPLGIRPLYFSRNGLFASEKKVLWAVGEREVEPVQPGELVVLEKNGVRRARLFSLENLKSKAKCERKDPVGGVGKLLRYAVKNRVSKKTGVLFSGGLDSTLVAYLASQYSDVILYTAGTEDSPDIEWARKVADHFGWALRERTFEVEDVRDAVKRVMYAIEEPNPMNLAIGLPLYFASGLASSDGTRVLLSGQGADELFGGYAKYLERPELMEEDIALISERNLARDDKITMLNGVEGRYPFLALPVVSFALKLPLEAKIVDGTRKVILRKLALRLGIPEWIAEREKRAAQYGSRAQKLLEKIAREEGLTLREFAEKLFRETFPNAF

SEQ ID NO: 3505 - protein, 466 aa, Vitis vinifera
MALATRRFFNTICRGTRSFGALPEGIPSSSQHLINLEYEYSAHNYHPIPIVFSQAKGSTIWDPEGKKYLDFLSAYSAVNQGHCHPKVLKALVEQAERLTLSSRAFYNDRFPIFAERLMNMFGYDMVLPMNTGAEGVETALKLARKWGYEKKKIPKDQAIIVSCCGLLHGRTLAVISMSCDNEATRGFGPLLPGHLKVDFGDEVALEKIFEENGDRIAGFLFEPIQGEAGVIIPPDGYLKAVRELCSKFNILMIADEIQSGLGRSGRMLACDWAEVRPDVVILGKALGGGVIAVSAVLADKDVMLSIQPGEHGSTFGVNPLASAVAVASLDVITEEGLSERSDQMGQELRNQLMKIHQLFPNLIKEVRGKGLFNAVELNSKALFPVSAYDICLKLKERGVLAKPTHDTIIRLTPPLSISLDELQEGSNALRDVMEFDVPKMQKAKHKRVPQTTTNICDRCGRNMDDS

SEQ ID NO: 3506 - protein, 113 aa, Triticum aestivum
  misc_feature (98)..(98): Xaa can be any naturally occurring amino acid
AARILQRDHGINVNLTLMFSQVQAIAAAEAGTFLISPFVGRILDWYKAKTGKTYSKEEDPGVELLRKYSDYYKKLGYKTIRHGCLIQEILGEITELAXGCDYLTSLPNLLEEF

SEQ ID NO: 3507 - protein, 235 aa, Synechocystis sp. PCC 6803
MAELDAANLMKQAVGKAAADRVKSNTIVGLGTGSTTAYALEFIGDRLKKGELENVVGIPTSFQAEVLARKYGIPLTTLDVADRIDIAIDGADEVDPQKNLIKGGGAAHTREKIVDALAETFLVVVDSGKLVDKLGSTFLLPVEVIPMALTPVMRALAKLGGKPELRMGVKKAGPVVTDQGNLVIDVKFDAITNPAELEKTINNLPGVLENGLFVGVADVILVGEIIDGQPTVREF

SEQ ID NO: 3508 - protein, 485 aa, Burkholderia cepacia
MLKKSTTSSTANMCRVSVGSRSSSPLNNAVIAKVHEAGRAEVDAAVAAAQAALKGAWGRMSLAQRVEVLYAVADGINRRFDDFLAAEVEDTGKPMSLARHVDIPRGAANFKIFADVVKNVPTEFFEMPTPDGVGAINYAVRRPVGVVGVICPWNLPLLLMTWKVGPALACGNTVVVKPSEETPQTAALLGEVMNTAGVPPGVYNVVHGFGPNSTGEFLTSHPDVNAITFTGETGTGEAIMKAAADGARPVSLELGGKNAAIVFADCDLDKAIEGTLRSCFANCGQVCLGTERVYVERPIFDRFVSRLKKGAEGMQLGRPEDLATGMGPLISQEHREKVLSYYKKAVEAGATVVTGGGVPEMPEALKGGAWVQPTIWTGLGDDSVVAREEIFGPCALVMPFDSEEEVIRRANDNDYGLARRIWTTNLSRAHRVAGAIEVGIAWVNSWFLRDLRTAFGGSKQSGIGREGGVHSLEFYTELKNVCIKL

SEQ ID NO: 3509 - protein, 176 aa, Triticum aestivum
  misc_feature (90)..(90): Xaa can be any naturally occurring amino acid
  misc_feature (100)..(100): Xaa can be any naturally occurring amino acid
  misc_feature (115)..(115): Xaa can be any naturally occurring amino acid
  misc_feature (125)..(125): Xaa can be any naturally occurring amino acid
MAPTVMASSATSVAPFQGLKSTAGLPVSRRSNGASLGSVSNGGRIRCMQVWPIEGIKKFETLSYLPPLSTEALLKQVDYLIRSKWVPCLXFKQGWVYLPXEHNASPGYYDGRYWXTMWKLPMFGXCTDATQVINKWRSQEGVPDAYFAYRIDNIASEWLIASNGSRSARLNTHTAH

SEQ ID NO: 3510 - protein, 130 aa, Methanosarcina acetivorans C2A
MTCDPAGGRAINAAGVQFPPVHYNGDIFLPGQANNFYTYPAVGLAVYVTRAKRATDEMFIKAARATANQRTDEQLKKGLLFPPQSSILETEVRTAVQIATLIFNRDLARVDQPEDINVWLRATLYKPQYS

SEQ ID NO: 3511 - protein, 345 aa, Thermus thermophilus HB27
MERRSVQKKDLLSTPVVPIDIKAFDAGPILEAMGKTAFQARNLHRAAEIYLEMLEDDCAVILTLAGSLVSAGQGLIVHDLIRKGLVDVIVATGANIVDQDFFEALGHRHYQGDPRADDEALRRLWIDRIYDTYIDEEELRHTDYTVAEIADGLEPRPYSSREFIWHMGRYLAERGLGEKSIVRAAYEEGVPIFVPAFSDSSAGFGLVYHQVKHPEAHVTIDSVADFRELTEIKLKAGTTGLVMLGGGVPKNFAQDVVVAAEVLGHRVEMHKYAIQITVADERDGGLSGSTLSEAQSWGKVDARLSQMVFAEATLAFPLLASYVWHRAPARAKRRYAELFREKAPA

SEQ ID NO: 3512 - protein, 460 aa, Mycobacterium tuberculosis H37Rv
MSRSHPSVPAHSIAPAYTGRMFTAPVPALRMPDESMDPEAAYRFIHDELMLDGSSRLNLATFVTTWMDPEAEKLMAETFDKNMIDKDEYPATAAIEARCVSMVADLFHAEGLRDHDPTSATGVSTIGSSEAVMLGGLALKWRWRQRVGSWKGRMPNLVMGSNVQVVWEKFCRYFDVEPRYLPMERGRYVITPEQVLAAVDENTIGVVAILGTTYTGELEPIAEICAALDKLAAGGGVDVPVHVDAASGGFVVPFLHPDLVWDFRLPRVVSINVSGHKYGLTYPGVGFVVWRGPEHLPEDLVFRVNYLGGDMPTFTLNFSRPGNQVVGQYYNFLRLGRDGYTKVMQALSHTARWLGDQLREVDHCEVISDGSAIPVVSFRLAGDRGYTEFDVSHELRTFGWQVPAYTMPDNATDVAVLRIVVREGLSADLARALHDDAVTALAALDKVKPGGHFDAQHFAH

SEQ ID NO: 3513 - protein, 420 aa, Thermus thermophilus HB27
MGPLLVWHRGDLRLHDHPALLEALARGPVVGLVVLDPNNLKTTPRRRAWFLENVRALREAYRARGGALWVLEGLPWEKVPEAARRLKAKAVYALTSYTPYGRYRDAKVQEALPVPLHLLPAPHLLPPDLPRAYRVYTPFARRFLGVEAPLPAPEALPKGPEEGEIPREDPGLPLPEPGEEAALAGLRAFLEAKLPAYAEERDRLDGEGGSRLSPYFALGVLSPRLAAWEAERRGGEGARKWVAELLWRDFSYHLLYHFPWMAERPLDPRFQALPWQEDEALFRAWYEGRTGVPLVDAAMRELHATGFLSNRARMNAAQFAVKHLLLPWKRCEEAFRHLLLDGDRAVNLQGWQWAGGLGVDAAPYFRVFNPVLQGERHDPEGRWLKRWAPEYPSYAPKDPVVDLEEARRRYLRLARDLARG

SEQ ID NO: 3514 - protein, 200 aa, Chromobacterium violaceum ATCC 12472
MMTLYSGITCPFSQRCRIVLFEKGMDFEIIDVDIHNKPEDLAVMNPYNEVPVLVERDLILHESNIINEYIDERFPHPQLMPADPVMRARARLFLYRFENELFIHVKTLEAGATGKEATKAREAIRDGLTTIAPIFSKQKFMLGDDFSMIDVAIAPLMWRLEHYNIDLGKSAAPILKYAERIFQRQSFIDSLTPSEKAMRK

SEQ ID NO: 3515 - protein, 364 aa, Buchnera aphidicola
MKKKYRIAVLPGDGIGPEVMREAYKILNILKYHFSLPLEIEEFDVGGSAIDKEGVALPKKTLLGCENADAILFGSVGGRKWDSLPIDQRPERASLLPLRKHFNLFANLRPAQLYSELKYLSPLAFLIVIKNGFNILCVRELTGGIYFGQPSGRSKTNNFEYAFDTEVYYDYEINRIAHLAFQLAQTRNYKVCSIDKSNVLNSSILWREIVKKVSLSYPNVHLSHLYIDNATMQIIKDPNQFDVLLCSNLFGDIISDECAIITGSIGMLPSASLNEKKFGLYEPAGGSAPDIEGKNIANPIAQILSVSMLVRYSMNLKNIADKIDYSVISILKKGYKTADIAHDNNYLKTNEMGDVIADALISGE

SEQ ID NO: 3516 - protein, 363 aa, Buchnera aphidicola
  misc_feature (76)..(94): Xaa can be any naturally occurring amino acid
MKTKYRIAVLPGDGIGPEVMREAYKILNILKNYFSLPIETREFNVGGAAIDQDGVALPKTTLLGCENSDAILFGSXXXXXXXXXXXXXXXXXXXLLPLRKHFNLFGNLRPAQLYSELIHLSPLRSDIINNGFNILCIRELTGGIYFGKPAGRLKKNNIEYAFDTEIYYNYEINRIAHLAFQLAKTRNYKVCSIDKSNVLNSSILWREIVQKVSKNYPDVHLSHLYIDNATMQIIKNPNQFDILLCSNLFGDIISDECAMITGSIGMLPSASLNEKKFGLYEPAGGSAPDIEGKNIANPIAQILSVSMLVRYSMNLKTIADKIDQSVISVLKKGYRTADISNNSHYLKTNEMGDVIASALISGE

SEQ ID NO: 3517 - protein, 477 aa, Oryza sativa (japonica cultivar-group)
MGISKGGSGKEAKKPPLLLGRFEVGKLLGQGNFAKVYHARNVATGEEVAIKVMEKEKIFKSGLTAHIKREIAVLRRVRHPHIVQLYEVMATKLRIYFVMEYVRGGELFARVARGRLPEADARRYFQQLVSAVAFCHARGVFHRDIKPENLLVDDAGDLKVSDFGLSAVADGMRRDGLFHTFCGTPAYVAPEVLSRRGYDAAGADLWSCGVVLFVLMAGYLPFQDRNLAGMYRKIHKGDFRCPKWFSPELIRLLRGVLVTNPQRRATAEGIMENEWFKIGFRRFSFRVEDDRTFTCFELDDDAAVDAPTSPPDTPRTVDSGDVGAAPTRPRKAGSLTSCDSAPLNAFDIISFSPGFDLSGLIPEQQKHTARFVSAAPVEVIVATLEAAAAAAGMAVREREDGSISMEGTREGEHGALAVAAEIYELTPELVVVEVRRKAGGAAEYEEFFRARLKPSLRELVCDDRPCPEDSGELSRSL

SEQ ID NO: 3518 - protein, 158 aa, uncultured bacterium pCosAS1
MKLISQDLRDGDKLPLRHVFNGMGYEGDNISPHLAWDEVPSGTKSFVVTCYDPDAPTDSGWWHWIVANIPADTRVLPQGSGSSLVALPEGAVETRTDFGKAGYGGAAPPKGETHRYIFTVHALNVERIEVDEEASGAMVGFNVHFHTLGSASITAMYS

SEQ ID NO: 3519 - protein, 317 aa, Sulfolobus solfataricus P2
MWKVFFINGNFVKENVRDELPKPNEVKVFPKYIGICGTDKNIYLGKKPVKEPLVLGHEISGITEKGEKVAIFPNYWCGYCNNCRRGFYNSCKNKISIGVNADGGMAEYINVPKDFVFRIPYTLDLKLGALVEPTAVAVAALNKIDKEIEKVIIIGGGSTGTLVSIVAEINGLETFVIEKDSRKEEILKEKGFRTTKELKFDDRVAVIDTINNQESMVLAQSILKNSIARSELIITGLDNEQISLNRDIIVRNEVIIRGSIIYSKDDFLNSIKIVSENQEKFNKIVDKVGYIDNINEWFRKYVIELPNIKVLIKMDSI

SEQ ID NO: 3520 - protein, 429 aa, uncultured bacterium pCosAS1
MTTDDLAFDRQHIWHPYTSMTQPLPVYPVVEAHGCELTLASGEQLVDGMSSWWAAIHGYNHPRLNAAMKAQIDRMSHVMFGGITHQPAVDLCRRLVAMTPETLECVFPADSGSVAVEVAMKMALQYWHAKGESRQRFITFRNGYHGDTFGAMSVCDPDNSMHSLWKGYLPENLFAPAPQSRFDGAWDEMDMVGLAPLMAAHRHEIAAVILEPIVQGAGGMRMYHPEWLKRIRRMCDREGILLIADEIATGFGRTGKLFACEHAGITPDILCLGKALTGGTMTMSATLTTRQVAETISNGEAGCFMHGPTFMGNPLACAVASESLALLESGEWQDQVAAIESQLQEELAVARDSEFVADVRVLGAIGVVETTHPVNMAALQRFFVARGVWVRPFGKLIYLMPPYVIRPDQLSKLTRAVVDAVQAPAHFTR

SEQ ID NO: 3521 - protein, 607 aa, Glycine max
MDTNIGSLSLDACKPANNDVGCPPNGAVSAIKPSVPATTMTSSDATLGRHLARRLVQVGVTDVFSVPGDFNLTLLDHLIAEPQLKNIGCCNELNAGYAADGYARCRGVGACVVTFTVGGLSVINAIAGAYSENLPLICIVGGPNTNDFGTNRILHHTIGLSDFSQELRCFQTVTCYQAVVNNIEDAHELIDTAISTCLKESKPVYISISCNLPGIPHPTFSREPVPFSLSPRLSNKMGLEAAVEAAAEFLNKAVKPVMVGGPKLRVANACDAFVELADACGYPFAVMPSAKGLVPEHKPHFIGTFWGAVSTAFCAEIVESADAYLFAGPIFNDYSSVGYSLLLKKEKAIIVQPERVVISNGPAFGCVLMKDFLRELAKRLKHNNTAYENYSRIFVPEGKPVKAEPREPLRVNVLFKHIQDMLSGETAVIAETGDSWFNCQKLKLPKGCGYEFQMQYGSIGWSVGATLGYAQAVPEKRVISCIGDGSFQVTAQDVSTMLRNEQKTIIFLINNGGYTIEVEIHDGPYNVIKNWNYTGLVDAIHNGEGKCWTTKVTCEEELVEAIQTATGDKKDCLCFIEVIVHKDDTSKELLEWGSRVCAANGRPPNPQ

SEQ ID NO: 3522 - protein, 364 aa, Buchnera aphidicola
MKTQYRIAVLPGDGIGPEVMREAYKILKILKNNFLLSFEIEEFNVGGIAIDQEGLALPKKTLLGCEKSDAILFGSVGGKKWDNFPIEERPERAALLPLRKHFNLFANLRPAKIYSELKHLSPLRSNIVRDGFDILCIRELTGGIYFGQPSGRRLEKNNIEYAFDTEIYYDYEINRIAHLAFQLAQSRSHKVCSIDKSNVLNSSILWKEIVQKVSKNYPDVDLSHLYIDNAIMQIIKNPNQFDVLLCPNLFGDIISDECAIITGSIGMLPSASLNEKKFGLYEPAGGSAPDIAGKNIANPIAQILSLSMLVRYGMNLKDIADKIDKSVLSVLKKGYRTADISNNNNYLKTNEMGDVIANALISGE

SEQ ID NO: 3523 - protein, 506 aa, Rhodopseudomonas palustris CGA009
MNLITTMHPDASTVFKARYGNFIGGRWVAPVDGRYFDNTTPITGAKLTEIPRSQKEDVELALDAAHTASVTWSKTTTTERSLILNRIADRMEANLDLLAIAETLDNGKPIRETRAADLPLAIDHFRYFAGALRAQEGSISEIDHDTIAYHFHEPLGVVGQIIPWNFPLLMAAWKLAPALAAGNCVVLKPAEQTPASILVWAELVGDLLPPGVVNVVNGFGVEAGKPLASSPRIAKIAFTGETSTGRLIMQYASENLVPVSLELGGKSPNIFFGDVTAEDDPFFDKAIEGFVMFALNQGEVCTCPSRALVQESIYDRFMERALARVAAIRQGDPRDPATMIGAQASQEQLDKILSYIDIGRHEGAELLAGGGRAQLPGGLAGGYYVHPTVFRGHNQMRIFQEEIFGPVVSVTTFKDEAEAIAIANDTQYGLGAGVWTRDGTRAYRFGRAIAAGRVWTNCYHAYPAHAAFGGYKQSGIGRETHKMMLDHYQHTKNLLVSYGTGPLGFF

SEQ ID NO: 3524 - protein, 181 aa, Triticum aestivum
  misc_feature (103)..(103): Xaa can be any naturally occurring amino acid
LWLLVVAAQCASLATAAGPRVIIVGAGMSGISAGKRLSEAGITDLVILEATDRIGGRIHKTKFAGVNVEMGANWVEGVNGDEMNPIWTMANGTGGLNLRTFRXDFDHLASNTYKQDGGLYDEKVVEKIIERMDEVEESGSKLSAPFTTTATGLVVWPSTLTAFGLEGRLGYTVTPAKLLEF

SEQ ID NO: 3525 - protein, 285 aa, Mycoplasma penetrans HF-2
MKYIKLANGLHMPIIGLGVYKAEGENCENTIIKAIDDYGYRMIDTAQVYFNEEFVGNAIKQTKIKREDIFITTKVWISNYGYNNTMYSISKSLKKLQTNYIDLVLLHQPFGDYYSAWKALEVLYKKGIVKAIGVSNFEADRLVDFCLHVDVKPVINQIELHPLRQRIEDLHWNNKYGVAVESWASFGRATSEIMENPILVSLAEKYNKTVPQIILRWLIQQNIVVIPKTVTESRLKENMDIFDFEISDDDMDLIKTINQNKTVSKHHHDPSTAEEIFSKFPEIRR

SEQ ID NO: 3526 - protein, 347 aa, Listeria monocytogenes str. 4b H7858
MKNTIKWIAIGFAGIILLPLLIVFFIYKKAVGKKEYNPEVLENLDEASQKFVKNTSPLSDVDSRYKYMRLATKALPSAKDIEIGDVENKKIDGPAGKIPIRIYTPQEDGPFEIIVYYHGGGFVLGGLQTHDAIARKLVQTTGARVVTVDYRLAPENPFPAAVEDAYAALLWVQNHRTSLRAKSSDIIVAGDSVGGNLATVVTQIAKSKGKPNITAQILLYPATDIFSRDASVLYPSMDEFAEGYVLTKESLDKFFKLYIANASDRKYDPLVAPIRSKDLVGLPKTFIATAEFDPLRDQGEAYAKKLKDAGVEVFAKRFEKVPHGFMTTNSEATDETYELISEFLEEK

SEQ ID NO: 3527 - protein, 389 aa, Chlamydomonas reinhardtii
MADPGAQPVPAPQSAEEPVTGGLQESVEVTASGKLDSYNREYNQFLVCGSLFECPAKYLPIKPIGKGAYGVVCSAKNLDNQEKVAIKKIANAFDNVIDAKRTLREIKLLRHLQHENIVQIKDIIPPTNRDAFKDLYVVYELMDTDLHQIIRSPQALSNDHSQYFLYQLLRGLKYIHSANILHRDLKPSNLLVNANCDLKICDFGLARTSTSNEREFMTEYVVTRWYRAPELLLSCSGYTTAIDVWSVGCIFAELLGRKPLFPGKDYVHQLSLITKVIGSPSEEELGFITSEKAKRYIRSLPRSERVDFGQLWPHVTKTALDLIDKMLVFDPTKRITVEQALEHPYLASLHDVSDEPVCPTPFTFDFDSEHLTPDVVREVILQDMAELHT

SEQ ID NO: 3528 - protein, 314 aa, Glycine max
  misc_feature (157)..(157): Xaa can be any naturally occurring amino acid
MAMASLASSSVLLNLLFIVSALHLGAAAARILSEKEDQQQLQFQYHKGPLLSGNISVNLIWYGSFKPSQRAIISDFITSLSSSPKSTAQPSVATWWKGTEKYYQLIKSAPKPSLTLALGAQILDENYSLGKSLTTDNIVSLASKGAPNDAINVVLTXSDVTVEGFCSSRCGTHGSSVGHGKLAYVWVGNSETQCPGQCAWPFHQPIYGPQSPPLVAPNNDVGLDGMVINVATLLAGTVTNPWGNGYFQGPKEAPLEAASACTGLYGKGAYPGYAGELLLDPTTAASYNANAVNHRKYLLPALFDPTTSACSTLP

SEQ ID NO: 3529 - protein, 683 aa, Glycine max
  misc_feature (12)..(12): Xaa can be any naturally occurring amino acid
MSGGGCSSIVVXSRGDLRIEDNPALTAGVRAGAVVAVFIWAPEEEGQYYPGRVSRWWLKNSLAHLDSSLRNLGTPLITKRSTDTLSSLFEVVKSTGATQLFFNHLYDPLSLVRDHRAKEVLTAQGITVRSFNADLLYEPWDVNDAHGRPFTTFAAFWERCLSMPYDPESPLLPPKRIIPGDASRCPSDTLLFEDELEKASNALLARAWSPGWSNADKALTAFVNGALIEYSKNRRKADSATTSFLSPHLHFGEVSVKKVFHLVRIKQVFWANEGNKAGEESVNLFLKSIGLREYSRYISFNHPYSHERPLLGHLKFFPWVVNEGYFKAWRQGRTGYPLVDAGMRELWATGWLHDRIRVVVSSFFVKVLQLPWRWGMKYFWDTLLDADLESDALGWQYISGSLPDGREIDRIDNPQFEGYKFDPNGEYVRRWLPELARLPTEWIHHPWNAPESVLQAAGIELGSNYPLPIVGIDAAKVRLLEALSQMWQQEAASRAAMENGTEEGLGDSSESAPIAFPQDIQMEERPEPVRNNPPHGTRRYQDQMVPSITSSHVRVEEEETSSDLRNSAADSRAEVPINVTTQQNARETVNQGVLLNTNRNTRVQNNPTTWLRNAAEDSTAESSSSTRRERDGGVVPVWSPPASNFSEQFVDDENGIGTGSSYLQRQHPQSHQLMNWTRLPQTG

SEQ ID NO: 3530 - protein, 110 aa, Glycine max
LISCPAATTVNRAEAGMVAPFTVLKTMAGFPTRKTNNDITSIASNGGREQCMQVWPPGGKTKSETLCYLPDLDDAQLATVVEHLLRQGRIPCLEFESEHGFAHREHSRSP

SEQ ID NO: 3531 - protein, 398 aa, Candida albicans SC5314
MTVEYETKQLTPAQIKIILDTVPILEEAGETLTQKFYQRMIGNYDEVKPFFNTTDQKLLRQPKILAFALLNYAKNIEDLTPLTDFVKQIVVKHIGLQVLPEHYPIVGTCLIQTMVELLPPEIANKDFLEAWTIAYGNLAKLLIDLEAAEYAKQPWRWFKDFKVTRIVQECKDVKSVYFTPVDKDLLPLPKPERGQYLCFRWKLPGEEFEISREYSVSEFPKENEYRISVRHVPGGKISGYIHNNLKVGDILKVAPPAGNFVYDPATDKELIFVAGGIGITPLLSMIERALEEGKNVKLLYSNRSAETRAFGNLFKEYKSKFGDKFQAIEYFSEDNNTDDKIVIDKAFNRKLTTDDLDFIAPEHDVYLVGPREFMKDIKEHLGKKNVPVKLEYFGPYDP

SEQ ID NO: 3532 - protein, 370 aa, Arabidopsis thaliana
MALMKKSLSAALLSSPLLIICLIALLADPFSVGARRLLEDPKPEIPKLPELPKFEVPKLPEFPKPELPKLPEFPKPELPKIPEIPKPELPKVPEIPKPEETKLPDIPKLELPKFPEIPKPELPKMPEIPKPELPKVPEIQKPELPKMPEIPKPELPKFPEIPKPDLPKFPENSKSEVPKLMETEKPEAPKVPEIPKPELPKLPEVPKLEAPKVPEIQKPELPKMPELPKMPEIQKPELPKLPEVPKLEAPKVPEIQKPELPKMPELPKMPEIQKPELPKMPEIQKPELPKVPEVPKPELPTVPEVPKSEAPKFPEIPKPELPKIPEVPKPELPKVPEITKPAVPEIPKPELPTMPQLPKLPEFPKVPGTP

SEQ ID NO: 3533 - protein, 232 aa, Zea mays
MEYAAVGYGYGYGYDERQEPAESADGGGGGDDEYATVLSAPPKRPAGRTKFRETRHPVYRGVRRRGPAGRWVCEVREPNKKSRIWLGTFATPEAAARAHDVAALALRGRAACLNFADSARLLQVDPATLATPDDIRRAAIQLADAASQQDETAAVAADVVAPSQADDVTAAAAAAAAMYGGGMEFDHSYCYDDGMVSGSSDCWQSGAGAGGWHSIVDGDDDDGASDMTLWSY

SEQ ID NO: 3534 - protein, 181 aa, Clostridium acetobutylicum ATCC 824
MSVYDFKAKTIEGKEVSLDTYKGKVLIIANTASKCGFTPQYEGLEKLYKEYKDKGLEILGFPSNQFAEQEPGDNNEVKNFCKLNYGVTFQLFEKTDVRDENAHPLFNYLTENAPFKGFDLNHPTGKMLSEVLEKNFPKFLEGNSVKWNFTKFLIDRDGNVVKRFEPTSEPSDMVKDIEKLL

SEQ ID NO: 3535 - protein, 239 aa, Arabidopsis thaliana
MGRGKIAIKRINNSTSRQVTFSKRRNGLLKKAKELAILCDAEVGVIIFSSTGRLYDFSSSSMKSVIERYSDAKGETSSENDPASEIQEMYIVTLEKYAYSEELVLDRQMMGEELSGLSVEALQNLENQLELSLRGVRMKKDQMLIEEIQVLNREGNLVHQENLDLHKKVNLMHQQNMELHEKVSEVEGVKIANKNSLLTNGLDMRDTSNEHVHLQLSQPQHDHETHSKAIQLNYFSFIA

SEQ ID NO: 3536 - protein, 289 aa, Plantago major
  misc_feature (104)..(104): Xaa can be any naturally occurring amino acid
MAKTIVDSDYLRDVEKARRELRALISNKNCAPIMLRLAWHDAGTYDVSTKTGGPNGSIRNEEELTHGANNGLKIALEFCEQVKSKCAKISYADLYQLAGVVAVXVTGGPTITFVPGRKDSKISPREGRLPDAKKGAPHLKDVFYRMGLSDKDIVALSGGHTLGRAHPERSGFEGPWTAEPLKFDNSYFIELLQGESEGLLKLPSDLALLDDPEFRRYVELYAKDEEAFFKDYAESHKKLSELGFTPSPAAGVKAIVKDSTVLAQSAVGVAVAATVVILSYLYEVRRKMK

SEQ ID NO: 3537 - protein, 124 aa, Borrelia afzelii
MALNKEDILTWLEGAKTMEVVELVTAIEEKFGVTAAVATSVGGAASTGSIDSEEQTEFDVILMSFGDSKINVIKEVRSITGLGLGEAKALVESAPKAIKEGLSKSDAEELKKKLEAVGAKVEVK

SEQ ID NO: 3538 - protein, 294 aa, Saccharomyces cerevisiae
MKTLVHVASVEKGRSYEDFQKVYNAIALKLREDDEYDNYIGYGPVLVRLAWHISGTWDKHDNTGGSYGGTYRFKKEFNDPSNAGLQNGFKFLEPIHKEFPWISSGDLFSLGGVTAVQEMQGPKIPWRCGRVDTPEDTTPDNGRLPDADKDAGYVRTFFQRLNMNDREVVALMGAHALGKTHLKNSGYEGPGGAANNVFTNEFYLNLLNEDWKLEKNDANNEQWDSKSGYMMLPTNYSLIQDPKYLSIVKEYANDQDKFFKDFSKAFEKLLENGITFPKDAPSPFIFKTLEEQGL

SEQ ID NO: 3539 - protein, 461 aa, Oryza sativa (japonica cultivar-group); identical to SEQ ID NO: 200

SEQ ID NO: 3540 - protein, 468 aa, Triticum aestivum
MHPAHPPRGVLAVVDSRTGKRYEVKVSEDGTVRATDFKKITAGKDDKGLKTYDPGYLNTAPVRSSICYIDGDEGILRYRGYPIEEVAESSSFVEVAYLLMYGNLPTQSQLAGWEFAISQHSAVPQGLLDIIQSMPHDAHPMGVLASAMSTLSVFHPDANPALRGQDLYKSKQVRDKQIVRVLGKAPAIAAAAYLRLAGRPAVLPSNNLSDSENFLYMLDSLGNKEYKPNPRLARVLDILFILHAEHEMNCSTAAVRHLASSGVDVFTALSGAVGALYGPLHGGANEAVLKMLNEIGAVENIPDFIEGVKNRKRKMSGFGHRVYKNYDPRAKVIRKLAEEVFSIVGRGPLIEVAVALEKAALSDDYFIKRKLYPNVDFYSGLVNRVLGFPSDFFPVLFAIPRMAGWLGHWKESRDDPGNKIMRPRQVYTGVWLRHYTPVRERVASNQGEELGQIATSNATRRRRAGSSL

SEQ ID NO: 3541 - protein, 363 aa, Buchnera aphidicola
MKQKYRIAILPGDGIGPEVMREAYKILSILKDHFSLSLEIQEFNIGGSAIDQEGIALPKKTLLGCQNSDAILFGSVGGKRWDHLPINERPERASLLPLRKHFNLFANLRPAKLYSELQHLSPIRSNIIKNGFDILCVRELTGGIYFGKPSDRVKKNNVEYAFDTEVYYDYEINRIAHLAFQLARTRKFKVCSIDKSNVLNSSILWREVVEKVSKMYPDVHLSHLYIDNATMQIIKNPNQFDVLLCSNLFGDIISDECAVITGSIGMLPSASFNEKNFGLYEPAGGSAPDIAGKNTANPIAQILSLSMLVRYGMKLNKIADKIDDAVALSLKAGYRTADISNDNNFLKTNEMGDVIANFLINGK

SEQ ID NO: 3542 - protein, 278 aa, Desulfitobacterium hafniense DCB-2
VHIEAVHALAHGHSSMRFTPRARSRRKAAAVRRGEHERKWEQRTQCARRGAALLRCRARLRRALHVRSIEDAHLRHWRPARQGEPRMHRPDPTPSARRSRGRRAAATLLAVAALALSAFAHADEFVLQSADLREGEQVPALHLFPACAGGNVSPTLEWKNPPEGTRSFAITVFDPDAPTGNGWWHWALVNLPADTAALPRGAKPPAGAMALRNDFGVAGYSGPCPPPGKTHRYEFTVWALKSDKLKLDAKAQAMLGGAMARADALGHATITVKYSRPK

SEQ ID NO: 3543 - protein, 406 aa, Vibrio vulnificus YJ016
MSVTASQVHGAVQTLTQSSDTLFLLLGAIMVFLMHAGFAFLEVGTVRHKNQVNALVKILADFGISTLAYFFIGYWVAYGAHFFADAETLAQGNGYELVKFFFLLTFAAAIPAIVSGGIAERARFYPVLIATFFTVGIVYPLFEGIIWNGNFGVQAWFEATFGVGFHDFAGSVVVHGVGGWIALVAVIFLGMRRGRVRAGKHTNFAPSNIPFLALGAWILCVGWFGFNVMSAQTLNGISGLVAMNSLMAMAGGIVAALIAGKNDPGFIHNGPLAGLVAVCAGSDLMHPLGALVTGSVAGVLFVYLFTYLQNKTKIDDVLGVWPLHGVCGAWGGIAAGIFGQSSLGGLGGVSFTVQLLGTLLGISVALIGAGIVYGAINRFSGLRLSQEDEFNGADLAIHKISSVNAE

SEQ ID NO: 3544 - protein, 206 aa, Zea mays
  misc_feature (171)..(171): Xaa can be any naturally occurring amino acid
MATSFQGTTTKCNACDKTVYLVDKLTADNRVYHKACFRCHHCKGTLKLANYNSFEGVLYCRPHFDQLFKRTGSLDKSFEGTPKVVKPERNVGNENAIKVSSAFAGTREKCFGCTKTVYPIERVTVNNTMYHKSCFKCCHGGCTISPSNYIAHEGKLFCKHHHTQLIKEKGXSASSRTITTRRHRVPGQWMMKTRSISQSLRISRDE

SEQ ID NO: 3545 - protein, 364 aa, Buchnera aphidicola
MKKKYRIAVLPGDGIGPEVMQEAYKILNILKDHFLLPLEMKEFNIGGIAIDQEGIALPKNTLLGCENSDAILFGSVGGKKWDYLSIDKRPERAALLPLRKHFNLFSNLRPAKLYADLKYLSPLRSNIIKDGFDILCVRELTGGIYFGKPNGHSKKNDIEYAFDTEVYYDYEISRIAHLAFQLARNRKKKVCSLDKSNVLKSSILWKEIVEKISKNYPDVHLSHLYIDNAIMQIIKDPSQFDVILCSNLFGDIVSDECAAITGSIGMLPSASLNEKNFGLYEPAGGSAPDIAGKNIANPIAQILSVSMLVRHGMNLKKIADKIDESVVSVLKQGYRTADISNNSHNYLKTSEMGDIIANFLINGK

SEQ ID NO: 3546 - protein, 195 aa, Triticum aestivum
  misc_feature (110)..(110): Xaa can be any naturally occurring amino acid
  misc_feature (130)..(130): Xaa can be any naturally occurring amino acid
  misc_feature (132)..(132): Xaa can be any naturally occurring amino acid
  misc_feature (143)..(143): Xaa can be any naturally occurring amino acid
  misc_feature (145)..(145): Xaa can be any naturally occurring amino acid
  misc_feature (156)..(156): Xaa can be any naturally occurring amino acid
  misc_feature (161)..(161): Xaa can be any naturally occurring amino acid
MAPTVMASSATSVAPFQGLKSTAGLPVSRRSNGASLGSVSNGGRIRCMQVWPIEGIKKFETLSYLPPLSTEALLKQVDYLIRSKWVPCLEFSKVGFIFREHNASPGYYDXRYWTMWKLPMFGCTDATQVXNXVEESRKDYPDXYXRIIGFKTCSSXCVNFXANLQDPERLKIITQHNAIFKAWFLHYFNFQKKSS

SEQ ID NO: 3547 - protein, 199 aa, Aspergillus nidulans FGSC A4
MATGPATQSLKCVVTGDGAVGKTCLLISYTTNAFPGEYIPTVFDNYTASVMVDGRPISLGLWDTAGQEDYDRLRPLSYPQTDVFLICFSIVSPPSFDNVKSKWFPEIEHHAPNVPIILVGTKLDLRDDPAQLESLRMRKQEPVTYEQALAVAKEIRAHKYLECSALTQRNLKSVFDEAIRAVLNPRPATKQRNKKCTIL

SEQ ID NO: 3548 - protein, 170 aa, Zea mays
  misc_feature (77)..(77): Xaa can be any naturally occurring amino acid
  misc_feature (133)..(133): Xaa can be any naturally occurring amino acid
MAASSTATSVHDFIVKDASGKDVDLSTYKGKVLLIVNVASQCGLTNSNYTELAQLYEKYKDQGFEILAFPCNQFGGXQEPGTNEEIVQFACTRFKAEYPIFDKVDVNGNNAAPIYKFLKSSKGGLFGDSIKWXNFSKFLVDKEGRVVDRYAPTTSPLSIEKDIKKLLGSS

SEQ ID NO: 3549 - protein, 497 aa, Vitis labrusca x Vitis vinifera
MKKSSAGAPSKPTKPAWVLPYKTQDLRTLYTIGQKLGQGQFGTTFLCTDKATGHNYACKSIPKRKLFCKEDYDDVWREIQIMHHLSEHPNVVRIRGTYEDPVFVHLVMELCEGGELFDRIVQRGHYSEREAAKLIKTIVGVVEGCHSLGVMHRDLKPENFLFDTTAEDAALKATDFGLSVFYKPGETFSDVVGSPYYVAPEVLCKHYGPEADVWSAGVILYILLSGVPPFWAETETGIFRQILQGKLDFESEPWPCISETAKELLRKMLDRNPKKRLTAHEVLSHPWVVDDRMAPDKPLDSAVLSRLKQFSAMNKLKKMALRVIAEGLSEEEIGGLRELFKMIDTDNSGTITFDELKDGLKRVGSELMESEIRDLMNAADIDNSGTIDYGEFLAATVHLNKLEREENLVSAFSFFDKDKSGYITIDELQQACKEFGLSEAHLDDMIKEIDQDNDGQIDYGEFAAMMRKGNGGIGRRTMRNNLNLGDVLGIPDMRLTN

SEQ ID NO: 3550 - protein, 174 aa, Triticum aestivum
MAPAVMASSATTVAPFQGLKSTAGLPVGRRSSGSLGSVSNGGRIRCMQVWPIEGIKKFETLSYLPPLSTEALLKQVDYLIRSKWVPCLEFSKVGFVFREHNSSPGYYDGRYWTMWKLPMFGCTDATQVLNEVEEVKKEYPDAYVRVIGFDNLRQVQCVSFIAFRPPGCEESGKA

SEQ ID NO: 3551 - protein, 426 aa, Vibrio parahaemolyticus RIMD 2210633
MDLAFDRHHIWHPYTSTLTPLTCYPVSSANGVHIKLEDGTELVDGMSSWWSTIHGYNHPHLNQAAHQQIDQVSHVMFGGITHQPAISLCKKLLSLAPNNLEHVFLADSGSVAVEVSLKMALQYWHAKGERRPKFLTLRHGYHGDTFAAMSVTDPDNSMHSLYKGFLPEHIFAQSPTCGYWDEWKPEDLADFEHKIDSHHQELAAVILEPIVQGAGGMRIYHPEFLKGVRRLCDKYDLLLIADEIATGFGRTGKLFACEHADIQPDILCVGKALTGGYMTLSATLASKHVADTVCGGDAGCFMHGPTFMGNPLACAVATASLELIEQGDWQQQTQQIEMLFSELLPKLEEYDLVKNTRWLGAIGVVETHRPVNMETIQALFVEHGVWIRPFGNLIYMMPPFISKPEDIEKLINAIDAALQRKDCFAS

SEQ ID NO: 3552 - protein, 160 aa, Acinetobacter sp. ADP1
MTNLYQFEAELLEGDTKSLADYQGKVLLIVNTASKCGFTPQFAGLEKIYEKYKDRGFEVLGFPCNQFGGQDPGSNNEIGAFCQRNYGVSFPMFAKVDVKGPEAHAIFRYLTREAKGILGSENIKWNFTKFLVGRDGKVLNRYAPTTKPESLEEDIEKALA

SEQ ID NO: 3553 - protein, 138 aa, Zea mays
MAAAARQRGTVKWFNDTKGFGFISPEDGSEDLFVHQSSIKSEGFRSLAEGEEVEFSVSEGDDPGHMARDCSSGGGGYGGGGGGGGGGCYNCGQAGHMARDCPSGGGGGGGRFGGGGGGGDRSCYNCGEAGHIARDCPT

SEQ ID NO: 3554 - protein, 489 aa, Glycine max
MESRTKSNPQLTRALCYGNDGKQQGRSPSVIVIGGGMAGIAAARALHNASFQVVLLESRDRIGGRIHTDYSFGFPVDLGASWLHGVSNENPLASVIGRLGLPLYRTSGDNSVLYDHDLESYALFDMDGKQVPPELVTKVGEIFETILQETDKIRQESSEDMSVLRGLSIVFDRKPELRLEGLAHKVLQWYLCRMEGWFAADSDTISLKGWDQVLLPGGHGLMVRGYLPVINTLAKGLDILLGHRVTKVVRRYNGVKVTVESGKTFFADAAVIAVPLGVLKAKKILFKPKLPDWKEAAIADLGIGLENKIILHFENVFWPNVEFLGVVADTSYGCSYFLNLHKAAGHAVLVYMPSGQLAKDVEKMSDEAAVNFAFMQLKKILPDASSPIQYLVSRWGSDINSLGSYSYDAVGKPHELYERLRVPVDNLFFAGEATSMSYPGSVHGAFSTGMMAAEDCRMRVLQRYGEVDLFQPVMGEEASLSIPLQISRL

SEQ ID NO: 3555 - protein, 291 aa, Exiguobacterium sp. 255-15
MISVAKDYYRTLGVEKTASNQEIKRAYRKLAKQYHPDVNQEASADQRFKDIQEAFDVLGDEEKRAQYDQYGSNYERMAGAGYGQSADYDDLFRQFNGRQSRTAGSAGQSFGFEDMFGSFFSQEPEETDEELELTVPLSHLSQNDKVTIRLATGAIQMSLPKDLYDGKKVRLRGKSSKRNRKGIAGDVYVTIHLKDDDQFRRQETDVISTVRVYPTVFVLGGEVVADTLEGKRVKLKIKPGTKPGARLRIPNRGLSNREGHRGALLVQLEVKLPEMEPSFYEEWENRLSVKE

SEQ ID NO: 3556 - protein, 146 aa, Triticum aestivum
  misc_feature (103)..(103): Xaa can be any naturally occurring amino acid
MFRTNERLPGAVLQAQARVLERLRGVSIGSSTSRPSITLDEFSATDVGSDEESLENTSISSTTSNRSPGLSKSAFLRLQIEIFEAKKDDNREASPECSICLRXFYDGDELIRLRCRHRFHSTCLEPWVRKCADCPYCRTNIRSRPR

SEQ ID NO: 3557 - protein, 124 aa, Borrelia garinii
MALSKEDILTWLEGAKTIEVVDLVTAIEEKFGVTAAIAAVGGGAASTGSTDSEEQTEFDVILMSFGDSKINVIKEVRSITGLGLGEAKALVESAPKAIKEGLSKSDAEELKKKLEAVGAKVEVK

SEQ ID NO: 3558 - protein, 321 aa, Brassica napus
  misc_feature (215)..(215): Xaa can be any naturally occurring amino acid
MSSLVFKLFLFVSLFQISISARKLAQDEPNQFQSLKYHKGALLSGKISINLIWYGEFKPAQRAIISDFITSLSHSSSKTPNQPSVATWWKTTEKYYKLAAGDKTPSPSLSLTLKSQILDETYSLGKSLTDRDIRKLASKGDQYDAVNVVLTSADVAVTGFGMSRCGTHGHARGNTGKRGSKFAYIWVGNSETHWHCVTQFPGQCAWPFHAPVYGXPQNPPLVAPNNDVGLDGMVINLASLLAGTATNPFGNGYYQGPQNAPLEAASACPGVYGKGAYPGYAGNLLVDTTTGGSFNAYGANGRKFLLPALYDPTTSDCSTMV

SEQ ID NO: 3559 - protein, 408 aa, Zea mays
MASAPGEVPSHFLCPISLQLMREPVTLPTGISYDRAAISRWLATPAPAGGRTCPVTRVPLPPQPQLTPNHTLRRLIHAWLASLSPEAEVNEDVAALRGPVPGAEAVVALLSDAAGAQVEALKRLRELVAECEDSRTVLESQDGVFDALSRVVSSADACSTAREEAVGLLASLRIPEPELAGVVARHSNLGDALTAVLRSSNLKSRANAALLVRSLSEVAWPAWVIGLSQELLAEVVRVVRDRVSTQATKAALHALAALCPYGRTRVKIVGVGAVPAIVDLLLDDPERRVNELALVALDRLCTCAEGRAELVAHAAGLAVVGKKVLRVSETASERAVRVLRSVARHAATPAVLQEMVESGVVAKLCAALWSQQCGLRTKQKAHEVLKLHSRTWRSSPCLSPKFLGLYPS

SEQ ID NO: 3560 - protein, 571 aa, Glycine max
  misc_feature (196)..(196): Xaa can be any naturally occurring amino acid
  misc_feature (209)..(209): Xaa can be any naturally occurring amino acid
MCGILAVLGCVDNSQTKRARIIELSRRLRHRGPDWSGIHCYEDCYLAHQRLAIVDPTSGDQPLYNEDKTVIVTVNGEIYNHKQLRQKLSSHQFRTGSDCEVIAHLYEEHGEEFVNMLDGMFAFILLDTRDKSFIAARDAIGITPLYLGWGHDGSTWFASEMKALSDDCERFISFPPGHIYSSKQGGLRRWYNPPWXFSEDIPSTPYDQXPFCLEVLVWHAVLQKLWNGMHHGLLSGGLDSSLVAAVVNRDLAESESARQWGSQLHTFCIGLKGSPDLKAAKEVADYLGTRHHELYFTVQEGIDALEEVIYHIETYDVTTIRASTAMFLMSRKIKALGVKMVLSGEGSDEIFGGYLYFHKAPNKKEFHEETCRKIKALHLYDCLRANKSTAAWGVEARVPFLDKEFINVAMSIDPEWKMIRPDLGRIEKWVLRNAFDDDKNPYLPKHILYRQKEQFSDGVGYSWIDGLKDHANKQVTDATMMAANFIYPENTPTTKEGYLYRTIFEKFFPKNAAKATVPGGPSVACSTAKAVEWDAAWSKNLDPSGRAALGIHDAAYDAVDTKIDEPKNGTL

SEQ ID NO: 3561 - protein, 323 aa, Candidatus Blochmannia floridanus
MNQLDNLKKFSKISADTGDVDLIRTYQIQHATTNPSLILKSPLFTTYLKLFNDAIDYAQKIGGNQNTKITNASDRLIVNIGSEILANISGYISTEIDAQLSFNTDLTIKKAHKLITMYQKKNIDTSRVLIKIAATWEGIQAAEELEKSGIKCNLTLVFSFAQARACAERNIYLISPFIGRIYDWYNQRNLIKTSYINDDPGIQSIKKIYHYYKTYGYNTIIMGASFRRLEQILALSGCDYLTISPHFLKQLYQNTNSVTRQLFPPKTIISHHIPVLDQSEFFQEHNKNQMAVEKLNEGIQQFSIDQQKLHKLLLNNLNVQLQK

SEQ ID NO: 3562 - protein, 363 aa, Buchnera aphidicola
MKQKYRIAILPGDGIGPEVMREAYKILNILKNDFLLPLEFQEFNIGGIAIDNEGLALPKKTLLGCENADAILFGSVGGKKWDTLPIDQRPERAALLPLRKHFNLFANLRPAKLYSELEYLSPLCSKITKNGFDILCVRELTGGVYFGHPHGRVKKDDIEYAFDTEVYYDYEINRIAHLAFQLARNRKNKVCSIDKSNVLNSSLLWKEIVEKVSNSYSDVRLSHLYIDNATMQIIKNPNQFDVLLCSNLFGDIISDECAAISGSIGMLPSASLNENNFGLYEPAGGSAPDIEGKNIANPIAQILSVSMLVRYGMHLTKIADQIDKSVISVLKRGYRTADISNNNNYLKTHEMGDVIADALINGK

SEQ ID NO: 3563 - protein, 309 aa, Salmonella enterica subsp. enterica serovar Typhi Ty2
MALESGIAQLVEEFIAAGRPSSREQNIDDRRAGYIASTTLAGETETRVQVEDIELDAMTFRVVSPLNATGKLPCIIYYHGGCFVSGGFATHDNQLRQLAFYSRCRVIAAQYRLAPEHTFPAAHNDAETGANTIWKYAQKLGIDRENITLAGDSAGGHLALVTALRLKAARQWQPAQLILIYPMLDATARFASYTCNGLDYIITRDTLLSGYEMYMPRTDPLHPEASPLWREDFAGLPSTHIITAEFDPLRDEGEALYQRFQEQGVECTCQRYLGVIHGFFQLGGVSKTARDAIRDVAWRVVSPSTSKMT

SEQ ID NO: 3564 - protein, 252 aa, Glycine max
  misc_feature (108)..(108): Xaa can be any naturally occurring amino acid
MAEERFTGVVQWFNNGKGFGFIKPDDGGEDLFVHQSSIRSDGYRTLLEGDRVEFAIATGDNDKTKAVDVTGVDGAPLQPRAAAGNNNRAAGSGFGFGARRNGGGGAAXYQCGEFGHLARDCNRSSNSGGGGGGSGGGCFNCGGFGHLARDCVRGGGGSVGIGGGGGGGSCFRCGGFGHMARDCATGKGNIGGGGSGGGCFRCGEVGHLARDCGMEGGRFGGGGGSGGGGGKSTCFNCGKPGHFARECVEASG

SEQ ID NO: 3565 - protein, 116 aa, Aspergillus nidulans FGSC A4
MADVEMKEASSSKTKAVSKAEGSGDGKKKFEVKKWNAVALWAWDIVVDNCAICRNHIMDLCIECQANQGSSTTEECTVAWGICNHAFHFHCISRWLKTRQVCPLDNKDWEFQKYGR

SEQ ID NO: 3566 - protein, 365 aa, Buchnera aphidicola
  misc_feature (128)..(128): Xaa can be any naturally occurring amino acid
  misc_feature (154)..(154): Xaa can be any naturally occurring amino acid
MKTKYRISVLPGDGIGPEVMREAYKILNILKNHFSLPLEIKEFNIGGAAIDQEGVALPKKTLLGCENSDAILFGSVGGKKWDHLPIDKRPERASLLPLRKHFNLFANLRPAQLYSELKYLSPLRSDIXIKNGFNILCIRELTGGIYFGKPTGRXLKKNNIEYAFDTEIYYDYEINRIAHLAFQLAQTRNYKVCSIDKSNVLNSSVLWRETVQKVSKNYPDVHLSHLYIDNATMQIIKDPNQFDILLCSNLFGDIVSDECAIITGSIGMLPSASLNEKKFGLYEPAGGSAPDIEGKNIANPIAQILSVSMLVRYGMNLKKIADKIDQSVISVLKKGYRTADISNNNNYLKTNEMGDVIANTLISGE

SEQ ID NO: 3567 - protein, 195 aa, Nanoarchaeum equitans Kin4-M
MAHGPRYRVPFRRRREGKTVYRKRLKLLLSGKPRLVVRRFNSNILAQLVEYDPKGDRVIFTIHSNVLKKYGWKGHRGNLPSAYLVGLIAGYEALKRGYKEAVLDIGRYKSTKGNALYAVLKGALDAGLNIPHSETILPSEDRIRGEHIANYAKMLKENEELYKKQFSRYLKEGLDPEQLPNHFEEVKQKIISQYQ

SEQ ID NO: 3568 - protein, 363 aa, Buchnera aphidicola
MTRKYRIAVLPGDGIGPEVMREAYKILNILKDDFSLPLEIKEFNIGGAAIDQEGVALPKKTLLGCENSDAILFGSVGGKKWDNLPINQRPERASLLPLRKHFNLFANLRPAQLYSELKNLSPLRSNIIKNGFNILCIRELTGGIYFGKPTGRLKKNNIEYAFDTEIYYNYEINRIAHLAFQLSQTRNYKVCSIDKSNVLNSSILWREIVKKVSKHYPDVHLSHLYIDNATMQIIKDPNQFDVLLCSNLFGDIISDECAMITGSIGMLPSASLNEKKFGLYEPAGGSAPDIEGKNIANPIAQILSLSMLVRYSMNLKKIADKIDQSVISVLKKGYRTADISNNNDYLKTNEMGDVIASALISGE

SEQ ID NO: 3569 - protein, 162 aa, Triticum aestivum
MEGRMFGLETPLMTALQHLLDVPDGEAGGPGNAAGEKQGPTRAYVRDARAMAATPADVKELPGAYAFVVDMPGLGSGDIKVQVEDERVLVISGERRREEKEDAKYLRMERRMGKMMRKFVLPENADMEKISAVCRDGVLTVSLEKLPPPETKKPKTIQVQVA

SEQ ID NO: 3570 - protein, 335 aa, Methanopyrus kandleri AV19
MNASPTVVVIPGDGIGPEVIDAALKVVRAVLGDELEIVEEQAGYSLWKKRGVTIEDETIERCREADAMLFGACTTPEDPEAKSPIVTLRKELGLYANVRPARSWPVPRPVDTEFDLVIVRENTEGLYTGCECEIHDGVTVALRKISEEGTRRVAEVACDLAEERSGRVTIVHKANVLKLTCGTFKRVAAETVERRGLEWDDEYVDAAAYKLVREPDSFDVILTSNLFGDILSDLAAGLMGSLGLAPSANLGDDAALFEPVHGSAPDIAGKGIANPVAAILSAAMMLDHLGYGEEARIIERAVEEVLREGVRTPDLGGSATTEEVAEAIAERVATG

SEQ ID NO: 3571 - protein, 272 aa, Bradyrhizobium japonicum USDA 110
MDNLKTQGISMPKLGLGTFRMQGDACRAAVESALSIGYRHIDTAEMYANEEPIGAALAAARLPRGELHVTTKVWHENLAPDAIRRAFDASLKKLRLDHVDLYLVHWPSRSANWGAVFETLMKLKEEGRTRAIGVANFTTALLKIAVEDIKAPIACNQIEYHAMLDQSKVLAYLNARSIPLVAYCPLAQGRVASDPVLAEIGARHNATAAQVALKWLLDQGGVAAIPKASRRESQQANLDALKIMLDDADRNKIAALPKDRRCVNPGFAPAWD

SEQ ID NO: 3572 - protein, 398 aa, Candida albicans SC5314
MTVEYETKQLTPAQVKIILDTVPILEEAGETLTQKFYQRMIGNYDEVKPFFNTTDQKLLRQPKILAFALLNYAKNIEDLTPLTDFVKQIVVKHIGLQVLPEHYPIVGTCLIQTMVELLPPEIANKDFLEAWTIAYGNLAKLLIDLEAAEYAKQPWRWFKDFKVTRIVQECKDVKSVYFTPVDKDLLPLPKPERGQYLCFRWKLPGEEFEISREYSVSEFPKENEYRISVRHVPGGKISGYIHNNLKVGDILKVAPPAGNFVYDPATDKELIFVAGGIGITPLLSMIERALEEGKNVKLLYSNRSAETRAFGNLFKEYKSKFGDKFQAIEYFSEDNNTDDKIVIDKAFNRKLTTDDLDFIAPEHDVYLVGPREFMKDIKEHLGKKNVPVKLEYFGPYDP

SEQ ID NO: 3573 - protein, 2072 aa, Streptococcus mitis
MEKYFGEKQQRFSFRKLSVGLVSATISSLFFMSVLASSSVEAQETKGVHYKYVTESELSSEEKKQLVYDIPTYMENDDETYYLVYKLNSQNQLGDLPNTGSKNEMQALVAGTSLAALGILIFAVSKKKVKNKTVLHLVLVAGIGNGVLISAHALENNLLLNYNTDYELTSGEKLPLPKDISGYTYIGYIKEENITSESKVNNQEKSAATPTKQQKVDYNVTPNFVENPSTVQAMQEEKPVSSTKPTEVQVVEKPLSTELTNPTKEEKQSLDSQVQLSEHKNLEAKKDEKVSPKEKTGVNTLNPQDEVLSGQLNKPELLYREETIETKIDFQEEIQENPDLAEGTVRVKQEGKLGKKVEVIRIFSVNNEEVSREIVSTSTTAPVTRIVEKGTKKAQVIKEQPETGAEHKEVQSGAIVEPAIQPELPAAVVTDKGEPAVQPELPEAVVTDKGVPEVQPALPEAVVTEKGEPAVQPELPEAVVTDKGETEVQPESPDTVVSDKGEPEQVAPLPEYKGPQAGAIVEPEQVAPLPEYTGPQAGAVVEPAIQPELPEAVVTDKGEPEVQPALPEAVVTEKGEPAVQPELPEAVVTDKGETEVQPESPDTVVSDKGEPEQIAPLPEYTGVQAGAIVEPEQVEAPKEYTGVQAGAIVEPEQVAPLPEYTGVQAGAIVEPEKVEAPKEYTGVQAGAIVEPEQIAPLPEYTGPQAGAIVEPEQVAPLPEYTGVQAGAIVEPEQIAPLPEYTGPQAGAIVEPEQVDPLPEYKGNIEQLKPETPVEKPKETDPEKTLELRNVSDIELYSHQTNGTYKQHVSLDSVPSNPDTYFVKVKSSAFKDVYLPVASISEELKDGRTFYKITARVDKLQQEIDHKYVENFSFYLAKKTTEETTNFTSFSNLVHAINQNLGGTYYLSASLNANEMELESDAKSYIKGNFTGRLIGEKDGKHYAIYNLKKPLFNNLSNATVEKLSLKNVSISGKNDIGSLANEAKNGTKINQVHVDGVLAGERGIGGLLAKSEQSSITESSFKGRIVNTYETTATYNIGGLVGHLTGENASIAKSKATIAISSNANSSDQTVGGLVGLVDNDAHVRDSYAEGDINNVKQFGEVAGVAGYLWDRTSGKEQHAGSLTNVLSDVNVTNGNAITAYHYNNMKVTATFSNKANRVIKVALENDEVVSKESFEERGKMLDDSQIASKKAEINPLTPPTVEPLSTSGNKESDFSKVANYQAKRALAYKNIEKLLPFYNKATIVKYGNLVNENSLLYQKELLSSVMMKDNQVITDIVSNKQTANKLLLHYKDHSSEKLDLKYQTDFAKLAEYSLGDTGLLYTPNQFLYDQNSIIKQVLPELQQVSYNSEAIRNTLGISPEVKLTELYLEDQFAKTKDHLEESLKKLLSADAALVENNQVMTGYIVDKIKRNKEALLLGMSYLERWYNFSYDKVSAKDLVMYHLDFFGKGNASPLDTLIELGKSGFNNLLAKNNVDTYAISLASHHGTKDLFNTLENYRKVFLPNTSNNEWFKSQTKAYIVEEKSNIPEVKAKQEKAGSKYSIGVYDRITNDSWKYRNMVLPLLTLPERSVFVISTISSLGFGAYDRYRNKDHQASGDLNSFVEKSAHETAERQRDHYDYWYRILDEKGREKLYRNILLYDAYKFGTDNTEGKATEVADFDNPNPAMKHFFGPVGNKVGHNGHGAYATGDAVYYMGYRMLDKDGAITYTHEMTHDSDQDIYLGGYGRRSGLGPEFFAKGLLQAPDHPEDATITINSILRHLKSDSKEGERLQVLDPTTRFKDATDLQKYVHNMFDVVYMLEYLEGQSIVNKLSVYQKMEALRKIENKYVKDPSDGNKVYATNVVRDLTIEEAEKLHSFNDMIDNNILSSREYASKTYERNGYFTIKLFAPIYAALSNDDGTPGDLMGRRMAYELLAAKGFKDGMVPYISNQYEDLAKQNGKKITIYGKERGLVTDKLVLEKLFDGKYSSWAAFKKDMYQERIAQFNHLTKVTFKDPTQSWMSNATKTIQRVNDLQQLMDEAVLKDAEERNYYYWNNYNPETDSAVHKLKRAIFKAYLDQTDDFRSSIFENKK

SEQ ID NO: 3574 - protein, 400 aa, Candida albicans SC5314
MTVASASIINNYFESKPLTPEHIQIIIDSVPILEHLDVQLTEKFYKRLLKQNPEFKPFFNETHQKLLRQPRIMIHFLIQYAKNIQDLTPMIDFIKKIASKHVGLQVKPEHYPKLGQVLINVIINLFPKQLVHDEFIEAWTLAYQNLANLLIKLESEQYVEKPWYGFKQFKVTRLQRECSDVKSLYITPVDGSPIPKPKRGQYLCMRWLLPGEKHEITREYSISEYPKNNEYRITVRYIPGGKVSNYIHNNINVGDIVYSGPPCGDCVYESSSKNLVFLAGGNGVTALLPMIEAGLTEGRQVKLLYSNRSTDSRSFGKLFQSYKLQYGDRFQVVEFLSRGRTIDPIDKFYRRSLTLEDLDFIVPEDDVYLIGPRTYMKMIEDYLKDRNITVKLDYFGPREI

SEQ ID NO: 3575 - protein, 181 aa, Zea mays
  misc_feature (110)..(110): Xaa can be any naturally occurring amino acid
MSYYGDRRAESSIVEAFTLSPLPYPVILVLLMVTLLLGASWFFTYDDFIEEASQQLSWALLGVPIALVLLIRWISSVDSFEGYLGFYPTESRWKGRYERGPAEGSSPWGXVALLVLLLLVLASFHSTIHDMWGPVNGCSDCSPDSCSVPRAHVCACATGCCLIDRWIDDSMYIFVRGDAAG

SEQ ID NO: 3576 - protein, 400 aa, Zea mays
MVLEATMICIDNSEWMRNGDYAPSRFQAQADAVNLICGAKTQSNPENTVGVMTMAGKGVRVLVTPTSDLGKILACMHGLEVGAEANLAAAIQVAQLALKHRQNKRQQQRIIAFIGSPVKYDKKVLETIGKKLKKNNVALDIVDFGESDDEKPEKLEALIAAVNSSDSSHIVHIPPGENALSDVLLSTPIFTGEEGGSGFAASAAAAAATGASGFEFGVDPNVDPELALALRLSMEEERARQEAIAKKAAEDTSNTEHNNVPSSNSDSVMAEGEPASNAAAGDKEQPKDDDDLLQQALAMSMEGGASGSAAVTDSAMAEAGAVDPDLALALQMSVQDANMSSDTDMSKVFEDRTFVSSILNSLPGVDPNDPSVKDLLASLHSQGEQEKKEDTSDKTEDEKN

SEQ ID NO: 3577 - protein, 374 aa, Streptomyces purpurascens
  misc_feature (1)..(1): Xaa can be any naturally occurring amino acid
  misc_feature (31)..(31): Xaa can be any naturally occurring amino acid
  misc_feature (96)..(96): Xaa can be any naturally occurring amino acid
  misc_feature (163)..(163): Xaa can be any naturally occurring amino acid
  misc_feature (196)..(196): Xaa can be any naturally occurring amino acid
  misc_feature (308)..(308): Xaa can be any naturally occurring amino acid
  misc_feature (312)..(312): Xaa can be any naturally occurring amino acid
XSSSSPGEPLEPTDQDLDVLLKNLGNLVTPXALRVAATLRLVDHLLAGADTLAGLADRTDTHPQALSRLVRHLTVVGVLEGGEKQGRPLRPTRLGXLLADGHPAQQRAWLDLNGAVSHADLAFTGLLDVVRTGRPAYAGRYGRPFWEDLSADVALADSFDALXSCDEDLAYEAPADAYDWSAVRHVLDVGGGNGGXLAAIALRAPHLRGTLVELAGPAERARRRFADAGLADRVTVAEGDFFKPLPVTADVVLLSFVLLNWSDEDALTILRGCVRALEPGGRLLVLDRADVEGDGADRFFSTLLDLRXLTFXGGRVRTRDEVVDLAGSAGLALASERTSGSTTLPFDFSILEFTAVSEEAAPAAQASEALPAQE

SEQ ID NO: 3578 - protein, 112 aa, Bartonella sp. Sb1859nv
NEACLKMLQEIGSVKRIPEFIARAKDKNDPFRLMGFGHRVYKNYDPRAKIMQKTCHEVLKELNIQDDPLLDIAIELENIALNDEYFVEKRLYPNVDFYSGITLKALGFPTEM

SEQ ID NO: 3579 - protein, 89 aa, Zea mays
SRITRAERARAPYVDFLKPIIADGDTGFGGTTATVKLCKLFVERGGAGVHLEDESSVSRNCGHMSVNVRVAVSKHVNRLVAARLQFDVM

SEQ ID NO: 3580 - protein, 424 aa, Glycine max
  misc_feature (207)..(207): Xaa can be any naturally occurring amino acid
HASADAWAVGATRISVLPIIPCSGQLFSFLPSPPFVHSPTPHSDQIHHSFFFPFLQQAQWRRRSLPLLKHLLLSRRIPARSVTYMHRPGDGSPRPVTLIPGDGIGPMVTGAVEQVMEAMHAPVYFEKFEVHGHMKAVPPEVLDSIRKNKVCLKGGLVTPMGGGVSSLNVQLRKELDLYASLVNCFNLPGLPTRHDNVDIVVIRENTXEGEYSGLEHEVVPGVVESLKVITKFCSERIAKYAFEYAYLNNRKKVTAVHKANIMKLADGLFLESCREVATKYPGIKYNEIIVDNCCMQLVSKPEQFDVMVTPNLYGNLVANTAAGIAGGTGVMPGGNVGAEHAVFEQGASAGNVGSDKIREQKKANPVALLLSSAMMLRHLQFPAFADRLETAVEKVILEGKCRTKDLGGTSTTQEVVDAVIDALD

SEQ ID NO: 3581 - protein, 401 aa, Zea mays
MEAVGVTPAPVAAPEKKKLLDLKDPFPAAAAANGGAKASPAAKWAMKKKLVGGDAGYVLEDVPHLTDYMPQLPTYPNPLQDNPAYSVVKQYFVNPDDTVTQKIVVHKTSARGTHFRRAGPRQRVYFQSDEVNAAIVTCGGLCPGLNTVIRELVCGLYDMYGVSSVVGIEGGYKGFYSKNTVALTPKSVNDIHKRGGTVLGTSRGGHDTAKIVDCLQDRGINQVYIIGGDGTQKGASVIYEEVRRRGLKCSVVGVPKTIDNDIAVIDKSFGFDTAVEEAQRAINAAHVEAESAENGIGVVKLMGRNSGFIAMYATLASRDVDCCLIPESPFYLEGKGGLLEFVERRLKDNGHMVIVVAEGAGQDLIARSMNFVDTQEGARTRHGQDHRGHHAPRTSLCFYSV

SEQ ID NO: 3582 - protein, 124 aa, Borrelia afzelii
MALNKEDILTWLEGAKTMEVVELVTAIEEKFGVTAAVATSVGGAASTGSTDSEEQTEFDVILMSFGDSKINVIKEVRSITGLGLGEAKALVESAPKAIKEGLSKSDAEELKKKLEAVGAKVEVK

SEQ ID NO: 3583 - protein, 159 aa, Clostridium acetobutylicum ATCC 824
MSVYDFKAKDISGEEISLSKYEGKVLLIVNTASKCGFTPQYKELEDIYKKLGNEKFEILGFPCNQFANQEPGGSGDIKNFCEINYGVTFPLFEKIDVKGENAHPLFKYLASQAGGILGKEIKWNFTKFLIDKKGDVVDRFAPVTKPSKIKDKIVKLMEE

SEQ ID NO: 3584 - protein, 181 aa, Clostridium acetobutylicum ATCC 824
MSIYDFKVKDINGEDISMEEYRGKALLIVNTASKCGFTPQYEDLEALYKKFKGENFEVLGFPCNQFENQEPGTNNDIKKFCQINYGVTFKIFDKVDVNGENEAPLYRYLKEQAPFKELDESTPTAKIIAAFLREKLPETLIGDSIKWNFTKFLIDKNGRVVNRFESGVEPMEIESYIKALI

SEQ ID NO: 3585 - protein, 1395 aa, Neurospora crassa
MPMGDATPKVRRASGGRCIAFSGLIIVVGPEPGGCISPVWCSGQTTSMPQVEAQEMRPRHEYLIVAPIHLLPQRRDSPLDLRRGGVWGMTTTSRDAYTPLESLFLLRGIAKHGLDQQAFHRIADLLQQNHLIKLAPSYDAARLRPEPLQELFLHLLWDELKQEHDTPGPKPDGDLSPNSKRRRLQPPPLPTLREAHQYVPKIESLYRKLEQTYVNQTLQEIDQYERHYDRLQTEVRVLEQAVARDEEQERRQKIPDGLPAQDGPVAHKQSPALGSVPSPVAVQGPGARLPNGASHGPSPVASPRIASPRLPPPQSQSPRTPSTPQLPIPTPPPPPPPPPPPPPPPPPPIPPQLPPQVSAHIPPRPEVARHASVPSPTTQLPPVRSSPAPLPPTTLPPTLPPTTTAALQPQLVSSPRLGHHNIPRGPITSGPGSPRPMTAGGGIPHVLQPPASFSQAPPQPPQPPKPSTPTGGLPRLDSIAGPSRQSPVLQTAHHPATTLPQPQPLIPGQAQGGQLKWEPPYQPQAGHRPILGPGQQHPHYSPVSQPVQPLHSPRLPSHPPPQQVQQHAVVTRPPQPPPMKPQVLIPPQTGQHYAPPLQPAPNRAMSDSPGPSPVRQPVASNAATGIPRANYQQHPSPYPPYHLPQHLQQGAAVSSPPQSPSAIPPRLTHGLAAPQQQRSPPPLQPQQQQSPQHQPQALQAPPPFSQPVTTSMAPSPSLAPIQSEVQRAYPSPYPPQLPQPSHPPQAHPPQAPHPPQVPHQHPPQAHQVPQVPQASQAPQPHVSRAPQVHPTPHLPHPPQAPLPQVTQAQSPRIPPITHAPQPPVTHAPHVAHPPQQQQQPQQQQQPQQPQQPQQPQPPISQHRPRSQSAATTYSGPRFSPITSVTTTLVPPARLGLGTGTKWVSAASASTPKLPDVRSGGDDIRPPAFEPLSPVQQPAVLPTARQDAARPSPARQPTNETSRARGSIPLVGPQPTPASQARQQAAQKVSKPLDKPTASEQPSTVKEIAKESAKEPEPATSVKNEVDTPRATMDTGDTTADESVAGKRQAARQAKRKRDELSPTPAATPAEATPNGNATPANEKSQQETLATASAAPPDAHRVLWSRGFHKVSASAMEQIVRHRSANMFAAPIREKDAPGYHKVILQPQDLKSIRAAIAHGNRSATQAAAALPGGDPGHMLVWLPQMEELVPPRGIINTAQLDRELAHMFSNAIMYNPDRWHGPGSSFLAEREERTDDNNQPGGHGHGHPGDVLGYKVDEFGVVKDARAMFSEADSLLADLRVAEDGRVKSMMEDGTLQKMPSVNGSQNHSRQASKGGEKAEEEQKDKDKPSGDGDKEKDKDGDVSMIGDKEEEAQADGKVDEEGDGEGTATETETAGGSNGNPSKRRRVTRGEKG

SEQ ID NO: 3586 - protein, 427 aa, Escherichia coli
MADTKAKLTLNGDTAVELDVLKGTLGQDVIDIRTLGSKGVFTFDPGFTSTASCESKITFIDGDEGILLHRGFPIDQLATDSNYLEVCYILLNGEKPTQEQYDEFKTTVTLHTMIHEQITRLFHAFRRDSHPMAVMCGITGALAAFYHDSLDVNNPRHREIAAFRLLSKMPTMAAMCYKYSIGQPFVYPRNDLSYAGNFLNMMFSTPCEPYEVNPILERAMDRILILHADHEQNASTSTVRTAGSSGANPFACIAAGIASLWGPAHGGANEAALKMLEEISSVKHIPEFFRRAKDKNDSFRLMGFGHRVYKNYDPRATVMRETCHEVLKELGTKDDLLEVAMELENIALNDPYFIEKKLYPNVDFYSGIILKAMGIPSSMFTVIFAMARTVGWIAHWSEMHSDGMKIARPRQLYTGYEKRDFKSDIKR

SEQ ID NO: 3587 - protein, 365 aa, Buchnera aphidicola
  misc_feature (128)..(128): Xaa can be any naturally occurring amino acid
  misc_feature (346)..(346): Xaa can be any naturally occurring amino acid
MKKQYRIAVLPGDGIGPEVMKEAYKILKILQNYFSLHIEIKEFNIGGIALDKEGVALPKDTLLGCENSDAILFGSVGGKKWNNLPIEKRPERASLLPLRKHFNLFYNLRPAKLYSELRFLSPLRSKTXIKNGFDILCIRELTGGIYFGEPRGRLKKNNIEYAFDTEVYYDYEINRIAHVAFQLARTRKNKVCSIDKANVLNSSLLWREIVTKVSKNYPDVHLSHLYIDNATMQIIQNPNQFDILLCSNLFGDILSDECAIITGSIGMLPSASLNEKNFGLYEPAGGSAPDIAGKNIANPIAQILSLSMLVRYGMNLKKIANKIDQSVISVLKKGYRTFDISDDNNXFLKTNEMGDVIADALINGE

SEQ ID NO: 3588 - protein, 382 aa, Ralstonia solanacearum GMI1000
MMRDAGQLDLMDSRVTQLAFWSALPERWTSDAEETLVCCHVRQETHDVKSFFFRSPAGRTFLFEPGQFITLELDIEGETINRCYTLSSSPARPHTISITVKRVPGGKVSNWLHDNLQPGAAIRVLGPAGEFTCARHPARKYLFLSAGSGVTPLMSMSRAHHDLAEDRDIVFVHSARTPDDIIFARELELIASNHTNFRTSFVVERLGARTNWPGITGFLSLPLLKLIAPDFMEREIFTCGPAPYMKAVRGLLEEAGFDPARYHEESFSFESLTTGAAAEAIAPDAAPTANPDAAAPQFSISFAKTGREIACGAAQHVLDAARQAGVRLPASCTQGMCGTCKVKLVSGQVDMKHNGGIRQREIDQGMVLLCCSKPLSDLVIDK

SEQ ID NO: 3589 - protein, 93 aa, Glycine max
  misc_feature (66)..(68): Xaa can be any naturally occurring amino acid
LVALLSSALPNSTGADSLEHILAQNNRIIDFYTGAQLRVKQYLPHYSTQEEWQVHFGSRWEAFVEXXXAYDPLALLAPGHRIFQKAVSSLLIN

SEQ ID NO: 3590 - protein, 363 aa, Buchnera aphidicola
MKKNYRIAVLSGDGIGPEVMQEACKILNVLKKYFFLSLEIQKFNIGGIAIEREGVALPKTTLLGCENSDSILLGSVGGKKWDNLPVEQRPERAALLPLRKHFNLFSNLRPAKLYPELKCLSPLRSDIVKNGFDILCVRELTGGIYFGEPKGFVNKNNTKYAFDTEIYHEYEIIRIAHLAFKLARSRKKKVCSIDKSNVLQSSILWREVVESVSKKYPDVHLSHLYIDNAAMQIIKDPNQFDVLLCSNLFGDIISDECATITGSIGMLPSASFNEKNFGLYEPAGGSAPDIEGKNIANPIAQILSLSMLVRYGMNLNQIADKIDKAVNNVLKKGYRTSDISHDNNFLKTDEMGDLIVDSLINGK

SEQ ID NO: 3591 - protein, 479 aa, Methanosarcina mazei Go1
MVAMKMQINGKAAGSCGGECFDVRNPATCELLEQVPRGTEEDVALAVEAALSAFEGWASISPQQRGMVFYRAAGLVRQRKEELAALLTQEQGKPLAEARNELEGFSHVLEYYCGLAGSLRGDFIPVTGNGYSFTVKKPLGVCAAIIPWNMPALIMGWKIAPALISGNTFVLKPASSTPLTNLTLASILNEAGLPAGVLNVVTGSGEIAGESLVRSPDVRKISFTGESGTGKRISELAASGMKRVTLELGGSDPMIVCDDANLESAVAGAIRGRFYNCGQTCTAVKRLYVFESVAREFIRKLEEGVKRLKVGNGLDKDTDMGPLNNHSQFEYIKELVAGIEEKGEGRIIAGGKAPSFKGMGKGYFFEPTLVSDVPGDSRLLKEEVFGPLLPIVTVRNLDEAIEEANRSIYGLGASIWTKDLDRIRMGCEQLNAGIIWVNQHLKVAPEVPFGGVKESGFGRENGPDILSEYLETRTIMLKT

SEQ ID NO: 3592 - protein, 121 aa, Zea mays
  misc_feature (12)..(12): Xaa can be any naturally occurring amino acid
MNAPDRYERFVXVPEGTKKVSYERDTKIVNAASFTVEREDHTVGNILRMQLHRDPNVLFAGYKLPHPLQYKIIVRIHTTSQSSPTQAYTQAINDLDKELEYLKQAFEDEKNRYEDRMKQGF

SEQ ID NO: 3593 - protein, 181 aa, Zea mays
MASSMLSSAAVVTSPAQATMVAPFTGLKSSAAFPVTRKTNKDITSIASNGGRVSCMKVWPPIGKKKFETLSYLPDLSDVELAKEVDYLLRNKWIPCVEFELEHGFVYREHGNTPGYYDGRYWTMWKLPLFGCTDSAQVLKEVEECKKEYPGAFIRIIGFDNTRQVQCISFIAYKPPSFTEA

SEQ ID NO: 3594 - protein, 157 aa, Brassica napus
FTASSSSSSSISLLNSDLIMIGAKSFLGLPIASPKGIISDSNSLSTNSRSVGVLRACVSMEGSQTMSHSKNGSIPELKSVNGHTGQKQGPLSTVGNSTNIKWHECPVEKVDRQRLLDQKGCVIWVTGLSGSGKSTLACALNQKLYQKGKLCYILDGD

SEQ ID NO: 3595 - protein, 247 aa, Candida albicans SC5314
MSIVSLTGIEVLNNPAKFTDPYEFQITFECLEPLKEDLEWKLTYVGSSDSLDHDQELDSILVGPVPVGINSFLFKADAPSPELIPASELVSVTVIILSCSYNDKEFVRVGYYVNNEYDTEELRENPPAKVAIDHVVRNILAEKPRVTRFNIVWDNEEGADEYPPEQPEDEEEEEEEEEEGEEEEEDEDEEDDDDDEDLNGDAVVDLEKEEISTPRDNDEDIEIDIASESEVEEGGVEEEAKVNTPKD

SEQ ID NO: 3596 - protein, 359 aa, Arabidopsis thaliana
MEGDVGIGLVCQNTMDGKASNGNGLEKTVPSCCLKAMACVPEDDAKCHSTVVSGWFSEPHPRSGKKGGKAVYFNNPMWPGEAHSLKVEKVLFKDKSDFQEVLVFESATYGKVLVLDGIVQLTEKDECAYQEMIAHLPLCSISSPKNVLVVGGGDGGVLREISRHSSVEVIDICEIDKMVIDVSKKFFPELAVGFDDPRVQLHIGDAAEFLRKSPEGKYDAIIVNSSDPVGPALALVEKPFFETLARALKPGGVLCNMAESMWLHTHLIEDMISICRQTFKSVHYAWSSVPTYPSGVIGFVLCSTEGPAVDFKNPINPIEKLDGAMTHKRELKFYNSDMHRAAFALPTFLRREVASLLAS

SEQ ID NO: 3597 - protein, 211 aa, Zea mays
  misc_feature (190)..(190): Xaa can be any naturally occurring amino acid
GSERSWSERRACVAMDGAEDDGTEWMMHGAGGKGKGGGALDKNKKRFSDEQTKSLESMFATQAKLEPRQKLQLARELGLQPRQVAIWFQNKRARWKSKQLEREYSALRDDYHALLCSYESLKDEKRALLKQLEKLAEMLHEPPQGKYYGGNADDVRSGGVGGTKEEEESTDACAGAALYSSDSTPAAAGXSSSAEQTCSGSQWWELESLSE

SEQ ID NO: 3598 - protein, 481 aa, Chlamydomonas reinhardtii
MSSTPSATAIDHGATYSDLLIIQGAIVFFLQVGFVSLEVGYGRSKNVKNILLKNTVNILLCAICWWAVGYAFSYGSSTDGFIGTSGFFHDGGLGAAKLWFYSWTFCLSTVTIVSGCLAERTSLVAYPVFTVLMASWVHPVVVHWAWSRDSWLLGISSECRFLDFAGGTVVHICGGMMGLVGAALVGPRIGRFEEGRAKELPGHDVSSVAIGTLFLWFGWFGFNCGSAYVYMGNMAAAAAEAAASAVASGDTSADVYASAAAAVSAAVTSGANATLHPGSTPADRVALNMTLCASVSGLTALLLSSLRSGTVDLCVCCNSLLAGLVMSTPACGFITSWAAVIYGLVAAALYMGGTRMLVRFHVDDPLESSAIHFGCGGVGTLLLALLARPTYVQELTGYDCGGLVYGGRKGAILLGLQLLGIAAITAWTAFFSVLVFYLLRRLGRLRVDQVTELAGLDNMEHGGPAYPEFNLVPYNTGSAER

SEQ ID NO: 3599 - protein, 473 aa, Gloeobacter violaceus PCC 7421
MPSIAIIGGGLAGLQAAYQLKKLGLYADVYEAKSFVGGRIQSRKNVVGPGLVVELGGTFINSNHRDILTLAQEFNLPLFNRAKDAQQFPFPETGYYFDGQNRLESEVAEKLRPLADQIAKDAALLDENFDKFAPQFDRLSVAEYLNIHADKIPEPFIRTLIENSIRTEYGVEPVDSSALQLLFNLPVVDGEAVEVLGSSDEIFVVEGGSERLIASLAAVLPGRIHTRMALTRLEKMGQKYRLTFAGAQTREVDFVIVAVPVNGLKKIDFQVPLPPAFRRFIKEVSLGFNEKLFAGFSERVWRQEEGFVSEGWTDLGFSQVWEDTQRQPASSDAALTFFMGAQEVFATQSLGAQTLGEAFLQRFEAVVDGAQAAATGRFSRTRWNQDPWIGGGYTTFKPGQLTEFGGFLYIESVIPAFRQDVNFGNLIFAGEHLSDEFYGFMNGAAQTGRLAAQVVLRQIQEGQLASGKPTSAA

SEQ ID NO: 3600 - protein, 494 aa, Triticum aestivum
MSATCAADLGPLLGAAAANATDYLCNRFADTTSAVDSTYLLFSAYLVFAMQLGFAMLCAGSVRAKNTMNIMLTNVLDAAAGALFYYLFGFAFAFGTPSNGFIGKHFFGLKDMPQTGFDYSFFLFQWAFAVAAAGITSGSIAERTQFVAYLIYSAFLTGFVYPVVSHWIWSVDGWASAARTSGPLLFKSGVIDFAGSGVVHMVGGIAGFWGALIEGPRIGRFDHAGRSVALKGHSASLVVLGTFLLWFGWYGFNPGSFVTILKSYGPPGSINGQWSGVGRTAVTTTLAGSVAALTTLFGKRLQTGHWNVVDVCNGLLGGFAAITAGCSVVDPWAAVICGFVSAWVLIGLNALAGRLKYDDPLEAAQLHGGCGAWGIIFTALFAKKQYVEEIYGAGRPYGLFLGGGGRLLAAHIVQILAIAGFVSCTMGPLFLALKKLGLLRISAEDEMAGMDLTRHGGFAYVYHDDDEHDKSVGGFMLRSAQTRVEPAAAANSQV

SEQ ID NO: 3601 - protein, 344 aa, Saccharomyces cerevisiae
MSSSVASTENIVENMLHPKTTEIYFSLNNGVRIPALGLGTANPHEKLAETKQAVKAAIKAGYRHIDTAWAYETEPFVGEAIKELLEDGSIKREDLFITTKVWPVLWDEVDRSLNESLKALGLEYVDLLLQHWPLCFEKIKDPKGISGLVKTPVDDSGKTMYAADGDYLETYKQLEKIYLDPNDHRVRAIGVSNFSIEYLERLIKECRVKPTVNQVETHPHLPQMELRKFCFMHDILLTAYSPLGSHGAPNLKIPLVKKLAEKYNVTGNDLLISYHIRQGTIVIPRSLNPVRISSSIEFASLTKDELQELNDFGEKYPVRFIDEPFAAILPEFTGNGPNLDNLKY

SEQ ID NO: 3602 - protein, 161 aa, Triticum aestivum
  misc_feature (50)..(50): Xaa can be any naturally occurring amino acid
MWHCKDHHLKFKADAPASIDTTPMQAAVIHKGVLLVIKNRPCKGKEATTXILATHEHPKSDYIALDIFNALELEDIVPSSHNCDVPHVDRTEYQLIDISEDGFVSLLTDNGSTKDDLKLPTDDAILTQLKDGFAEGKDLALTVMSAMGEEQICAVKDLGPR

SEQ ID NO: 3603 - protein, 146 aa, Triticum aestivum
  misc_feature (36)..(36): Xaa can be any naturally occurring amino acid
  misc_feature (70)..(70): Xaa can be any naturally occurring amino acid
  misc_feature (82)..(82): Xaa can be any naturally occurring amino acid
MAAFLRPKCSSVGRALIGILGDNLYGGASSSVETVXRRSLSDAVSQQIRTFQSRMRTNLKVAARQLGAKXGDAAYSPVRGKXDGVVVRAAMKKGRSDGSEVQFDDNAIVIVNNKGELIGTRVFGPVPHELRKKKHLKILALAEHIV

SEQ ID NO: 3604 - protein, 372 aa, Chenopodium rubrum
MAPSFDLLCAEDNSSIFDEVDDNYYGVVDDDVLQICNLQQQHGNLRNFDDFTLILLIIIKEHNFEALISGFFVANHECLASLFDNERQHFLGLDYLKRFRNGDLDLGARNLVIDWIHKVQSHYNFGPLCVYLSVNYLDRFLSAYELPGKAWMMQLLGVACLSLAAKVDETDVPLILDLQVSESKFVFEAKTIQRMELLVLSTLKWRMQSVTPFSFIDYFLYKLSGDKMPSKSLIFQAIQLILSTIKGIDLMEFRPSEIAAAVAISVTQQTQIVEFTDKAFSFLTDHVEKERLMKCVEIMHDLRMSSRSNGALASTSVPQSPIGVLDASACLSYKSDDTSTTPSGSCGNSAHSSPASAPPPKRRKLDRTSQIS

SEQ ID NO: 3605 - protein, 132 aa, Brassica napus
MCGILAVLGCVDNSQATRSRIIKLSRRLRHRGPDWSGLHCYEDCYLAHERLAIIDPISGDQPLYSEDKTVVVTVNGEIYNHKALRESESLKSHKYHTGSDCEVLAHLYEEHGEEFINMLDGMFAFVLLDTKD

SEQ ID NO: 3606 - protein, 181 aa, Glycine max
FGSSRELGLQPRQVAIWFQNKRARWKSKQLERDYGILQSNYNSLASRFEALKKENQTLLIQLQKLNHLMQKPMEPGQRCTQVEAANSMDSESENGGTMKCEAEGKPSPSMEISEHLLGVLSDDDTSIKVEDFGLEDEHGLLNFAKHVDGSLTSPEDWNAFESNDLLGQSTTDDYQWWDFWS

SEQ ID NO: 3607 - protein, 166 aa, Brassica napus
  misc_feature (23)..(23): Xaa can be any naturally occurring amino acid
  misc_feature (37)..(37): Xaa can be any naturally occurring amino acid
GKIDKFIAGESTLPLHELESGGXRYFLGMFLGGAYEXALGGVHNLFGGPSVVRVLQSDGPHSFAVTRAVPGQSSADVLRGMQHEPEMMFETLKHRAEEVLHRKGGEGEDDDEGEFCNVAACLDRSFHNMPYLATEEVLSMSNSLSDAVSNLGFYYCDEDGFDYLSA

SEQ ID NO: 3608 - protein, 287 aa, Listeria innocua Clip11262
MTIQWFPGHMAKARREVTEKLKLVDVIFELVDARIPLSSSNPMLEEIIHQKRRVIILNKADTADEKTTKEWIDYFAEKGLPAVAVNAQEGKGLFKIEQAAEKLMAEKFERLRSKGMKPRAIRAMILGIPNVGKSTLINRLAKKNIARTGNKPGVTKAQQWIKVGKTLELLDTPGILWPKFEDQEIGYKLALTGAIKDDLLQMEEIAGYGLRFLEKHYPDRLQNWLKVEKVSEDPIETLAFIAEKRGLLDRYNDPDYSRAAETVVREIRQQKLGRMSFDFPNWEDDAE

SEQ ID NO: 3609 - protein, 267 aa, Chromobacterium violaceum ATCC 12472
MKMPKLGVGTFRLKDQQAEESVSMGLELGYRHIDTAQIYRNEADVGRAIAKSGVPRDELYVTTKIWIDQFAQGKLIPSLRESLDKLGLDSVDMTLIHWPSPNDEVPVAVYMNQLAEAKHLGLTREIGVSNFTIAHLRQAMDVVGADAIGTHQLEVHPYLQNLKVRAFCREHGIALTGYMPLAYGRAVGDPTLQAIGQKHGATAAQVALAWQLQQDIAVIPSSTKRANLAANLDALKLRLDADDMARIAALEDGGRIADPDFAPAWDA

SEQ ID NO: 3610 - protein, 82 aa, Zea mays
VDSIDPSAGLERYVDSLMKRTDIEFNVVVTQMNGKDYSSNSVHVFHIGKLRIKLRKGWSTKARESYSTTMKLCGSRGGGNAA

SEQ ID NO: 3611 - protein, 368 aa, Glycine max
MGEAKGKEEEVLAPVHSTVFKESESLDGKCVKIEGYDFNRGVNYPLLLSSMVTTGFQASNLGDAIQVVNQMLDWRLVDEPVAEDCSDQERDLEYRKSVTCKVFLGFTSNLISSGVRDTVRFLLQHRMVDVVVTTTGGIEEDLIKCLAPTYKGDFSLPGAYLRSKGLNRIGNLLVPNDNYCKFEDWIIPIFDQMLGEQNNENALWTPSKLIARLGKEIKNESSYLYWAYKNNIPVFCPGLTDGSLGDMLYFHSFRNPGLIVDIVQDIRAMNGEAVHASPRKTGMIILGGGLPKHHICNANMMRNGADYAVFINTAQEYDGSDSGARPDEAVSWGKIRDSAQTVKVHCDATIAFPLLVAETFASRVKPPH

SEQ ID NO: 3612 - protein, 215 aa, Hordeum vulgare subsp. vulgare
MSYAYLFKYIIIGDTGVGKSCLLLQFTDKRFQPVHDLTIGVEFGARMITIDNKPIKLQIWDTAGQESFRSITRSYYRGAAGALLVYDITRRETFNHLASWLEDARQHANANMTVMLIGNKCDLSHRRAVSYEEVEQFAKEHGLVFMEASAKTAQNVEEAFIKTAGTIYKKIQDGVFDVSNESYGIKVGYAVPNASGGGAGLVLSNQGRLLAIKQV

SEQ ID NO: 3613 - protein, 138 aa, Arabidopsis thaliana
MADTPSSPAGDGGESGGSVREQDRYLPIANISRIMKKALPPNGKIGKDAKDTVQECVSEFISFITSEASDKCQKEKRKTVNGDDLLWAMATLGFEDYLEPLKIYLARYREGDNKGSGKSGDGSNRDAGGGVSGEEMPV

SEQ ID NO: 3614 - protein, 120 aa, Glycine max
  misc_feature (58)..(58): Xaa can be any naturally occurring amino acid
  misc_feature (88)..(88): Xaa can be any naturally occurring amino acid
  misc_feature (92)..(92): Xaa can be any naturally occurring amino acid
AASMISSPAVTTVNRAGAGMVAPFTGLKSMAGFPTKKTNNNITSITSNSGRVQFIQVXPPIGKNKFKTLSYLPDRNNTQLSKKVQYLXKKDXIPYYKFELKHDFLYPEHNRSPRYYNKRY

SEQ ID NO: 3615 - protein, 333 aa, Bdellovibrio bacteriovorus HD100
MMKLTVIPGDGIGPEIMAQVVRVLKHVHAPFEYEEHQAGEVALNSLGELLPQTTIDSINKTKLAIKGPTTTPVGGGHKSINVTMRQKFDLYANVRPVRSLPGVQCVCSDVDLTIVRENTEDLYAGIERMVDEDTAESIKRITRKGSERIARYAYDLAQKTGKPRMAIVHKANIMKLSDGLFLKVAQEVGWQYPEITTKDVIVDNACMQLVTKPQQFDVIVTENLYGDILSDLCAGLVGGLGVVPGANIGANHAIFEAVHGSAPDIAGQNKANPTALLQSAVMMLQHVGENAKADAIMKALIAALSDVNARTGDLGGKGTTVSFTDAIIQRLGH

SEQ ID NO: 3616 - protein, 240 aa, Zea mays
MGRGKIVIRRIDNSTSRQVTFSKRRNGIFKKAKELAILCDAEVGLVIFSSTGRLYEYSSTSMKSVIDRYGKAKEEQQDVANPNSELKFWQREAASLRQQLHNLQENYRQLTGDDLSGLNVKELQSLENQLETSLRGVRAKKDHLLIDEIHDLNRKASLFHQENTDLYNKINLIRQENDELHKKIYETEGPSGVNRESPTPFNFAVVETRDVPVQLELSTLPQQNNIEPSTAPKLGLQLIP

SEQ ID NO: 3617 - protein, 234 aa, Triticum aestivum
MESSTTDAGDKHLESYLTLGLTVSQSKKGNTKFPKVLSLLATYLGRSVQKNEELLGSNGIKEAATIFHGQKVPDLSIQLYAERIFKYAECSPSCFVLALVYMERYLQQPNVYMTPFSVHRLLITSVVVAAKFTDDAFFNNAFYARVGGIRTIEMNRLELDLLFNLDFRLKVNLETFGSYCLQLEKHAPVSPERLPVQVHRVNGSKDLSYSNSSADEFCQSKLVSYSSQALQGCS

SEQ ID NO: 3618 - protein, 256 aa, Glycine max
  misc_feature (218)..(218): Xaa can be any naturally occurring amino acid
MTMHRESWAFVFGVMGNIISFGVFLAPLPTFYQIYKKKSTEGFQSLPYVVALFSAMLWIYYAFVKRETALLLITINTFGIVVESIYLSIFLIYAPRKPRLTTIKLLLLLNVFGFGAMLLSTLYLSKGAKRLAIIGWICLVFNISVFAAPLFIIRRVIKTRSVEYMPFTLSMFLTINAVMWFFYGLLLRDYYVALPKHAWRLSFGIIQMVMYLMYRNAXTPVALEEPVKAQELNGHIIDVVKIGTMEPNHGGAVGKV

SEQ ID NO: 3619 - protein, 228 aa, Glycine max
  misc_feature (87)..(87): Xaa can be any naturally occurring amino acid
MTSASELFHSRRHRLGRSALDLGLDTELNAADSLRRHYHLRRLRHHPERASDRIDGRYRRSFASESVDSEENVRSSLRGSDSERLPXARGFLRQYDRDSFGEDPESESSNEDPSGASLVTELTSQMARSQFLQELSTKPPGLTQEALDCLHQEVFSSNASEIGLDSRVLQDCSICLESFTDGDELIRLPCGHKFHSVCLDPWIRCCGDCPYCRRCIVVNTHSSLNEDE

SEQ ID NO: 3620 - protein, 214 aa, Ageratina adenophora
  misc_feature (29)..(29): Xaa can be any naturally occurring amino acid
TLISLKDDADADGEGVKLTDIEIKALLLXLFTAGTDTSSSTVEWAIAELIRHPRLLKQAQEEIDTVVGRDRLVTELDLNQLTFIQAIVKETFRLHPSTPLSLPRISSEACEVDGYYIPKGSTLLVNVWAIARDPEMWTDPLEFRPSRFLPGGEKPNVDVRGNDFEVIPFGAGRRICVGMTLGLRMVQLLVATLVQTFDWELAKGLEPEKLNMER

SEQ ID NO: 3621 - protein, 118 aa, Zea mays
  misc_feature (6)..(6): Xaa can be any naturally occurring amino acid
  misc_feature (10)..(10): Xaa can be any naturally occurring amino acid
  misc_feature (19)..(19): Xaa can be any naturally occurring amino acid
  misc_feature (47)..(47): Xaa can be any naturally occurring amino acid
  misc_feature (49)..(49): Xaa can be any naturally occurring amino acid
  misc_feature (59)..(59): Xaa can be any naturally occurring amino acid
  misc_feature (62)..(62): Xaa can be any naturally occurring amino acid
  misc_feature (65)..(65): Xaa can be any naturally occurring amino acid
  misc_feature (69)..(70): Xaa can be any naturally occurring amino acid
  misc_feature (72)..(72): Xaa can be any naturally occurring amino acid
  misc_feature (79)..(79): Xaa can be any naturally occurring amino acid
  misc_feature (86)..(86): Xaa can be any naturally occurring amino acid
MASRLXAAEXSSSSLSSAXPLARLISRRGLAGAADGHGSAKGPLGKXPXSPSKGKEEHXGLXRLXKGGXXFXGGYKLFXGKKEAKXEATQGAKEAPEGQKKKGKLTGGQKGTGRILAS

SEQ ID NO: 3622 - protein, 511 aa, Pelargonium x hortorum
MYNMSLYLLLGSSALAFAAYLVLFSFSKSRRRLPPGPKAWPIVGNLPHMGSMPHQNLAAMARTYGPLVYLRLGFVDVVVALSASMASQFLKTHDSNFSSRPPNAGAKHIAYNYHDLVFAPYGPRWRLFRKITSIHLFSGKALDDYRHVRQEEVGVLASNLARAVSTIVNLGQLLNICATNALGRAVIGKKVFKDGTDDVDPKADEFKSMVVELMVLAGVFNIGDFIPPLDCLDLQGVASKMKNLHKRFDAFLSAILQEHNINSAASATPSMLTTLISLKDSVEDSEGGKLTDTEIKALLLNMFTAGTDTTSSTVEWAIAELIRQPEILIRAQKEIDSVVGRDRLVTELDLSKLPYLQAIVKETFRLHSSTPLSLPRIATQSCEINGYHIPKGATLLVNVWAIARDPDVWADPLSFRPERFLPGSEKENVDVKGNDFELIPFGAGRRICAGMSLGLRMVQLLTATLLHAFNWDLPQGQIPQELNMDEAYGLTLQRASPLHVRPRPRLPSHLY

SEQ ID NO: 3623 - protein, 166 aa, Triticum aestivum
  misc_feature (111)..(111): Xaa can be any naturally occurring amino acid
  misc_feature (152)..(152): Xaa can be any naturally occurring amino acid
  misc_feature (154)..(154): Xaa can be any naturally occurring amino acid
MATSSAKSVHDFTVKDAKGNDINLGDYKGKVLIIVNVASQCGLTNSNYTELSQLYEKYKQKGLEILAFPCNQFGAQEPGSNEQIQEFVCTRFKAEFPVFDKVDVNGDKAAXLYKYLKSSKGGLFGDGIKWNFSKFLVDKEGNVVDRYAPTTXPXSIEKDLLKLLDA

SEQ ID NO: 3624 - protein, 403 aa, Deinococcus radiodurans R1
MLTPEQKAIVKATVPALEAHGETITRTFYASMFAAHPELLNIFNPANQQTGKQARSLAASVLAYAAHIDHPEALGGMVGRIAHKHVSLEVLPEHYPIVGQYLLGAIAGVLGDAAKPEILDAWAAAYGELADLMIGIEKGMYDAGAGQPGGWRDFRPFRVARKVAESRVITSFVLEPVGGGALPAYQPGQYLSLKVKVPGQERWQIRQYSLSDAPSPDHYRISVKREGGGLVSEYLHGAVQEGDELLVHVPAGDFVLQQSERPVVLISAGVGITPMLAMVQTLAQAGSQRPVTFIHAAQNGSVHAFRDDVARLTHEYPHFRKVVFYDEAGPDDQLGTHHDVAGRLSLDAVRGALPAGEAEFYYCGPAGFAGAVEAILDDLQVPAERRFTETFGPSQSFAPVILG

SEQ ID NO: 3625 - protein, 245 aa, Nicotiana tabacum
MGRGRVQLKRIENKINRQVTFSKRRSGLLKKAHEISVLCDAEVGLIVFSTKGKLFEYSTDSCMERILERYERYSYAERQLTATDHETPGSWTLEHAKLKGRLEVLQRNQGHYAGEDLDSLCMKELQNLEHQLDSALKHIRSRKNQLMHESISELQKKDEALQEQNNNLSKQVKEGEKELAQQTQWEQQSHDHLNSSSFVLTQPLSSLHLGEAYPTAGDNGELEGSSRQQQQNTVMPPWMLRHLNG

SEQ ID NO: 3626 - protein, 411 aa, Glycine max
  misc_feature (116)..(116): Xaa can be any naturally occurring amino acid
MSPVPGAHAPLLPGSKSKDVPPATVSGAVFNVATSIIGAGIMSLPATLKVLGVIPALVLILVIAFLAELSVEFLMRFTRAGETTTYAGVMREAFGPLGAVAAQVAVVITNLGCFIXQQWFGIHWWSSREFALLVVLFLILLPLVLYRRVESLKFSSAISTLLAVAFVTICTVLAIVAIVEGRTQSPRLIPCLDQHTSFFDLFTAVPVVVTAYTFHFNVHPIGFELAKPSEMATAVRIALLLCCVIYFSIGLSGYLLFGDSTQSDILVNFDQNAGSALGSLLNVLVRLSYAFHVMLTFPLLNFSLRTNVDEFFFPKKSPLATDSKRFVSLTLVLLALSYIAAILVPDIWYIFQFMGSTSAVCLAFVFPGAIVLRDSYGISTRRDKIIALVMVILAAITSVIAISTNIYKAFQ

SEQ ID NO: 3627 - protein, 128 aa, Corynebacterium efficiens YS-314
MAKLTKDELIEAFKEMTLIELSEFVKEFEEVFEVTAAAPVAVAAAGAAGGEAAAAEEKDEFDVVLEDAGAKKIGVIKVVRELVSGLGLKEAKELVEGAPKAILEGANKDDAEAAKAKLEEAGAKVTLK

SEQ ID NO: 3628 - protein, 512 aa, Oryza sativa (japonica cultivar-group)
MVAKKPRVVVVGAGISGLAAAHRLCGAGGDRFEVAVVEAGDRVGGRILTSEFAGHRVEMGATWVQGVVGSPVYALARDAGALGEEEGRGLPYERMDGFPDRVLTVAEGGEVVDADTVAGPIEELYRGMMEAARAGEAGGGGGVEEYLRRGLRAYQAARSAGGGGGGGKELEEVDEALLAMHINRERTDTSADDLGDLDLTAEGEYRDFPGEHVTIPGGYSRVVERLAAALPPGTVRLGLRLRRLKWGGTPVRLHFADGAPPLTADHVILTVSLGVLKASLGNKDTAGVGAAAIAFDPPLPPFKREAVARLGFGVVNKLFMEVEAVAPSEPEDVAGVQPAAAGFPFLHMAFRGHVSKIPWWMRGTESICPVHAGSTVALAWFAGREAAHLESLPDDDVIRGAHATLDSFLPAAPRWRVRRIKRSGWATDPLFLGSYSYVAVGSSGDDLDRMAEPLPRGPDAAADERPPSPRLLFAGEATHRTHYSTTHAAYLSGVREANRLLQHYRGGANHTT

SEQ ID NO: 3629 - protein, 277 aa, Azotobacter vinelandii
MQTIVTHDKLVLPKLGLGTWPMLGEECTQAVLSALELGYRHIDTAAAYENEAAVGLALERSPVPRESVHLTTKVWWDRLQPAAMRASLQRSLEALRTDRVDLFMIHWPGKDWDLPRSIETLVALREEGKARHIGVANFPLPLLRRTVEELGAPLSAIQVEYHVLLGQRRLLDYVRQHGMALIAYSPLARNRIAEVAEIRDIAARHQARPAQIALKWLLDQPAVAAIPKAASVANQRINLDAFKVTLNDRERALIDALPKNQRLVSPDFAPRWDPFDE

SEQ ID NO: 3630 - protein, 242 aa, Nicotiana tabacum
MGRGKVQLRRIENKINRQVTFSKRRGGLVKKAHEISVLCDAEVALIVFSHKGKIFEYSSDSCMEQILERYERYSYTERRLLASNSESSVQENWSLEYAKLKAKIDLLQRNHKHYMGEDLDSLNLKDLQNLEQQLDTSLKLIRSRKNQLMHESISMLQKKEKAIQEENNMLSKKIKEKDNTVGQQVEWHQQNQVPTSTSFLLQPHPCLNIGGNYQEEAEEARRNELDLNLDSLYPCHMGCFAT

SEQ ID NO: 3631 - protein, 444 aa, Bacillus subtilis
MSSYLIKPELSSAYPVVSYAKGSYVYDQTGKKYLDGSSGAVTCNIGHGVRDVTEKLKEQLDQVSFAYRSQFTSEPAEQLAALLAQELPGDVNWSFFVNSGSEAIETAMKIAIQYWQEKKQTQKSIFLSRWSSYHGITLGALSLSGFYERRYRFTHLIERYPAISAPHIYRLNHETEEDFVQTAADELDTMIKRIGSQFIAGFVAEPIIGAAGAAITPPPGYYERLSEVCRTHDVLFIADEVMTGLGRTGRMLATEHWDTVPDIAVLGKGLGAGYAPIAAAVVSDSIIETIKQGSGVIMSGHTYSAHPYSAKAALEVLRYVLKHGLIKQSEKKGAVLKKKLDEAASQSGIIGEVRGKGLLLGIEFVQTKKRRKCFRQQQAITQLIVSEAKKRGLIVYPSKAGIDSGEGDAVIIAPPFTISDGEMEELISIFSETVAAVEKNLKKD

SEQ ID NO: 3632 - protein, 484 aa, Brachymonas petroleovorans
MDAQRTLPDCSKLFLGGRWVEPAQGMYYDNENPAKRETICRVAQASAADVDAAVRGAQQALEPGSPWAQMTPAARARLLWRVAERIREQVEELAWLESLDTGKPYGEALHGDIPHAAGAFEYYAGWCSKLAGSVLPVSPRYLDYTRLEPVGVVGAIIPWNFPLQMAAMKVAPALAAGNAVLLKPAEQTPLTAFALARIFEELEFPPGVLSVLPGFGATGAALVAHPGIDKITFTGSTAVGKTIMRGAADTLKRVSLELGGKSPNIVFADADLKRAVRGATTGIYYNQGQMCTAGSRILVQDSLYDKFLEAFTAAIADLRPGDPLDPKTRMGALVSQEQFERVSHYVALGQEDGATLLAGGQGSAERGYFFPPTIFTDVKPEHRIAQEEIFGPVVSVMRFGSEEEALRLANGVSYGLAAGVWTADVGRAHRVAHGLRAGTVWVNTYNALWNEAPFGGYKQSGIGREGGREGIEPYTEVKNICLSL

SEQ ID NO: 3633 - protein, 442 aa, Triticum aestivum
MSNYHDDHVEDMEDDYDMDDPAEDMVDAHHERGLRDSDSEDDEYAHSNDKIPDTSAADARKGKDIQGIPWERLAITRENYRQTRLEQYKNYENIPNSGEAAAKECKPTVKGGMYYEFRQNTRSVKSTILHFQLRNLVWATSKHDVYLMSHYSVLHWSALSGVDTELMNVQGHVAPREKHPGSLLEGFSQTQVSTLAVKDNLLVAGGFQGELICKHLDREGISFCCRTTYDDNAITNAVEIFNTASGAVHFMASNNDSGVRDYDMERFQLCKHFQFDWPVNHTSLSPDGKLVVIVGDDPNGLLIDANSGKTLHSMKGHHDFSFASAWSPDGRTFATGNQDKTCRIWDARNLSKAVHVLKGNLGAIRSIRFTSDGQFLSMAEPADFVHIFDVKSDYNRRQELDFFGEISGMSFSPDTDALFVGVWDRTYGSLLQFGRLYNKLVP

SEQ ID NO: 3634 - protein, 371 aa, Senecio vernalis
MEESMKQASVMENLRSVVFKESESLEGTCAKIRGYDFNNGIDYSQILKSMVSTGFQASNLGDAIETVNQMLDWRLSHEQVTEDCSQEEKNPTYRESIKCKIFLGFTSNLISSGVRDIIRYLVQHHMVDVIVTTTGGIEEDLIKCLADTFKGEFSLPGAELRSKGLNRIGNLLVPNDNYCKFEDWIIPIFDQMLEEQKAKNVLWTPSKLIMRLGKEINNESSYLYWAYKNDIPVFCPGLTDGSLGDMLYFHTFRNPGLIVDVVQDIRAINSEAVHANPRKTGMIILGGGLPKHHICNANMMRNGADYAVFINTAQEFDGSDSGARPDEAVSWGKIRGSAKSVKVHCDATIAFPLLVAETFAAKREQSAEPSS

SEQ ID NO: 3635 - protein, 420 aa, Triticum aestivum
  misc_feature (315)..(315): Xaa can be any naturally occurring amino acid
  misc_feature (335)..(335): Xaa can be any naturally occurring amino acid
MEGPSVEVPPYFLCPISLEIMRDPVTLATGITYDRCSIERWLSDGHATCPITQQKLAEADREATPNHTLRRLTQAWCALHAVERFPTPRPPLDACRVAEIVEEGRGAGRQKELAALREIKAIVAESDRNRRCVEATPGAVEFLVSVVRNHATASKSAEDLLELSLDSPTSTSSPEEDALSVICSLKPSKKSLVRILEENGDFLDTLVYMLRRPSYRSRCYGILLLKAMVSVMEPARLMAVRTEVVQELVRVVSDRVSAKAVKAALHVLCRLCPWGRNRVKAVEAGAMTVLVELLLDEGGRHPTELAVVAIDHLCXLCGGAVGPGGAPGGAGRRGXKAMRVSLTTTESAVRALHAVARHSPTPAVLQEMLAVGVVAKLLLVLQVDAGERARAKAKELLKMHARVWKDSPCLQAHLKAHYPC

SEQ ID NO: 3636 - protein, 484 aa, Physcomitrella patens
MNVSEGCSTLTGAQLKYSTDKSNMSYETVYRDAAVESPQREVSNESGSTLKEHDYFGLSEVLSSNSSSGKQPEKCCREELNLNESATTLQLGPPAAVKPSGQADGDDAHDEGAGPENPAKRSAYHMQQESLADGRKAAAEMGSFKIQRKNILEEFRAMKAHAHMTKSPKTVQTMQHNMHVSYSGAQMAFGGAKNNGVKRVFSEAVVANHNAASGVGVGVREGNDDVSRCEEMNGTEQLDLKVHLPKGMGMARMAPASGSPSFDNMQGPLNPFFRKSLVSKMPVPDGGDSSANASNDCANRKGMVASPSVQPPPAQNQTVGWPPVKNFNKMNTPAPPASTPARACPSVQRKGASTSSSGNLVKIYMDGVPFGRKVDLKTNDSYDKLYSMLEDMFQQYISGQYCGGRSSSSGESHWVASSRKLNFLEGSEYVLIYEDHEGDSMLVGDVPWELFVNAVKRLRIMKGSEQVNLAPKNADPTKVQVAVG

SEQ ID NO: 3637 - protein, 370 aa, Senecio vernalis
MAESNKEAIDSARSNVFKESESLEGTCAKIGGYDFNNGIDHSKLLKSMVSTGFQASNLGDAMIITNQMLDWRLSHDEVPENCSEEEKKNRESVKCKIFLGFTSNLISSGVRETICYLTQHRMVDVLVTTTGGIEEDFIKCLASTYKGKFSLPGADLRSKGLNRIGNLIVPNDNYIKFEDWIIPIFDQMLIEQKTQNVLWTPSRMIARLGKEINNETSYLYWAYKNNIPVFCPSITDGSIGDMLYFHSVSNPGPGLVVDIVQDVIAMDNEAVHASPQKTGIIILGGGLPKHHICNANMMRNGADFAVFINTAQEYDGSDSGARPDEAVSWGKISSTGKAVKVHCDATIAFPLLVAETFAVKKEKASKVNGF

SEQ ID NO: 3638 - protein, 503 aa, Physcomitrella patens
MKFSNEVVHKSMNITEDCSALTGALLKYSTDKSNMNFETLYRDAAVESPQHEVSNESGSTLKEHDYFGLSEVSSSNSSSGKQPEKCCREELNLNESATTLQLGPPAAVKPSGHADGADAHDEGAGPENPAKRPAHHMQQESLADGRKAAAEMGSFKIQRKNILEEFRAMKAQAHMTKSPKPVHTMQHNMHASFSGAQMAFGGAKNNGVKRVFSEAVGGNHIAASGVGVGVREGNDDVSRCEEMNGTEQLDLKVHLPKGMGMARMAPVSGGQNGSAWRNLSFDNMQGPLNPFFRKSLVSKMPVPDGGDSSANASNDCANRKGMVASPSVQPPPAQNQTVGWPPVKNFNKMNTPAPPASTPARACPSVQRKGASTSSSGNLVKIYMDGVPFGRKVDLKTNDSYDKLYSMLEDMFQQYISGQYCGGRSSSSGESHWVASSRKLNFLEGSEYVLIYEDHEGDSMLVGDVPWELFVNAVKRLRIMKGSEQVNLAPKNADPTKVQVAVG

SEQ ID NO: 3639 - protein, 159 aa, Senecio vernalis
MSDEEHQFESKADAGASKTYPQQAGTIRKGGHIVIKNRACKVVEVSTSKTGKHGHAKCHFVAIDIFNGKKLEDIVPSSHNCDVPHVNRTDYQLIDISEDGFVSLLTENGNTKDDLKLPTDDALLTQIKDGFGEGKDLVVSVMSAMGEEQICALKDIGPK

SEQ ID NO: 3640 - protein, 150 aa, Agrostis stolonifera var. palustris
MSIVRWSNVFDPFSLDLWADPFDAFRSILPAASGNHDTAAFVNARMDWKETPEAHVFKADLPGVKKEEVKVEVEGGNVLVVSGERKGEGGQERQVATLERSSGKFVRRFRLPENAKVEEVKAGLENGVLTVTVPKAEVKKPEVKAIEISG

SEQ ID NO: 3641 - protein, 219 aa, Zea mays
MAPTTMAATRVSPVLLLLLTIQLSLLFRLPDSPSTPALALAAEPEQQNAKQHRQPALLVQSTCNSTSFYDLCIAALAADPASSTADVPGLGAIAVSAAANNASGTAAFLGNASDAAATPQADRALLRTCAGKYAAARDALVQARASLAEQAYDYAFVHVSAAGEYPAVCRTLFRRRQQQQRGASRSAYPAELAKREEALRRLCTIALDIISLLQNQETY

SEQ ID NO: 3642 - protein, 346 aa, Triticum aestivum subsp. tibeticum
MKTFLVFALLAIAATSAIAQMETSRVPGLEKPWQQQPLPPQQQPPCSQQQQPFPQQQQPIIILQQSPFSQQQQPVLPQQQPVIILQQPPFSQQQQPVLPQQPPFSQQQQQQQQQQPPFSQQQQPVLPQQPPFSQQQQPPFSQQQQPSSQQPPFPQQHQQFPQQQIPVVQPSVLQQLNPCKVFLQQQCSPVAMPQHLARSQMWQQSSCNVMQQQCCQQLPRIPEQSRYEAIRAIIFSIILQEQQQGFVQPQQQQPQQSVQGVYQPQQQSQQQLGQCSFQQPQQQLGQQPQQQQVQKGTFLQPHQIARLEVMTSIALRTLPTMCSVNVPLYSSITSAPLGVGTGVGAY

SEQ ID NO: 3643 - protein, 431 aa, Triticum aestivum
  misc_feature (222)..(222): Xaa can be any naturally occurring amino acid
  misc_feature (288)..(288): Xaa can be any naturally occurring amino acid
  misc_feature (307)..(307): Xaa can be any naturally occurring amino acid
MDATTAKQLRRLRTLGRGASGAVVWLASDDASGQLLAVKSAGAGAADTLRREGSVMAGLCSPHIVPCLGSRAAPGGEYQLFLEFAPRGSLADEAARSGGSLAERAIQGYAADVARGLAYLHGNSLVHGDVKARNVMVGADGRAKLADFGCARAADSDRTIGGTPAFMAPEVARGEEQGLAADVWALGCTVIEMATGHAPWSDMDDVFAAVHRIGYTDAVPEXPASLSPQAKDFLRKCLARNPRHRSTAAQLLEHPFLASAFHDVDAEPAKQDWIMSPKSTLNADFWEXSDEESETEDMLTSAAERIXSLASPCSALPDWESDDGWIVVHGGRPEASETTTPTAIAGTDFGPWSEEGLEAEVDVHFAGADAGRWYDLVRNVDGAHYFGWYERDLGVSVVTDRPLCLIVSHGRKIVKFGCHCDRERTMHFDFA

SEQ ID NO: 3644 - protein, 316 aa, Zea mays
MVLEATMICIDNSEWMRNGDYAPSRFQAQADAVNLICGAKTQSNPENTVGVMTMAGKGVRVLVTPTSDLGKILACMHGLEVGAEANLAAAIQVAQLALKHRQNKRQQQRIIAFIGSPVKYDKKVLETIGKKLKKNNVALDIVDFGESDDEKPEKLEALIAAVNSSDSSHIVHVPPGENALSDVLLSTPIFTGEEGGSGFAASAAAAVATGASGFEFGVDPNVDPELALALRLSMEEERARQEAIAKKAAEDTSNTENINASSSNSDSVMAEAELASNAAAGDKQEQPKPQDDDDLLQQALAMSMEGGASGSAGGSL

SEQ ID NO: 3645 - protein, 491 aa, Synechococcus elongatus PCC 7942
MPRGVAPAFAGRKPKGWAWASTAVPDFQGGFKRLINRFQGSKLWLACVPLAATIAVFWGVAANAQGSADPVPSAQFLVNNLWLMVATVLVIFMNAGFAMVETGLCRQKNAVNVLAKNLIVFTLAATAYWFIGYSLMYGSPVVDGFLYFGKGGPLGFFFDPTVSAETIKNDGLISSLDFLFQAAFAGTAATIVSGSVAERIKFVDFIIFSLILTAVIYPIAGSWQWNVGSGWLNKAGFIDFAGSTVVHSVGGWAALIGAITLGPRMGKFQDGRPGALPGHNLAIATLGALILWIGWYGFNGGSVLAFNTAVPYVAVTTTLGGAAGGISATITSWSTSGKPDLSMVINGILAGLVGVTAGCDGFGMGGSFIVGLIAGVLVVFSVYTFENLKIDDPVGACSVHLVCGIWGTLAVGLFNLEKGLFYGGGFGQLGSQILGIISYGVWTVVASVIIWNILKALLGLRVSLKKSYKAWILANTGWKPTLALPRMHLTP

SEQ ID NO: 3646 - protein, 456 aa, Bordetella parapertussis 12822
MTTLSSAQQQDIQYQLHSYTNAVKHRDVGPRIITHGEGVYVFDDQGNRYLEGMAGLWSVAVGFGEQRLVEAAARQFQELPYYHTFTHKSHPSVIALAERLIGYTDGRMAQAFFTNSGSEANDTVVKLVWYYNNALGRRDKKKIIARQRGYHGVTVASTSLTGLPGNHKDFDLPLPQIRHTACPHYYRYGLPGETEEDFATRMAGELEAMILREGPDTVAAFIGEPVMGAGGVIVPPRTYWQKIQAVCRKYDILVIADEVITGFGRLGQRFGSQVFDIEPDIMVLSKQITSSYQPLGAVLLNARVADVVAEHSGRLGTFGHGYTASGHPVATAVALENLRLIDERGLIEHAAEMGALLHLELQALSSHPLVGEVRGVGLIAGVELVADKATRQPFDPLGKAGGYAYERAHDHGLIVRGIQDTVAFCPPLIITAEQVRDMVARFARTLDDVAAHVAQG

SEQ ID NO: 3647 - protein, 506 aa, Zea mays
  misc_feature (155)..(155): Xaa can be any naturally occurring amino acid
  misc_feature (167)..(167): Xaa can be any naturally occurring amino acid
  misc_feature (173)..(173): Xaa can be any naturally occurring amino acid
  misc_feature (192)..(192): Xaa can be any naturally occurring amino acid
MASPAMVPLRQLFVDGEWRPPAQGRRLPVVNPTTEAHIGEIPAGTAEDVDAAVAAARAALKRNRGRDWARAPGAVRAKYLRAIAAKVIERKPGLAKLEALDCGKPYDEAPWDSDDVAGCFECFAHPLSSNIVTGLGPDACAPLSSHANSDKVYFXLVGLIPVRNYPXLMATWXKPAPALAAGKRAMLVFDDXAIDKAVEWTSVWVLLGLSSGVLDNDPVLGPDAGAPLSAHPDVDKVAFTGSFETGKKIMASAAPMVKPVTLELGGKSPIVVFDDVDIDKAVEWTLFGCFWTNGQICSATSRLLIHTKIAKKFNERMVAWAKNIKVSDPLEEGCRLGPVVSEGQYEKIKKFISNAKSQGATILTGGVRPAHLEKGFFIEPTIITDITTSMEIWREEVFGPVLCVKEFSTEDEAIELANDTQYGLAGAVISGDRERCQRLSEEIDAGCIWVNCSQPCFCQAPWGGNKRSGFGRELGEGGIDNYLSVKQVTEYISDEPWGWYQSPSKL

SEQ ID NO: 3648 - protein, 497 aa, Bordetella parapertussis 12822
MSTLPPLSHWESLAAGLTLRNQAFIDGRWHDGRAGPLAAINPATGQLLAEVTACSQADIDQAVAAARRAFESGVWSRMPRRERKQCMLRLAALIREHAEELALIETLDMGKPIGDTMAFDIPETAHTYAWYAETIDKQYDEIAPTDADALATITREPLGVVAAVVPWNYPLLMASWKVAPALAAGNSVILKPAEQSSLSALRLAELALQAGIPAGVLNVVPGAGPVAGRALGLHMDVDCLAFTGSTATGKRFMEYSGQSNLKQIWLECGGKSPHIIFDDCPDLDRAALAAAIGIFNNQGEVCIAGSRLYVQAGIYDTFVSKVEACARAMQPGNPLDPASPMGAMVDERQMARVLEYVESGRREGARLRMGGERVRADSGGYYIEPTIFECARPDLTIVREEIFGPVLAVTRFDGEDEVVAQANASAYGLGSGLWTADLSRAHRVSRRLRAGLVWVNCYFDGDVTVPFGGVKQSGFGRDKSLHALDKYTSLKTTWIRL

SEQ ID NO: 3649 - protein, 161 aa, Zea mays
MDGRMFGLETPLMVALQHFLDVPDGDAGAGGDKAGGGGPTRTYVRDARAMAATPADVKELPGAYAFVVDMPGLGTGDIKVQVEDERVLVISGERRREEREDAKYLRMERRMGKFMRKFVLPDNADMDKISAVCRDGVLTVTVEKLPPPEPKKPKTIEVKVA

SEQ ID NO: 3650 - protein, 369 aa, Brachymonas petroleovorans
MAKTGRIALFESPHQPFTFREMPVPDPKPGAAVVRVTMANICGSDLHAWHGDFKLAGLGGKLPTVLGHEMTGQIVALGEGKHTDGNGQPLHEGDHVVYTYFTGCGHCPMCLRGHRVSCDELTMAMTEPALEWPYFVGGYADYYYVKPGATIYKVPQGLPDEVVAGANCALSQVISGWERAQLTFDETVLIQGAGGLGLYACAVAKAFGARLVIAIDAVQQRLDMARRFGADATINLTELPDEKARVNLVKKLTDGRGVDVVMELVGRADVVPEGLRMLGQFGRYVTIGNINAGQTYAADPSRLVMSNKSMLGVSLYEPPTLGKALRFLERHRDTLPFAEMLSTRFPLEQINEAFAKADAREVVRASIVP

SEQ ID NO: 3651 - protein, 293 aa, Nostoc sp. PCC 7120
MGLTDNYKLNLIQWYPGHIAKAEKNLKEQLSRVDVVFEVRDARIPLATHHPQIDEWVGNKARILVLNRLDMIPPQVRSLWIDYFQNRGEVPYCTNAQHGQGVVGVAKAAQAAGVELNQRRRDRGMLPRAVRAVVIGFPNVGKSALINRLLGKRVVESAARPGVTRQLRWVRISDQLELLDAPGVIPVKLGNQEAAVKLAICDDIGQASYDNQLVAAALIDLVNSLQEQAGELLPKSPLYTRYELDPTPHTGEGYLHALAEYRHKGDVERTARQLLTDYRKGLLGTLPLELPPM

SEQ ID NO: 3652 - protein, 208 aa, Zea mays
MAGDEEDHLADAPRVVGVLSALLERVVERNDAVADELAAGTESAAPPSAFRATARPDISVRSYMARIARFAGCSPACYVVAYVYLDRLLRRARSAPAVDSYTVHRLLITAVLAAVKFMDDVCYNNAYFARVGGISLSEMNYLEVDFLFAVGFDLNVSPGTFGHYCTVLRGRDAVPGAGRVLPPPAASTSLHRCCLSEDDDGSSSTSSS

SEQ ID NO: 3653 - protein, 305 aa, Ferroplasma acidarmanus
MNMVDPDFNSLIELSKSAGDMTKIEPAMLRNFLDESSLSSRGKPVEIKETKDYKIKLDGRTLNARMYDNNNAKSAILYYHGGGFLFGNIETYDNYCRFLAKESWVKIISIEYRLAPEHKFPDAFNDAYDSFHYIAKKKKDFGIEGRIGVAGDSAGANLAAALCLKCRDGKTEMPAVQVLFYPSLAPDNFSRSFIEYSDNYVLTGKMIRYFGNMYSKNMQDLINPYFSPLVADDFSNLPPAIMVTNEYDPLRDPEETYVKKLREAGVRAVGIRGIGMIHGSATDFEVSDGARNIVKMVARIIPDYL

SEQ ID NO: 3654 - protein, 155 aa, Triticum aestivum
  misc_feature (55)..(55): Xaa can be any naturally occurring amino acid
MTRASTLDFRRKTQGQNNWSGPLRLVNVVRNKFPTYKNGTNGIVIKFADEPETPXLKESVAKGTADLLDRRQRLSVRELAMKFEKGLSTATLLSNETLSYCIGFNSQVKCKQVALLERDILLKDLKSVLESLRGQVAGKYKDEFEGSVSMGDILA

SEQ ID NO: 3655 - protein, 322 aa, Ustilago maydis 521
MSSALDSLKQYTAVVSDSGDFESIDAYKPQDATTNPSLILAAVKQEKYARLIDVAVKYAKEQTSDKSKQLDLATDRLLVAFGVEILKIIPGRVSTEVDARLSYNKEATIEKAKHLIALYESLGVKRERVLIKIASTWEGIQAARELESQHNIHCNLTLLFGFNQAVACAEANVTLISPFVGRILDYYKKAEGKEYASHEDPGVLSVQRIYTYYRQHGYKTIVMGASFRNIGEILELAGCDFLTISPKLLEELKNKEGPVEQKLSVEKAKSAEPIAKVSYINDQAAFLLDLAKDPMANTKLAEGIAGFAKDGATMEQMIADKL

SEQ ID NO: 3656 - protein, 510 aa, 'Flavobacterium' lutescens
MSFELLKALGLDATNSGTYLGDGEWSSATGAGTISPRNPTTGEVIAQVQATTEADYETILARAQQAFKVWRTTPAPRRGEAIRLCGEALRRHKDALGSLVALEMGKSKPEGDGEVQEMIDIADFAVGQSRMLYGYTMHSERPGHRMYEQYQPLGIVGIISAFNFPVAVWAWNSFLAAICGDVCIWKPSNKTPLTAIASMRICNEALREGGFPDIFFLINDAGTALSEKLVEDKRVPLISFTGSTQVGRIVNQKVAARLGRCLLELGGNNAIILDETADLKLAVPGIVFGAVGTAGQRCTTTRRLIVHESIYDNVLATLIKAYKQVEGKIGDPLDAANLMGPLNSPEAVQQFLASIEKAKAAGGTVQTGGTAIDRPGNFVLPAIVTGLKNSDEVVQHETFAPILYVMKYSTLDEAIEMQNGVPQGLSSSIFTTNLKAAEKFLSAAGSDCGIANVNIGTSGAEIGGAFGGEKETGGGRESGSDAWKVYMRRQTNTINYSDSLPLAQGIKFDL

SEQ ID NO: 3657 - protein, 191 aa, Zea mays
  misc_feature (102)..(102): Xaa can be any naturally occurring amino acid
MSLCTIARRLCLSKPSSGSRLSAIWAHLYSTEAAKDMGAKKYKYPDVYDPYGPMPPPSEKVVELADRIAALPPEEIKQIAPALLLRLNQEPPQAVSGPGFRXGAQVGSGAGSGKAEKKAEKTVFDVRLEKFDAAAKIKIIKEIRTFTDLGLKEAKELVEKAPVVLKQSLTKEEAEAIIAKIKAAGGVAVME

SEQ ID NO: 3658 - protein, 193 aa, Emericella nidulans
MAEIRRKLVIVGDGACGKTCLLIVFSKGTFPEVYVPTVFENYVADVEVDGKHVELALWDTAGQEDYDRLRPLSYPDSHVILICFAVDSPDSLDNVQEKWISEVLHFCQGLPIILVGCKKDLRHDPKTIEELNKTSQKPVTPEQGEEVRKKIGAYKYLECSARTNEGVREVFEAATRAALLTKTHKSKKKCSIL

SEQ ID NO: 3659 - protein, 388 aa, Streptococcus pyogenes MGAS8232
MKNQLGQLALEQAKTFGGKLEVQPKVDIKNKHDLSIAYTPGVASVSSAIAKDKTLAYDLTTKKNTVAVISDGTAVLGLGDIGPEAAMPVMEGKAALFKAFAGVDAIPIVLDTKDTEEIISIVKALAPTFGGINLEDISAPRCFEIEQRLIKECHIPVFHDDQHGTAIVVLAAIFNSLKLLQKSLDEVSIVVNGGGSAGLSITRKLLAAGATKVTVVDKFGIINEQEAAQLAPHHLDIAKVTNREFKSGTLEDALEGADIFIGVSAPGVLKAEWISKMAARPVIFAMANPIPEIYPDEALEAGAYIVGTGRSDFPNQINNVLAFPGIFRGALDARAKTITVEMQIAAAKGIASLVPDDALSTTNIIPDAFKEGVAEIVAKSVRSVVLKS

SEQ ID NO: 3660 - protein, 368 aa, Pseudomonas putida KT2440
MNMSDTFLNPVTTQTWANGRHIVRCVKVIQETWDVRTFCFMADQPIMFFFKPGQFVTLELEIEGKPVMRSYTISSSPSVPYSFSITVKRVPGGLVSNFLHDTMHEGAELPVHGPVGLFNAIDFPAGKVLYLSGGVGITPVMSMARWFYDTNANVDMVFVHSARSPKDIIYHRELEQMASRIPNFSLHIICEKHGLGEPWAGYRGYLNQRLMELIAPDYMERVVFCCGPTPYMTAVKRMLEAVGFDMKNYHEESFGATPPEAKADAVEHAEQAADAPELDVSDLNLVEFIGSEKSIRIAPGETVHAAAAKVGLMIPKACGMGICGTCKVLKLGGEVEMEHNGGITEEDEAEGYILSCCSVPKGDVRIDY

SEQ ID NO: 3661 - protein, 349 aa, Streptococcus pyogenes MGAS8232
MKAATYLSTGNLQLIDKPKPVIIKPTDAIVQLVKTTICGTDLHILGGDVPACKEGTILGHEGIGIVKEIGDAVTNFKIGDKVIISCVTSCHTCYYCKRGLSSHCEDGGWILGHLINGTQAEYVHIPHADGSLYHAPDTIDDEALVMLSDILPTSYEIGVLPSHVKPGDNVCIVGAGPVGLAALLTAQFFSPANIIMVDLSQNRLEAAKTFGATHTICSGSSEEVKTIIDDITNGRGVDISMECVGYPATFDICQKIISVGGHIANVGVHGKPVDFNLDELWIKNITLNTGLVNANTTEMLLNVLKTGKIDATRLITHHFKLSEVEKAYETFKHAGANNALKVIIDNDIS

SEQ ID NO: 3662 - protein, 383 aa, Rickettsia sp. R300
DISRVSAEADCFTYDPGFMSTASCQSTITYIDGDKGILRHRGYDIKDLAEKSDFLEVAYLLIYGELPSGEQYNNFTKQVAHHSLVNERLHYLFQTFCSSSHPMAIMLAAVGSLSAFYPDLLNFKEADYELTAIRMIAKIPTIAAMSYKYSIGQPFIYPDNSLDFTENFLHMMFATPCTKYKVNPIIKNALNKIFILHADHEQNASTSTVRIAGSSGANPFACISTGIASLWGPAHGGANEVVINMLKEIGSSEYIPKYIAKAKDKNDPFRLMGFGHRIYKNYDPRAAVLKETCKEVLKELGQLDNNPLLRIAIELEAIALKDEYFIERKLYPNVDFYSGIIYKAMGIPSQMFTVLFAIARTVGWMAQWKEMHEDPEQKISRPR

SEQ ID NO: 3663 - protein, 289 aa, Bifidobacterium longum NCC2705
MTNGHINPANVPDIALKDGHSIPQVGLGVLRIDDEGVVPVVESALEAGYRHIDGAAGYNNEAGVGRALAASGYNKGAKRETLWVTTKLRDSQQGYDSALKAFDNSLKLLQLDYVDMYMIHWPTPFDWRSTDTWKAFVKLRDEGMARTLGVCNFMPADLKRLHEETGAWPAVNQIELHPTWQQREVVAFCKEHGIAVEAYSPMARGADLNAGDGTIEKIAAAHEVSPAQVILRWHIENGTIIIPKSVHADRQKENLNLFGFALTADEHAAIDALDGPTRAGHDPLTFTYA

SEQ ID NO: 3664 - protein, 466 aa, Thermosynechococcus elongatus BP-1
MSLWRPTAILLASDLPLIPPTRLRAMTLPTFVDLNLDPFWMPFTANRQFKQSPRLLVSAAGMYYRSIDGREILDGTAGLWCVNAGHCRPEIISAIAQQAATLDFAPTFQMGHPGPFQVADRLRRITPDPLNHVFFANSGSEAVDTALKIALAYHRLRGEGTRQRLIGRERGYHGVGFGGISVGGIAPNRKFFGSLLAGVDHLPHTHNLEHNAFSKGQPTWGAHLADELERLVALHDASTIAAVIVEPLAGSTGVLIPPQGYLERLRAICDRYGILLIFDEVITGFGRLGAPFASQYFGVTPDLITVAKGLTNAAVPMGAVIVRDEIYETFMQGPAGQIEFFHGYTYSGHPLACAAALATLEIYEKEALFERAASLAPYWQEAIHSLRGLPHVIDIRNLGLVAGIELAPREGQGGPRGYDALCRAFEAGLLIRVTGDIIALSPPLIVERSHIDQMVDILSRVLQELP

SEQ ID NO: 3665 - protein, 477 aa, Helianthus tuberosus
HEWVLGVGKPKNLPPGPTRLPIIGNLHLLGALPHQSLAKLAKIHGPIMSLQLGQITTLVISSATAAEEVLKKQDLAFSTRNVPDAVRAYNHERHSISFLHVCTEWRTLRRIVSSNIFSNSSLEAKQHLRSKKVEELIAYCRKAALSNENVHIGRAAFRTSLNLLSNTIFSKDLTDPYEDSASGKEFREVITNIMVDSAKTNLVDVFPVLKRIDPQGIKRGMARHFSKVLGIFDQLIEERMRTGRFEQGDVLDVCLKMMQDNPNEFNHTNIKALFLDLFVAGTDTTSITIEWAMTELLRKPHIMSKAKEELEKVIGKGSIVKEDDVLRLPYLSCIVKEVLRLHPPSPLLLPRKVVTQVELSGYTIPAGTLVFVNAWAIGRDPTVWDDSLEFKPQRFLESRLDVRGHDFDLIPFGAGRRICPGIPLATRMVPIMLGSLLNNFDWKIDTKVPYDVLDMTEKNGTTISKAKPLCVVPIPLN

SEQ ID NO: 3666 - protein, 487 aa, Burkholderia cepacia R18194
MTIKHWIGGREVESRETFTTLNPATGDVITDVASGGEAEVDAAVRAAKEAFPKWASTPAKERAKLMRKLGELIEKNVPNLAALETQDTGLPIAQTSKQLIPRASENFNFFAEVCVQMNGRTYPVDDQMLNYTLYQPVGVCALVSPWNVPFMTATWKTAPCLALGNTAVLKMSELSPLTADQLGRLALEAGIPPGVLNVVQGYGATAGDALVRHPDVRAVSFTGGTVTGKRIMERAGLKKYSMELGGKSPVLIFDDADFDRALDASLFTIFSINGERCTAGSRIFVQRTIYDRFVQEFARRANNLIVGDPSDPATNLGAMITRQHWEKVTGYIRIGEQEGARVVAGGADKPAGLPDHLRNGNFVRPTVLADVDNRMRVAQEEIFGPVACIIPFEDEDDGLRLANDTAYGLASYIWTQDVGKVHRLARGIEAGMVFVNSQNVRDLRQPFGGVKESGTGREGGEYSFEVFAEIKNVCISMGSHHIPRWGV

SEQ ID NO: 3667 - protein, 118 aa, Triticum aestivum
  misc_feature (7)..(7): Xaa can be any naturally occurring amino acid
  misc_feature (10)..(10): Xaa can be any naturally occurring amino acid
  misc_feature (16)..(16): Xaa can be any naturally occurring amino acid
  misc_feature (38)..(39): Xaa can be any naturally occurring amino acid
  misc_feature (44)..(44): Xaa can be any naturally occurring amino acid
  misc_feature (52)..(52): Xaa can be any naturally occurring amino acid
  misc_feature (62)..(62): Xaa can be any naturally occurring amino acid
  misc_feature (79)..(80): Xaa can be any naturally occurring amino acid
  misc_feature (83)..(83): Xaa can be any naturally occurring amino acid
  misc_feature (90)..(90): Xaa can be any naturally occurring amino acid
  misc_feature (98)..(98): Xaa can be any naturally occurring amino acid
  misc_feature (105)..(107): Xaa can be any naturally occurring amino acid
  misc_feature (110)..(110): Xaa can be any naturally occurring amino acid
  misc_feature (114)..(114): Xaa can be any naturally occurring amino acid
MAPAVTXSSXTTVAPXQGLKSTAGLPVSRRTSASLGSXXNGGRXRCMQVWPXEGIKKYETLXYLPPLATEALLKQVDYXXRSXWVPCLEXARWLRFRXHNSPPGXXXGRXWTMXKHGA

SEQ ID NO: 3668 - protein, 178 aa, Zea mays
MAEAPASPGGGGGSHESGSPRGGGGGGSVREQDRFLPIANISRIMKKAIPANGKIAKDAKETVQECVSEFISFITSEASDKCQREKRKTINGDDLLWAMATLGFEDYIEPLKVYLQKYREMEGDSKLTAKSSDGSIKKDALGHVGASSSAAEGMGQQGAYNQGMGYMQPQYHNGDISN

SEQ ID NO: 3669 - protein, 380 aa, Yarrowia lipolytica
MLPPPRARCRHKSFRHPHPSHRHRHTPTHSRITRPTRTATMEDSDVLMRDINDDGLKPMDAMGAGGEGTFTELTPTTRGQLDAWIARLTECQPLSEDDVNELCNMAKGVLQKEENVQPVHAPVTICGDVHGQFHDLMELFKIGGPCPDTNYLFMGDYVDRGYYSVETVSYLVAMKVRYPNRLTILRGNHESRQITQVYGFYDECLRKYGNANVWRAFTSLFDYFPVTALVENQIFCLHGGLSPMIESIDNIRELNRFQEVPHDGPMCDLLWSDPDDRGGWGMSPRGAGFTFGADISEQFNHTNNLSLISRAHQLVMEGFSWAHEQQVVTIFSAPNYCYRCGNQAAIMEVDENLSNSFLQYDPCPRPGEPSVSRRTPDYFL

SEQ ID NO: 3670 - protein, 455 aa, Aspergillus niger
  misc_feature (72)..(72): Xaa can be any naturally occurring amino acid
MDRRVTIASQVAIAAVAGYCIYKAFNARQQQKSLKDAVPKSSAAPLTPEQIKIIKATVPVLQEYGTKITTAXYMNMSTVHPELNAVFNTANQVKGHQARALAGALFAYASHIDDLGALGPAVELICNKHASLYIQADEYKIVGKYLLEAMKEVLGDACTDDILDAWGAAYWALADIMINREAALYKQSQGWTNWRQFRISKKVPESDEITSFYLEPVDGKPLPAFRPGQYISVSVQVPEEDPQARQYSLSDTSRSDYYRISVKKETGLDPRAPGAKRHPGYVSNVLHDMIKEGDLIDVSHPYGDFFLSTAEATHPIVLLSAGVGMTPMMSILNTITKKSNRKIHFIHGSRTTEARAFKSHVQKLEKEIPNMQVTYFLSRPGDSDQLGVDYHHAGRIDLQKLDGPSHLYLDNPSTEYYICGPDTFMTQMEEALKAYGVGDDRIKMELFGTGGVPHN

SEQ ID NO: 3671 - protein, 220 aa, Arabidopsis thaliana
MEPRINDLQVESRVHELLDFPVHTNQISSAIYEILLQCPNDHIENPKKKPYNCPHSGAKCDVTGDIQRLLLHLRNDHNVEMSDGRSFSHRYVHHDPKHLHHATWMLTLLDCCGRKFCLYFEAFHLRKTPMYMAFMQFMGDEEEAMSFSYSLQVGGNGRKLTWQGVPRSIRDSHKTVRDSQDGLIITRKLALFFSTDNNTTDKELKLKVSGRVWREQPVSI

SEQ ID NO: 3672 - protein, 669 aa, Zea mays
MSASQSSMSGAGEPGARAVVWFRRDLRVEDNPALAAAARAAGEVVPAYVWAPEEDGAYYPGRVSRWWLSQSLKHLDASLRRLGAARLVTRRSNDAVAALLDLVRCTGATHLLFDHLYDPLSLVRDYRVKEQLAAEGIDVQSFNADLLYEPWEVLDEDRRPFTMFAPFWNRCLCMPDPAAPLLPPKRINSGDLSRCPWDELVFEDESERGSNALLARAWSPGWQNADKALTAFLNGPLMDYSVNRKKADSASTSLLSPYLHFGELSVRKVFHQVRMKQLMWSNDGNHAGEESCTLFLRSIGLREYSRYLTFNHPCSHEKPLLSHLRFFPWVVNEVYFKVWRQGRTGYPLVDAGMRELWATGWVHDRIRVVVSSFFVKVLQLPWRWGMKYFWDTLLDADLESDALGWQYISGSLPDGRELDRIDNPQFEGYKFDPHGEYVRRWLPELARLPTEWIHHPWDAPESVLQAAGVELGSNYPRPIVELDAANSRLQDALSEMWELEAASRAAMENGMEEGLGDSTDEPPIDFPQELRMEVDRQPVQPAIHAPGVTGRRREDQMVPSMTSSFIRAETELTADFGHTSEDSRPEVPSNIHHLQARPEREETVDGGTGNAVRVHGNHHQQSLQNNMHRVLGIAPSISEASSSWTGRDGGVEPVWSPPAASGHSDSYAA

SEQ ID NO: 3673 - protein, 160 aa, Brassica napus
KHPNRKKESFISDSDYFKKSRESPNTFFRSQSFIFWESLNFPGKFITLSLDSPESNSSGSIKMKPPASLDHWRDYFRRADSDIFQIIDHAIMVAAADSPIKFKSRRDKIAELLFSCRVARCNGCDHLELSIPGEDTAAGGGGSKESNNPVWRGKEGGRPE

SEQ ID NO: 3674 - protein, 352 aa, Streptomyces tubercidicus
MTDTASELDPSTGWAEPTAEAPPEAALMQLLMGGFVTQSIGVAARFGVADALAQGPRHVDDIAAEVGAHAPSLYRLLRALGDFGVFAELAGRRFALTPAGELLRSDSTPSLRGLAEHFGSGFHRAAWSGLYDSVRTGEAAFERVHGAPQFDYYRSHPEEAATFDAAMTSVASAIYATLESYDFGRFSTVVDVGGGNGAYLSGILASYPALRGVLFDLPDVVERSAPVLAKAGVADRCEVAGGSFFDAVPPGADAYVLTAVIHDWDDEASVRILRNCRAAMPAHATLLLGEPVLPDGPEPSVGKLLDLETLIGTTGRQRTEAEFRELLDRAGLRLTRVLHSSGPDSLVEAVPR

SEQ ID NO: 3675 - protein, 355 aa, male-killing Rickettsia from Adalia bipunctata
GFMSTASCRSTITYIGGDKGILRYRGYDIKDLAEKSDFLEVAYLLIYGELPSSEQYNNFTKKVAVHSLVNERLHYLFQTFCSSSHPMAIMLAAVGSLSAFYPDLLNFKEADYELTAIRMIAKIPTIAAMSYKYSIGQPFIYPDNSLDFTENFLHMMFAAPCEKYKVNPIIKNALNKIFILHADHEQNASTSTVRIAGSSGANPFACVSTGIASLWGPAHGGANEAVINMLKEIGSSENIPKYIAKAKDKNDPFRLMGFGHRVYKNYDLRAAVLKETCKEVLKELGQLDGNPLLQIAIELEAIALKDEYFIERKLYPNVDFYSGIIYKAMGIPSQMFTVLFAIARTVGWMAQWKEM

SEQ ID NO: 3676 - protein, 340 aa, Streptomyces tubercidicus
MGSDIAQDGSLQLLEISESFIYARALHLAAELKLADLLADGPRPTAELAEASATRPAALYRLLRALAGRGVFTEVETGRFGLTPVGECLRSDHPRSVRATVAQAGRLTAKTFNHAEEVLRTGEGAFTTAFGQPVWDYLQEHPDEGADFDTAMHEHSRIERDAIVAAYDFSGTARLVDIGGGDGTLLATVLTAHPETAGVLFDLPHVVERHRIGDAGLTDRCEIVGGDVFGELPAGGDLYMMKSVLHGWTDREVVSILTGCRRAMKPDGTLLLIERVIPVGDTPHSSKAFDLAMLVMAGGQERTQDEYTELLTEAGFRVERVIGTDSSLSIVEAVPTGAAL

SEQ ID NO: 3677 - protein, 414 aa, Oryza sativa (japonica cultivar-group)
MGNCASAIDSFFFTKRANNENDDDDAAPGMSASKRTTSSTTTGKLSTLSNSTFIPSTISGVSTDDAYPDGQILESRNLRIFTFAELKNATKNFRTDTVLGEGGFGKVYKGWVDERTMNPSKSSTGVVVAVKKLNPESVQGTEQWESEVNFLGRISHPNLVKLLGYCKDNDELLLVYEFMAKGSLENHLFRRGAVYEPLPWSLRLKILIGAARGLAFLHSSERQIIYRDFKASNILLDSNFNAKLSDFGLAKHGPDGGLSHVTTRVMGTYGYAAPEYVATGHLYVKSDVYGFGVVLLEMLSGLRALDPSRPSGKLNLVDWAKPLLADRRKLSQLMDSRLEGQYHSRGALQAAQLTLKCLSGDPKSRPSMKEVVEALEKIKLIKSKSREPRNSSSLVRGQGNSPRSDSARTSSKGR

SEQ ID NO: 3678 - protein, 355 aa, Gibberella zeae
MSRANPPNAAGSRKISFNVSEQYDIQDVVGEGAYGVVCSAIHKPSGQKVAIKKITPFDHSMFCLRTLREMKLLRYFNHENIISILDIQKPRSYESFQEVYLIQELMETDMHRVIRTQDLSDDHCQYFIYQTLRALKAMHSANVLHRDLKPSNLLLNANCDLKVCDFGLARSAASQEDNSGFMTEYVATRWYRAPEIMLTFKEYTKAIDVWSVGCILAEMLSGKPLFPGKDYHHQLTLILDVLGTPTMEDYYGIKSRRAREYIRSLPFKKKVPFRTLFPKTSDLALDLLEKLLAFNPVKRITVEEALKHPYLEPYHDPEDEPTAPPIPEEFFDFDKHKDNLSKEQLKQLIYQVIMW

SEQ ID NO: 3679 - protein, 123 aa, Phytophthora infestans
MIQIQTKLKVNDNSGIKIGQCLKIYKKKVGKIGDTILISAKKLRLNQKKKIKIIKGDLFKALIIHTTYQKKSTIGNLIKFDKNCIIILNNQNKPLGTRIFGPITSEFRKQKNFKILSLASNIL

SEQ ID NO: 3680 - protein, 192 aa, Xylella fastidiosa Temecula1
MNMLNVLRFPVLALALAFVSSGVLADVGSLLDLDYRPLAGKETVNLQRLYGGKVLLVVNTASKCGFTPQYEGLEALHQKLSPLGFAVLGFPSNDFKGQEPGDEQQIQEFCTLTYGVKFPMFQKVHVKGNEVTPLYQRLTQTTGVAPGWNFHKYLIARDGHVVAQFDSRTRPDDPILLEAIKRELAKSVQVVH

SEQ ID NO: 3681 - protein, 363 aa, Bacillus sp. KSM-K16
MLYAKGLENVVVAETTISAIDGEQGTLLYRGYQAEELAKSADFEDVAYLLLNGQRPTEAEKDDFSTALKTMRPLPDDLKKLLAALPKDLSMMDALRTLISSYTGKEGWPPQQQEAMRLVAIVPTIVAAWANRSCGKDAIEPDPSLNHVANYLYMLTGEKPHAAHIRALSAYLILTAEHGMNASTFAARVIASTEADLRSAICGALGALKGRLHGGAPTGVLELFSDIQTADTSSETLLREKLERGERLMGFGHRVYKTTDPRANALREVLKSLNNQETFLSEAVAIEQLATQLLAEYKPGRQLHANVEYYAAAIMEALRLKPDWFTPTFCVSRVVGWCSHVIEQSQDNRIMRPQQQYCGPKPD

SEQ ID NO: 3682 - protein, 132 aa, Candida albicans SC5314
MIYLKSLLNVIDNSGAQVVECIKVLRHKPKSCAQIGDRITCVVKQARPLQQELTGQSSTNRVKRRDICQAVVVRTRAPLKRKDGSVVRFDDNACVLINKNGEPLGTRISSVVAKELKDLNYNKIVALAPKTF

SEQ ID NO: 3683 - protein, 281 aa, Leptospira interrogans serovar Lai str. 56601
MMELWLDEALELKNGRALKIKVKEFLHSRTTPFQKIDVFESVGFGRMFTLDGVVMMTEADEFAYHEMIVHVPMMSHPNPEKVLVIGGGDGGTVREVLKHPSVKEVHLCEIDKGVIDVCYEYFPEIANAMKDPRVKHAYEDGAKYVKDYQNYFDCIMVDSSDPVGPAEVLFKRPFYETMANCLKEGGICTTQGESFYYHGSIIRELFNFIPEIFKHCGYYYTVVPTYPSGIIGFTYCSKGPDPYTVVPDPQRVPQGLKYYSAEMHKAAFVLPQFAQKHIVRK

SEQ ID NO: 3684 - protein, 301 aa, Triticum aestivum
  misc_feature (161)..(161): Xaa can be any naturally occurring amino acid
  misc_feature (210)..(210): Xaa can be any naturally occurring amino acid
  misc_feature (245)..(245): Xaa can be any naturally occurring amino acid
  misc_feature (255)..(255): Xaa can be any naturally occurring amino acid
  misc_feature (258)..(258): Xaa can be any naturally occurring amino acid
  misc_feature (272)..(272): Xaa can be any naturally occurring amino acid
MKTLFILTILAMATTIATANMQVDPSGQVQWPQQQPFRQPQQPFYQQPQHTFPQPQQTFPHQPQQQFPQPQQPQQQFPQPQQPQQPFPQPQQAQLPFPQQPQQPFPQPQQPQQPFPQSQQPQQPFPQPQQPQQSFPQQQQPLIQPYLQQQMNPCKNYLLQXQCNPVSLVSSLVSMILPRSDCQVMQQQCCQQLAQIPRQLQCAAIHSVVXHSIVMQQEQQQGIQILRALFQLVQGQGIIQPQQPXAQYEVIRSLXYLXTLSNIVHVYVRPDXSTIKRTHFASISRRALSGTMEKMKELWLI

SEQ ID NO: 3685 - protein, 326 aa, Acinetobacter sp. ADP1
MLQSLDPQLASFFAMLENQGAPAFDIGTLNDPNINEMRNWYLNFGPHVAGQFIELQDVEDLWIQVDDGSLRLRLYKTQRQHSESCETLIYFHGGGWCIGSIETHDLLCRHLVNDLDVNVISVDYRLAPEYPYPQAAHDAIHATQWIFEHASALGIHPDHLYVAGDSAGGNLAAITALTFKEQTYRTSLAGQILIYPCIDLTVIHDNKYPSFEKQKLTPPLSAEQMSKMIQIYLKNEDFAYQWLASPLLAQSHQHLPSTLIITAEFDPLHDQGCVYFEKLKSSLVNTEYHEIKGVVHGFFEMYGVLNKTKETINIIRAWLKNNTKSK

SEQ ID NO: 3686 - protein, 501 aa, Candida albicans SC5314
MTIPLSVDVTLPDGKKFTQPTGLFINNEFIKSKSGKTLESINPGTSEINGEVYAAESEDIDYAVECASKAFKSWKKITGVERGKYLYKLADLVEQQRDLLGAMEAWDSGKTKSTNAVFDVDECIAVIRYAASWADKITGKVIQNDPKKFAYTIHEPWGVCAQIVPWNYPLLMSMWKIPIAVAAGNTVVLKTSEITPLSMLYFASLVKQVGFPPGVINIVSGFGATAGAALASHKKVAKIAFTGSTATGKIIQKLAAENLKAVTLECGGKSPLIIRSDADIDQAVKWGAIGIMSNQGQICTSTSRIYVHESIYDKFIEEFAAHVKSDYKQGDVFDDEAVVGPQVSKMQHDKILNYIDIGKKEGARCVLGGEKNIEGELSKGYFVKPTIFADVKPEMRIVNEEIFGPVVVVGKFSTDEEAITYANQTDYGLGAAIFTKDITAAHNMASDIEAGMVWINSSNDSDYHVPFGGVKMSGVGRELGEYGLNMYTQAKAVHVNLGTRL

SEQ ID NO: 3687 - protein, 158 aa, Zea mays
PEPHDVGRYIQAEVKSGGQISIPKTAGSIDPAAGLVEYVETLVRNPETDYNVVIIQVNGVAQAADSVHVLCIGRLRMRLAKEKTVVAKEFYSSSMQLCGVRGGGDAAPQSIFWQPRKGLSFVLAFETTRERNSALMLARRFAIDCNIILGGPGDKTSW

SEQ ID NO: 3688 - protein, 52 aa, Glycine max
  misc_feature (43)..(43): Xaa can be any naturally occurring amino acid
KFGLTTAQILRVVKNLDLAGMLDWLRLTHFHTGSQIPSTALLXDGVGTRCAD

SEQ ID NO: 3689 - protein, 206 aa, Triticum aestivum
  misc_feature (171)..(171): Xaa can be any naturally occurring amino acid
MATSFQGTTTKCNACDKTVYLVDKLTADNRVYHKACFRCHHCKGTLKLANYNSFEGVLYCRPHFDQLFKRTGSLDKSFEGTPKVVKPERNVGNENATKVSSAFAGTREKCFGCTKTVYPIERVTVNNTMYHKSCFKCCHGGCTISPSNYIAHEGKLFCKHHHTQLIKEKGXSASSRTTTTRRHRVPGQWMMKTRSISQSLRISIDE

SEQ ID NO: 3690 - protein, 278 aa, Leptospira interrogans serovar Copenhageni str. Fiocruz L1-130
MNNKENPLKQTIMLNNGISMPILGLGVWKTKSGKECKEAVLNALEAGYRHIDTARIYDNEVDVGQAIRESGIPRKEIFITTKLWNADQGSDKTRKALENSLDRLGIDFVDLYLIHFPVTSKRMDSWKELEKLYHDKLCKAIGVSNYTIIHLTELLKNSQITPAVNQVEFHPFLNQIHLLEYCKKHKIQLEAYSPLAHGQKIEDPTIAKIAQKYDKTPAQILIRWAIEQKIVVIPKSIKKERIIENSKVFDFAISEEDMKILNSLDEDFRTCWDPSEVV

SEQ ID NO: 3691 - protein, 161 aa, Xanthomonas campestris pv. campestris str. ATCC 33913
MTTLSTYQFTDLDGQPQSLAEYAGKVVLVVNVASKCGFTPQYAGLQALWQRYRDRGLVVIGFPCDQFGHQEPGDAADIRQFCSLDYAVDFPLAAKVEVNGSGAHPLWQWLKHEKRGVLGSEAIKWNFTKFLIGRDGSVLERYAPTTKPEALAADIERALGA

SEQ ID NO: 3692 - protein, 428 aa, Bacillus cereus ATCC 14579
MNYLFKNGRYMNEEGKIVATDLLVQDGKIAKVAENITADNAEVIDVNGKLIAPGLVDVHVHLREPGGEHKETIETGTLAAAKGGFTTICAMPNTRPVPDCREHMEDLQKRIEEKAHVNVLPYGAITVRQAGSEMTDFETLKELGAFAFTDDGVGVQDASMMLAAMKRAAKLDMAVVAHCEENTLINKGCVHEGKFSEKHGLNGIPSVCESVHIARDILLAEAADCHYHVCHVSTKGSVRVIRDAKRAGIKVTAEVTPHHLVLCEDDIPSADPNFKMNPPLRGKEDHAALIEGLLDGTIDMIATDHAPHTAEEKAQGIERAPFGITGFETAFPLLYTNLVKKGVITLEQLIQFLTEKPADTFGLEAGRLKEGRAADITIIDLEQEEEIDPTTFLSKGKNTPFAGWKCQGWPVMTIVGGKIAWQKESALV

SEQ ID NO: 3693 - protein, 476 aa, Naumovia castellii
MSAVLSTQTTRSILSNSGRRAATIALIHRLYTTASAEPTLKETFSQLIPSKIDEIKQFKKDHGKTVIGNVLLEQAYGGMRGIKGIVWEGSVLDPEEGIKFRGLTIPEIRDQLPKLGDEPLPEGIFWLLLTGEIPSRAQVEQLSADLASRAELPEHVVNLLNGLPKHLHPMAQFSIAVNALESESKFAKAYAQGVNKKEYWKYTFEDSLDLLGKLPTIAATIYRNVFKDGKLGAWDPQADYGKNLATLMGFKNKDFMELMRLYLTIHSDHEGGNVSAHTTHLVGSALSSPYLSLAAGLNGLAGPLHGRANQEVLEWLFKLREEVKGDYSKETIEKYLWDTLNSGRVVPGYGHAVLRKTDPRYTAQREFALKHFPDYELFKLVSSIYEVAPKVLTKQGKTKNPWPNVDSHSGVLLQYYGLTEASFYTVLFGVARAFGVLPQLIIDRAVGAPIERPKSFSTEKYKELVAKIESGETKVV

SEQ ID NO: 3694 - protein, 506 aa, Arabidopsis thaliana
MERTLLQWRLLPLLALIVALFSFFFASPRSLQGNNKCSLLPHDHYWISSKRIVTPNGLISGSVEVKGGIIVSVVKEVDWHKSQRSRVKVIDYGEAVLMPGLIDVHVHLDDPGRSEWEGFPSGTKAAAAGGITTLVDMPLNSFPSTVSPETLKLKIEAAKNRIHVDVGFWGGLVPDNALNSSALESLLDAGVLGLKSFMCPSGINDFPMTNITHIKEGLSVLAKYKRPLLVHAEIERDLEIEDGSENDPRSYLTYLKTRPTSWEEGAIRNLLSVTENTRIGGSAEGAHLHIVHLSDASSSLDLIKEAKGKGDSVTVETCPHYLAFSAEEIPEGDTRFKCSPPIRDAANREKLWEALMEGDIDMLSSDHSPTKPELKLMSDGNFLKAWGGISSLQFVLPITWSYGKKYGVTLEQVTSWWSDRPSKLAGLHSKGAVTVGKHADLVVWEPEAEFDVDEDHPIHFKHPSISAYLGRRLSGKVVSTFVRGNLVFGEGKHASDACGSLQLATT

SEQ ID NO: 3695 - protein, 480 aa, Thermosynechococcus elongatus BP-1
MSLRLFWHRRDLRLNDNLGLAAAYTRTPKVVGLFCFDPAILSASDIAAVRVAYLVGCLQALQEAYRRLGGSFLIFRGDPRQILPQVAKGLGAVAVHWHEDVEPYGRERDRAVAAALKEKGIAVETAWDQLLHPPEAIQTKQGQPYTVYSPFWRNWSSLAKPEPVSAPRHLEPLTEIEQATAGTLGAICLPTAKDLGFHWSGDLILAPGEAAAQAQLETFIDQHIQDYGEQRNYPAQPGTSLLSPALKFGVIGIRRVWTATQAAMAAARSEEAQRSIRTWQQELAWREFYQHALYWFPHLAERPHREGFATFPWLNNEAHFAAWCEGRTGYPIVDAAMRQLNETGWMHNRCRMIVASFLTKDLIINPQWGERYFMQKLIDGDLAANNGGWQWSASSGMDPKPLRIFNPASQAQKFDPEAEYIRRWLPEVRSLDTIDLVTGNISPLERHRCGYPLPIVDHRQQQQRFKQLYQEHFRSPIPQE

SEQ ID NO: 3696 - protein, 473 aa, Naumovia castellii
MLRFSRQLHNSTRLCSQATGLKESLKAIIPKRKEEFLKLKKECMGTKVDDITIGSILSGMRGNRSMFWEGSMVDAQRGITFHGKTIEQCQRELPGDESGNFYPESMLWLLMTGEVPTKQQTKQLMEELAVRGSEANFPIATSRVIDSLPNDMHPMTQLAIGLASMNKVSRFASNYEKGLLNKNNYWEDTFEDTLNLISFLPILTGKIYSKITNDGKPLGKFSPTEDWSSNICSLMGMSNSTYSVNKNNFNASESKDFLSLMRLYTGIHADHEGGNVSAHTTHLVGSALSDPYLSYSSGIMGLAGPLHGLAAQEVVRFLVEMNGQISSPNQPDEIERYLWDLLNSKRVIPGYGHATLRKPDPRFTAMLKFTKDRKSEFENDKNVVLMQNLSSIAPKVLKAHGKCQNPYPNVDSASGILFHHYGLKESLFFTVIFGCSRSMGPLTQLVWDRIYGLPIERPKSVNMETLKLLSNSQ

SEQ ID NO: 3697 - protein, 177 aa, Triticum aestivum
MAGVSRSMVAPLLVLNLVMYIVVIGLASWNLNHFINGTTNYAGVAGNGATFYFLLFAILAGVVGAASKLAGVHHVRTWRGDSLATSASSALVAWAITALAFGLACKEIHVGGHRGWRLRVLEAFIIILAFTQLLYVMALHAGLFGNQFGDGYGGAEHQYGDHHHHKGMGTAAATARV

SEQ ID NO: 3698 - protein, 271 aa, Triticum aestivum
EIREARRIKMLHQPSKVMDMQFELQGLRTLISEKTQLCNQLKKELAMIKRLEQDSSKLFELEGSDTLGSQFRIVPRVDGAPDISSGPPRWYRVISGGHRELVSGATRLTYAPEPFDVGQLLQAEIILKADKVTVQTDGPINHASGLEHYVESLMKRADIEFNVVVTQMNGNDYASKSVHVFHIGKLRVKLRKGRSTKARESYSTTMKLCGSRGGGNAAACAVFWQTRKGLSYTLAFETDRDRNAAIMLARKFASSCNVVLAGPGDQVHGGG

SEQ ID NO: 3699 - protein, 426 aa, Helicobacter pylori 26695
MSVTLVNNENNERYEFETIESTRGPKAVDFSKLFETTGFFSYDPGYSSTAGCQSKISYVNGKKGELYYRGHRIEDLVAKYKYVDVCKLLLTGELPKNQDESLEFELELRHRSFVHESLLNMFSAFPSNAHPMAKLSSGVSILSTLYSTHQNMHTEEDYQTMARRIVAKIPTLAAICYRNEVGAPIIYPDIARSYVENILFMLRGYPYSRLKHTTQGEVEITPLEVEAFDKILTLHADHSQNASSTTVRNVASTGVHPYAAISAGISALWGHLHGGANEKVLLQLEEIGDVKNVDKYIARVKDKNDNFKLMGFGHRVYKSYDPRAKILKGLKDELHQKGVKMDERLSEIAAKVEEIALKDEYFIERNLYPNVDFYSGTILRALKIPVRFFTPVFVIGRTVGWCAQLLEHVKSPQARITRPRQVYVGD

SEQ ID NO: 3700 - protein, 127 aa, Brassica napus
MESVKNSDLKSSVNGGVVDVYGEDSATIEHSITPWSLSVSSGYSLLRDPRYNKGLAFSEKERDTHYLRGLLPPAVVDQNLQEKRLINNIRQYQYPLQKYMALTELQERNERLFYKLLIDHVEELLPI

SEQ ID NO: 3701 - protein, 425 aa, Helicobacter pylori 26695
MAYNPKILQKPKEGEEITIKDNKLHVPNHPIIPFIEGDGIGSDITPAMIKVVDSAVQKAYKGEKKIAWYEVFVGEKCYQKFKDYKELSPEEQWLLPDTIEAINHYKVSIKGPLTTPIGEGFRSLNVALRQKMDLYVCLRPVRWYGSPSPVKEPQKVDMVIFRENSEDIYAGIEWQEGSAEAKKLIHFLQNELKVKKIRFPESSGIGVKPISKEGTERLVRKAIEYAIDNDKPSVTFVHKGNIMKYTEGAFMKWGYALAQKEFNAQVIDKGPWCSLKNPKNGKEIIIKDMIADAFLQQILLRPSEYSVIATMNLNGDYISDALAAMVGGIGIAPGANLNDTVGMFEATHGTAPKYAGLDKVNPGSIILSAEMMLRHMGWVEAADLIVSAMEKAIKSKKVTYDFARLMDGAKEVKCSEFASVMIENM

SEQ ID NO: 3702 - protein, 135 aa, Brassica napus
MDARMFGLETPRVAALHHLLDVPDGDKAGGGATRTYVRDARAMAATPADVKELAGAYAFVVDMPGLSTGDIRVQVEDERVLVISGERRREEREDAKYLRMERRMGKFMRKFVLPDDADVAKAPPLGGDRVLTVTV

SEQ ID NO: 3703 - protein, 136 aa, Oryza sativa (japonica cultivar-group)
MRKMRDKGEGSSAARTEGRKLVVRAREGEAELDEVEHIDVGLERVEWGIGSGGEEPVEIREVWTDNLEVELALIRDVVDEFPFVAMDTEFPGIVCYPRRRSALCAAVDRKHEAWEICLTPVQVQSLPSGVLACQLI

SEQ ID NO: 3704 - protein, 116 aa, Gibberella fujikuroi
MAAPNDAEHEMTFDSADAGASLTYPMQCSALRKSGFVVIKNRPCKIVDMSTSKTVKHGHAKVHLVATDIFTGKKYEDLSPSTHNMDVPNVSRREYQLLDISGGGFLSLMTDDGDTK

SEQ ID NO: 3705 - protein, 414 aa, Pyrococcus furiosus
MEVVLEGKFLLDKRTIEGYIGIEDGKISKISLREIKGDHKIKVDKGKVILPGLIDVHVHLRDFEESYKESIESGTKAAVHGGITVVFDMPNTKPPIMDEKTLKLREHLFKRKSYADYALGFLLAGNKPVEADFYKIFMGASTGGIYSKNFEEDYIRALDIVSIHAEDYEIIQKYPERPPIAEIRAIERVIEAVKTHKKPAHICHISTAKGLKLLLDSRLEMLSFEVTPHHLFLTRSDYDKNPLLKVYPPLRSEEDRIALWKNIDKVPVIASDHAPHTLEDKEAGAAGLPGLETEVPLLLDAVNKGLITLQDIVEKMHINPIKIFGIENKGFEKGKDADFTIVDMKREWTIRADNLYTKAGWTPYEGWRVKGKVIMTIIRGEVVMEEDEIIGKPRGERIVKKGKHRRNLGSSEEH

SEQ ID NO: 3706 - protein, 389 aa, Sulfolobus tokodaii
MWIKGKAWFNNSIDTICIQIDRFIKNIKKDCKPDIEFKENQLILPASIDMHVHVRGAQLSYKETVATATSEAAYGGIGLIIDMPNTLPPVNTYERVIERIREFENYSRTDFGIYSGVTKEIEKIDTLPIAGYKIYPEDLDRTETKVLLEKSKKLKVLHPEIPLALKVPRKLRNIWMEIAALHYVQGNVHVTHITNYETVKIAKELGFSTDITPHHLLVNGERDCITKVNPPIRDYLTRLGLWKALFEVDTVVSDHAPHSKEEKNLNYDLCPPGIAAVSFTTPFIYSLVFKDLLNIERAVNLLSKNPAKILNIPYGEIRIGYVANFTIISKNDWKYRTKFSKVTETPLDNFPLEAKVEFTIVQGKIAFDGKNVLPIRGVNAFDKSSRYPV

SEQ ID NO: 3707 - protein, 468 aa, Mesorhizobium loti
MRLSNLGTEQLREKDRSFVFHPSTHLAKHSRGETPNRIMAGAEGVYIWDTEGRKSLDGFGGLYCVNMGYGCTEIAEAIARQAHEMPFAHIYASQGTEPVALLAEAVVEYFGQNMRRVFFGLSGSDANETNIKLVWYYNNILGRPEKKKIISRHRGYHGSGLVTGSLTGLAFFHNFFDLPLDLVRHTTTPHHYRQAHDGESEQAFSKRCADELEALIVAEGPETVAAFIGEPVLGTGGIVPPPKGYWTAIQSVLDKYDILLIADEVVCGFGRTGEKFGSHLYGMRPDFVTIAKGLSSAYLPISGSIIGDRVWSILEQGTEKHGALGHGWTYSGHTLCAAAALANIRLLKERNILEHVRDVGPYWHARMNAELAGHPIVGEVRGVGILSAVELMRDPKQRIPFESDLQVGVRAAAALFENGVIGRAMPHGDILGFAPPLIITRKEIDIIVNATAKSVETTYRALKAEGAI

SEQ ID NO: 3708 - protein, 447 aa, Haloarcula marismortui ATCC 43049
MTDIHIKDAQVVTASGVQHGEITMSDGTIDAAGPASAVPTPSNPDTVIDADGMVALPGATDVHTHMHDDELFPDGIDFASQTASAVAGGVTTVIELPTQTPVTTPEAIQRKAETCSTLAHIDFGLVAGNIQDPDIDVSGIMSAGVADFKTFTADPYLASDASIAALMRHVGDAGGTVRVHCETQGLLDDARSTIVSDDPEVYMGSRPLEAELDAISRAGYFAEYADCPLHVVHISSGSGAREAGRFKSRANVPVTLETCPQYLAFSKEDVADKGPFLKVNPSLKSDAERERLWDAVQDGTIDLIGTDHFPTYRETRDVGWDDIWEPYAGLPGVETMVEFLVSEGVHKGRLSWPRLCELVCAAPARSAGIYPRKGSLQQGTDADVVLIRDEEYEVTADDHTFVGGWTPYEGQHWSARVDTVIAGGEIVAKDHRVRSTAGRGQFLNRPL

SEQ ID NO: 3709 - protein, 477 aa, Mesorhizobium loti
MSEARSYELFINGKWRAGGSRVTLPVINPATEKVVASVASATVSDLDEALASAERSRKAWCSRPAKERGEILVAAARVLATQIEPAARDLSAEQGKTIAEATGEYARAVETLEWNGTHAEELSATIPLGPNRMIVPEPLGVVAAFTPWNYPAVLITRKLAPALAAGCPVILKGAEETPSVAVHIVESLRQAGVPDGVVNLVFGVPVHISRHLLSSPIVKVLTFTGSTAVGKQLAMLAANNLQRCILELGGHSPVIVCEDADLAKAIPAISEYKFECAGQSCNAPSRILVARTLYEEFLSRMTEAARKIRIGLPDDPATEMGPMANARRIEAMQRLTKDAVDRGAHIETGGTRLDGAGFYWPPTILTGVPKDARVLHEEPFGPILTVAPFDTLDEAIGEANDTEYGLAAYFFTDAADTQRKLTNSLSAGAVSVNYLKGVSADAPYGGVKQSGYGYEGGEQGVRSFQILKMVNGLGSFG

SEQ ID NO: 3710 - protein, 451 aa, Pyrococcus abyssi GE5
MWEEINMIKIYTLGGYEEVGKNMTAVEYNGEVVIVDMGIRLDRVLIHEDVEFQKMSSKDLRKLGAIPDDRPIRNKKVVAIALSHGHLDHIGAVGKLAPHYPDVPIYGTPYTIRLAKSEIKGEEYFEVTNPLYETNYGEIVQVSENLAIEFVQITHSIPQSSIVVIHTPEGAVVYACDYKFDNNHPYGERPDYKRLKELGKEGVKVLIAESTRVAEETKTPSEAVAKMLLEDFFLYEGMEADGLIATTFASHIARLQELIEIANKMGRQAIFIGRSLAKYTGIAKQLGLIKMKGSRVLRSPNAVSKVLKEVSQARENYLLIVTGHQGEPGAILTRMANGELYDIGPRDTVVFSAGVIPNPLNVAQRYALETKLRMKGVRMIKNLHVSGHASKEDHRYLIRMLNPEYIVPAHGEFRMLTHYAELAEEEGYMIGKEVFISRNGHVVEIPGSLEG

SEQ ID NO: 3711 - protein, 780 aa, Zea mays
MAASLSLHVTAGCGSKKKKRSMAAKGLREVGRRRAAEVGRRCLSGGSAGPPAPAAKRKEGGKAVNLFTAVNQALHIALDTDPRAYVFGEDVGFGGVFRCTTGLADRFGKSRVFNTPLCEQGIAGFAIGLAAMWLYRLAVEEVPEEDYMLPLSEAEVSHEAPVTGGFGAEIAASIAERCFQRLEAPVARVCGLDTPFPLVYEPFYMPTKNKGVSLVLGYADALAAPLPHAVTVRADASDEGSARSPFYAAARTSWVLDVTYPAVGCGRHATATEAFDRVRGAFLCPTSLWETGAPSLDTLAESAATYAVMMSSQQQQQQQTAGPSRQAVYGAPVLPEIPTRFVYRPQVATDVMSGSSSLWKTGAPPHDTLAESAAMYAATLSSHQQQQQMARPDRQAMYGAPVLPEIPTRFVYRPQTATDVMSSFSSLWETGAPPPAAYAAMLSSQQQQMPTTRPGWQAAPRGAPVPPPMNMRFVPNTMPAADAMDVGSSAPMAPSDSSSERTPSPLQRVEVRQVWAHNFDSEAKLIESLLPKFRYVAVDTEFPGTVYRPAGPAYKLEPAERYRLLRCNVDALHPVQLGLTLFDAGCVLPGGHGGATRYVWQFNFSDFDVRRHRHVVESVAALRSRGVDLDRTRQYGVAAAAVFGPRLRKWTRAGLGRAGVVTSHGGYDLAYLVKMMFGTGFRMSGSAAEFNAVVKSVLHRRRVFDIGEMARLCPHEHLHRGLDSIAGQLNAARFAADAARQAGYDSLRTCYTFMKLREIYFDDDGKLAGVDGILAEVTAF

SEQ ID NO: 3712 - protein, 347 aa, Pisum sativum
MDGREAMAFSGGPGSYYLHRGGVEAAGSGSGGFQVPPGFRALPNNGIIAQPNVRAQGGNGDTSSMFSLEPQSHADFNHDISVGASSGAPSSEPVKKKRGRPRKYGPDGSVSLKLTPMSAPANSTQDSGTPSEKRGRGRPRGSGRKQQLAALGDWMTSSAGLAFSPHVITIAAGEDIAAKLLLLSQQRPRALCILSGTGIASKVTLRQPASTNAGVTYEGKFQILSLSGSYLVSEDGGPTNRTGGISVSLSSRDGHVIGGSVAMLIAGSPIQLVVCSFVYGGGSKVKTKQGMITNGESSEPHNDNLGSPASAPPDQNYISSPTGMWPGSQPSDMKSAPAHTGIDLTRG

SEQ ID NO: 3713 - protein, 202 aa, Arabidopsis thaliana
MAELENPSVMSKLIAFLSSLLERVAESNDLTRRVATQSQRVSVFHGLSRPTITIQSYLERIFKYANCSPSCFVVAYVYLDRFTHRQPSLPINSFNVHRLLITSVMVAAKFLDDLYYNNAYYAKVGGISTKEMNFLELDFLFGLGFELNVTPNTFNAYFSYLQKEMTLLQPLSLVVVPSSRSLITFNDDEASHQKQQQQQLAV

SEQ ID NO: 3714 - protein, 294 aa, Arabidopsis thaliana
MALTNNLWAFVFGILGNIISFVVFLAPVPTFVRICKKKSTEGFQSLPYVSALFSAMLWIYYAMQKDGTAFLLITINAFGCVIETIYIVLFVSYANKKTRISTLKVLGLLNFLGFAAIVLVCZLLTKGSTREKVLGGICVGFSVSVFAAPLSIMRVVVRTRSVEFMPFSLSLFLTISAVTWLFYGLAIKDFYVALPNVLGAFLGAVQMILYIIFKYYKTPVAQKTDKSKDVSDHSIDIAKLTTVIPGAVLDSAVHQPPALHNVPETKIQLTEVKSQNMTDPKDQINKDVQKQSQV

SEQ ID NO: 3715 - protein, 489 aa, Bordetella bronchiseptica RB50
MRIEHLIDGKAVAGKQYFETINPATQETLAEVAAGGEAEVHAAVAAAKAAFPKWAGLPAAERARLVRKLGDLIAAHVPEISRTETNDCGQTIAQTGKQLVPRAADNFYYFAEMCTRVDGHTYPTPTHLNYTLYHPVGVCALISPWNVPFMTATWKVAPCLAFGNTAVLKMSELSPLTAARLGELALEAGIPPGVLNLVHGYGRDAGEPLVAHPDVRAVSFTGSTATGNRIVQAAGLKKFSMELGGKSPFVIFDDADLDRALDAAIFMIFSNNGQRCTAGSRILVQQSIYADFTQKFVERARRIRVGDPLDEGTIVGPLISPAHLAKVRGYIELGSKEGATMLCGGLDRPSYAPELDARVRDGNFVWPTVFADVDNRMKIAQDEIFGPVACLIPFRDEAHAIELANDIEYGLSSYVWTESVGRAHRVAAAIEAGMCFVNSQNVRDLRQPFGGTKASGTGREGGTWSYEVFCEPKNVAVSLGNHHIPHWGA

SEQ ID NO: 3716 - protein, 448 aa, Corynebacterium diphtheriae NCTC 13129
MSTQNYPATGRLAEPEYGTLLVKNVKIYGEGEPVNVLITDGVITDTHAGDVKADREVDGQGGVLLPGLVDIHVHLREPGREDTETIATGSAAAAKGGFTAVFTMANTMPVMDQPIIAESVWHKGQDIGLCDVHPVGSITKGLEGKEITEFGMMAHSQAKVRMFSDDGKCVDNPLIMRRAVEYARGTDVLLAQHCEDPRLTDGAVAHEGAMAAKLGLGGWPRVAEESIVARDAILARDYGGRMHICHASTQGTVELVKWAKEHEIPLTAEVTPHHLLLTDERLATYDGVNRVNPPLRENSDILALRDALLNGTIDCVATDHAPHGSEDKCCEFEHAKPGMLGLETSLAVVAAVFVETGLADWRFVAKVMSERPAEIVKLPGHGRPIAVGEPANLTIVDPGAKWTASGEKMASKATNTPYEGMEFNARVTTTILRGRLTCVDGEPTQARA

SEQ ID NO: 3717 - protein, 212 aa, Oryza sativa (japonica cultivar-group)
MHQGAARQAGQSGGGGGGGGGADRLSALPDAALFRIVSHLTARQAVRTSVLSKRWRHVWASVPRVDIRHPCACDERADQERFGDFVTTMLLNRRPFAPIKALRLWWSHDGDAETWIAHAVRRGAEEIDFSARHHQDDPKPELEYTSFISPKIKILKLTTFGMDIKAITHICSSPHNGKEGRGSNSSAKRKAQGEVARLAVKQRRARNSRSPE

SEQ ID NO: 3718 - protein, 165 aa, Glycine max
  misc_feature (50)..(50): Xaa can be any naturally occurring amino acid
ASSMISSPAVTTVNRAGAGMAAPFTGLKSMAGFPTWKTNNDLASVASNGXRLQCMLVWPPVGKMIFETLCYLPDLDDAQLAKEVESLLKKGWIPCMEFELEHSFEYREHSCVPGYYNGRYCTMCKLPMVGCTMLPTCMNDILEAKTVVPRGYIRLSGLGNVRQVQ

SEQ ID NO: 3719 - protein, 113 aa, Rickettsia moreli
ANEAVINMLKEIGSSEYIPKYIAKAKDKNDPFRLMGFGHRVYKNYDPRAVVLKETCKEVLKELGQLDNNPLLQIAIELEAIALKDEYFIERKLYPNVDFYSGIIYKAMGIPSQ

SEQ ID NO: 3720 - protein, 175 aa, Triticum aestivum
MAPTVMASSATSVAPFQGLKSTAGLPVSRRSNGASLGSVSNGGRIRCMQVWPIEGIKKFESLSYLPPLSTEALLKQVDYLIRSKWVPCLEFSKVGFIFREHNASPGYYDGRYWTMWKLPMFGCTDATQVINEVEEVKKEYPDAYVRIIGFDNMRQVQCVSFIAFKPPGCEESGKA

SEQ ID NO: 3721 - protein, 317 aa, Pseudomonas aeruginosa PAO1
MIEVIVGAIRLEAQDIHSFELFRADGAALPSFEPGAHIDLHLPNGLVRQYSLCGPAERPRHYRIAVLRCRDSRGGSATLHAELRVGQRLHIGEPRNLFPLSPEPGPHLLFAGGIGITPLLAMAERLARDGADFQLHYCAHSGERAAFVDYLGRCAFADRVHCHFDHGESSRRADLRALLATSPRDAQLYLCGPAGFMQWIEESARELGWEASRLHREHFAAAPRDASADGTFEVQLASNGALIRVAAGQTVLAALREAGVDLPASCEQGICGTCLTRVLDGEPEHRDLYLSEEEQAANDCFTPCCSRSRSPRLVLDL

SEQ ID NO: 3722 - protein, 276 aa, Streptomyces coelicolor A3(2)
MISIPAYTLNDGTSLPALGLGTWPMKDEEAERAVRAALETGYRLIDTATNYRNETGVGRGVASAGLPREEIVVTTKLPGRHHGYEETLASFEESRARLGLEYVDLYLIHWPLPRVDKYVDSWKAMVKLREDGLVRSVGVSNFTAEHIERLERETGVLPSVNQIELHPLLPQDELRAYHERKGIRTESWSPLGRGSDLLDDPAVAAVAAAHGVTPAQAVLRWHTQLGAVPIPKSADPARQRANLDVFGFELDAEQLRAVADRVHRRIGGDPEVHEEF

SEQ ID NO: 3723 - protein, 483 aa, Oryza sativa
MTTPHGLLQYSSGAFSDQVPADDSAEEHGVKDHAMLAPFTAAWQTAISPPLVIERSEGCYVYDVNGTKYLDALAGLLSTALGGSEPRLVKAATEQLNKLPFYHSFWNHTTRPSLDLAKELISMFTAREMGKVFFTNSGSEANDSQVKIVWYYNNALGRPKKKNIISRTQSYHGTTFISASLSGLPTLHQDFDLPGRFVLHTDCPHYWRFHLPGETEEEFATRLADNLENLILKQGPETIAAFIAEPVIGAGGVILPPKTYFEKIQAVVKKYDNLFIVDEVITGFERLGTMFGSDLYNIKPDLVSLAKALSSAYAPIGAILVSPEISDVIHSHSNKLGTFAHGFTYSGHPVSCAVALEALKIYRERDIPGHVTHVAQRFQEGIKAFAAGSPIVGETRGVGLLIATEFTDNKSPYELFPFEWGVGEIFGQECKKRGMMVKVLGNLIAMSPPLIITREEIDKLVSIYGEALKATEERVAELKSKKN

SEQ ID NO: 3724 - protein, 281 aa, Brassica napus
RPTRPDFDAPATGTPSVVVREVWADNLESEFELISGIVEDYPFISMDTEFPGVIYKADLRRLNPGYLYKLLKSNVDALSLIQVGLTLSDADGNLPDLGGGGGGSRFIWELNFRDFDVDRDPRARESLELLRRHGIDFERNRREGVESGRFAELMVSSGLICNESVSWVTFHSAYDFGYLVKILTRRELPGSLGEFLRLLRAFFGERVYDVKHMMRFCERRLFGGLDRVARSLEVNREVGKCHQAGSDSLLTWQAFRRMRDLYFVEDGPEKHAGVLYGLEVF

SEQ ID NO: 3725 - protein, 198 aa, Zea mays
  misc_feature (171)..(171): Xaa can be any naturally occurring amino acid
MATSFQGTTTKCTACDKTVYLVDKLTADNRVYHKACFRCHHCKGTLKLANYNSFEGVLYCRPHFDQLFKRTGSLDKSFQGTPKVVKPERNVGNENATKVSSAFAGTREKCVGCSKTVYPIERVTVNNTMYHKSCFKCCHGGCTISPSNYIAHEGKLYCKHHHVQLIKEKGXTSASSRMTTRRHRRLGRWRTTKKKSIN

SEQ ID NO: 3726 - protein, 246 aa, Corynebacterium efficiens YS-314
MVSAIRTGYRLIDTAYNYENEGAVGVAIRESGVPREELIVTSKLPGRFHEFELARPRIEESLYRLGLDHIDLLLIHWPNPNRDLYVQAWQALIDARDRGLVRHIGVSNFLPEHIDRLEAETGELPVVNQIELHPYFPQVEQVEWHNARGIVTEAWSPLSNGRGLVDEPLLTDIGRRYGVGGGEVALAWHHARGIVPIPRSTNPERQKSNLEAVHLTLSDEEVSAITALGRPDGRIKDQDPAVYEEF

SEQ ID NO: 3727 - protein, 285 aa, Triticum aestivum
  misc_feature (30)..(30): Xaa can be any naturally occurring amino acid
  misc_feature (55)..(55): Xaa can be any naturally occurring amino acid
  misc_feature (160)..(160): Xaa can be any naturally occurring amino acid
WIPRAAGIRHEVDPSGQVQWPQQLPCRHLXQQQPLPPPQTFPQHTTIPQQPQQTXFPQQPSFSQQQPPFPQPQQPPQHFPQQQPVLPQQPPFPQPQQPQLPFPQQPQQPFPQPQQPQQPFPQPQQQFPQPQQPQQSFPQQQQPLIQPSLQQQMNPCKNFXLQQCNPVSLVSSLVSLILPRSDCQVMQQQCCQQLAQIPQHLQCAAIHSVAHSIIMQQQHQGIQILRPLFQIVQGQSIIQQQPAQLEVIRSLVLKTLPTMCNVYVRPDCSNIRTPFASTVAGIGGQ

SEQ ID NO: 3728 - protein, 352 aa, Streptomyces tubercidicus
MTDTASELDPSTGWAGPTAEAPPEAALMQLLMGGFVTQSIGVAARFGVADALAGGPRHVDDIAAEVGAHAPSLYRLLRALGDFGVFAELADRHFALTPAGELLRTDSTPSLRGLAAHFGSGFHRAAWSGLYDSVRTGAAAFERVHGAPQFDYYRSHPEEAAVFDAAMTSVASAIYATLESYDFGRFSTVVDVGGGNGAYLSGILASNPALRGVLFDLPDVVERSAPVLAKAGVADRCEVAGGSFFDEVPRGADAYVLTAVIHDWDDEASVRILRNCRAAMPAHATLLLGEPVLPDGPEPSVGKLLDLETLIGTTGRQRTEAEFRELLDRAGLRLTRVIHSAGPDSLVEAVPR

SEQ ID NO: 3729 - protein, 492 aa, Arabidopsis thaliana
MPEFSSSVKLKYVKLGYQYLVNHFLSFLLIPIMAIVAVELLRMGPEEILNVWNSLQFDLVQVLCSSFFVIFISTVYFMSKPRTIYLVDYSCYKPPVTCRVPFATFMEHSRLILKDKPKSVEFQMRILERSGLGEETCLPPAIHYIPPTPTMDAARSEAQMVIFEAMDDLFKKTGLKPKDVDILIVNCSLFSPTPSLSAMVINKYKLRSNIKSFNLSGMGCSAGLISVDLARDLLQVHPNSNAIIVSTEIITPNYYQGNERAMLLPNCLFRMGAAAIHMSNRRSDRWRAKYKLSHLVRTHRGADDKSFYCVYEQEDKEGHVGINLSKDLMAIAGEALKANITTIGPLVLPASEQLLFLTSLIGRKIFNPKWKPYIPDFKLAFEHFCIHAGGRAVIDELQKNLQLSGEHVEASRMTLHRFGNTSSSSLWYELSYIESKGRMRRGDRVWQIAFGSGFKCNSAVWKCNRTIKTPKDGPWSDCIDRYPVFIPEVVKL

SEQ ID NO: 3730 - protein, 440 aa, Zea mays
MSTTKVKRRVGKYELGRTIGEGTFAKVRFARDTVTGEAVAIKILDKEKVLKHKMVEQIKREISTMKLIKHPNVVRIYEVMGSKTKIYIVLEFATGGELFDTIVNHGRMREDEARRYFQQLINAVDYCHSRGVYHRDLKPENLLLDSYGNLKVSDFGLSALSQQIKDDGLLHTTCGTPNYVAPEVLEDQGYDGAMADLWSCGVILFVLLAGYLPFEDSNLMTLYKKISNAEFTFPPWTSFPAKRLLTRILDPNPMTRITIPEILEDEWFKKGYKRPEFDEQYDTTLDDVDAVFNDSEEHHVTEKKEEEPVALNAFELISMSAGLNLGNLFDSEQEFKRETRFTSKCPPKEIVRKIEEAAKPLGFDVQKKNYKLRLEKVKAGRKGNLNVATEILQVAPSLHMVEVRKAKGDTLEFHKFYKNLSKTLKDVVWKSDDLQTQHAS

SEQ ID NO: 3731 - protein, 87 aa, Zea mays
AGSVWMSSEMKALNEDCVRFEIFPPGHLYSSAAGGFRRWYTPHWFQEQVPRTPYQPLVLREAFEKVTIKMAVTDTDLWPWAMGPCAA

SEQ ID NO: 3732 - protein, 185 aa, Guillardia theta
MSEKSNLAPFIKKLYQLVNDPMTNDYICWEKNETCFIVNKPTELSVYILPRYFKHNNFSSFVRQLNQYGFHKLEPNEWVFGHPYFKGGDKLKLSSIKRKKQWSSQKNVSVDFYNNEIFKKLIYELDTLKKYKQVLTKDILDVCRRQERFLIKQQSIETKIKKIEEELNNLKYLVFGYFGKILKSN

SEQ ID NO: 3733 - protein, 250 aa, Brassica napus
MNSVSTFSELLGSENESPVGGDYCPMLAASCPKKPAGRKKFRETRHPIYRGVRLRKSGKWVCEVREPNKKSRIWLGTFKTAEIAARAHDVAALALRGRGACLNFADSAWRLRIPETTCAKDIQKAAAEAALAFEAEKSDTTTNDHGMNMASQAEVNDTTDHGLDMEETMVEAVFTEEQRDGFYMAEETTVEGVVPEEQMSKGFYMDEEWMFGMPTLLADMAAGMLLPPPSVQWGHNDDFEGDVDMNLWNY

SEQ ID NO: 3734 - protein, 1367 aa, Magnaporthe grisea 70-15
MSTETSPRAVRFSQGEDERLMRPFVLGADSGNSHSSGELSSPDLHHMVETPDEMGSLTRYVDVTSHGGSHVSLATNGSARSHRNSGGESTAAGYTNGGATPRPAQRPMGPARTPSNTYQPPRKPTAQQTPSYLHTSTSDLRNGSRMRNGYGQQEKEYVRSLRAQHYGGDYFVSYSNGSQLGASSGDGYPDSDSEGETPSSEAPYDDAYDQNVIMIDSNEDTAPSEEELKDPASRERLEWHGMLEAVLTGDVVRQEKKRLIAGTGEDLGKLQRGAELWMGIRARVCGRHLSVQRRMVEETRATLARMIDEVIDFSVKGESTAGKSAAEQIAEVLEKIDKIEGQYPTRNALLAVHTSANTERFQEACDAVYTWTNINYLINTELTILRNWVGNHELDFTRAREKSPNGHHGLSDESSFMDRLMKEEGLKSLHDHEEDEGDRKSRRNGMLHRVGKTIEKAKEALVEQHQVFKKRQMSLDMDELLMLLGFPARLIEEIIKVRLAYTKRMKESAQQNPMMQDNMIAQFQTLLKLAIRIKQEAAKLSEPQPGWELPPCIDESFDQVVLDALKYYFKMLNWKLGGNKNTFKEAELLFQEWGFANEIASHLYRGDIEVAEQFSSLTYKTLNRLAITFEKELQRRPKETPSEMSKRYKQVLESVRVRQRMLQRFSRMLNDNYENASDFSINFRPDKMQEFFLRLQETGHFQVYTGSLEHEGLLVIASPSLANRESEIQSLIGTTAYDEIVQDATNPYILIMRPEGQLGWWGPKIQLSVREEPVELKMGHLRLIAGGSQTRLSNAKQNFLATIEMHLDLLIEQRSNLPKVNARLMEIRKVQYKLSNTFMDSVEIIRNNTKGLGLQDLIQTCFIFATEFGQRSLLYLDSNRRQMNNIKLTKLALDWVGFVCDDCQSSDRKAFKWAVLALEFAMVMTRGRHILALGEAEFVKLRLKVAGCMSLLISHFDIMGARSTVAAQAEKLKLEAMVGQMRRMDHNMMDDQEAIRYVRNHRLSGLNLIDEARKEIALERSALGRVLEVSNEVDRSLAYLSSTATNFTMRWQQGHFVGGGTFGNVYAAMNLDTGHLMAVKEIRLQDPKLIPSITGAIKDEMRVLESVDHPNVVSYYGIEVHRDRVYIFMEFCSGGSLASLLEHGRIEDESVIMVYALQLLEGLAYLHEIKIAHRDIKPENILLDHNGIIKYVDFGAAKVIARQGRTLANQDLMSAATKPNKSMTGTPMYMSPEVIKGENPGHFGAVDVWSLGCVILEMATGRRPWANLDNEWAIMYNIAQGNPPQLPTPDQLSPEGIDFLKCCFARDSTKRATALELLHHKWIMTIRDRIVPQQPPTPSDTSSSSAQNTPNPASSSKGGGASSDGYY

SEQ ID NO: 3735 - protein, 1029 aa, Aspergillus nidulans FGSC A4
MTGSECQPRHSASSGTGRDIHTLSWDGDHDPANPFNWSISRKWAVTYLAALISFLTMMNGTIITVAHFEIAELFNIDETAFPHTYWPVTTWAVGGAFSALFLLPLAEDFGTRPVFLVTYFAFVCFLIPQAVAQNFATLVATRFFAGACVAILANTAAGVIGNVWDTEWSRSIPVSLYIFGYMAGSSMGPVIGAAVLQSLSWRWIGYMQLIWFGALFPIYYFFFYESRGDIILAQRDRKMGKNGKDILPGHPAHSKLNLQNLAVSSTRPVILFCTEPVLFVSTLWSAFTVGTIFLFTQSVEQVFIGTYDWTISKTGYVQAAVVIGEGIGFFFSFLSRELYFASASRNTEVPNSLIPEARLYMAVLGGLFGISGGMFTYAWTSYPFIPWIAPAISLAMVGAGSVLVVTGVSDYVVDAYSQYAGSAIGAVATGENIFSAFLPLATMSMYNNLGFQWASTLLAFVSLVLALVPTLMFVWGRELDNYALPTIATYAYSPANHYCTTQQAFQCHCSNFPSLHSCPTTTRHRPTNHLLKMPSLANTLKDPTLFIESSYIDGKWVTSSSSRTFNVYDPATEEFIGTCPESNIDDINSAIRAAATAFPKWRALSGRQRGRILRRWFDLIVENKEDIGKIITAENGKAKGDAEGEALFSAGFFEWFSEEAARIYGDVVPHSNPSSRVQVLKEPVGVCGLITPWNFPMAMGARKVAAALAAGCTVVLKSDGLTPYSSNVLALLAERAGVPGGVFNVVTALENTPALGLALCESDNVKKISFTGSTRVGKLLMKQSSHTLKKLSLELGGNAPFIVFDDADLETAVTSAVACKFKVTGQTCVCANRFYVQEGIYEAFSKRFVEEVKKCQVGHGLDPGVTHGPLTNGIAKTQEHIQDALNKGATVLLGGSRLPSLGKNFHELTILGDVDDSMKVASEETFGPLAALSKFKAEDEVVRRANGVEVGLASYLITSDLGKAHRVSEKLEFGMVAINTGVISDSAAPFGGVKHSGMGREGSKYGIDDYLNIKTIVTGGIHTAYSAHL

SEQ ID NO: 3736 - protein, 331 aa, Arabidopsis thaliana
MFTCINCTKMADRGEEDEEDEARGSTTPNTKEAVKSLTTQIKDMASKFSGSHKQSKPTPGSSSSNLRKFPDFDTASESVPYPYPGGSTSSTPAWDLPRSSYHQSGRPDSRFTSMYGGERESISAQSCDVVLEDDEPKEWMAQVEPGVHITFVSLPSGGNDLKRIRFSREVFDKWQAQRWWGENYDRIVELYNVQRFNRQALQTPGRSEDQSQRDSTYTRIDSARESRDWTQRDNNFRSPGGSVPHHFYGPPMDAARITTSSRDEPPSMSNASEMQGEWVEEDEPGVYITIRQLPDGTRELRRVRFSRERFGEVHAKTWWDQNRDRIQTQYL

SEQ ID NO: 3737 - protein, 320 aa, Bordetella bronchiseptica RB50
MAYDPGIQAYVERARRALGDMAGLKALSLAQRRVRADRYAALVREPYPESLEVSDTYIVQPGHEIPVRVYRPRAEGPLPTIVYLHGGSFVAGSPQGHDFITTSLACNTGAQVLSVHYRRAPENPYPAPTDDAYAALCWAQREAELLGVDPERIAVAGDSAGGNLAAACALMARDRGGPALRMQALIYPTLDADLDTPSYLNNTADAFLTREAMAFAVNAFLPQGLDTRDGYALPLRAADHAGLPPAYLLLADHDPLLDDGTRYAARLREAGNAVQLRIGAGMIHGFLRARRLSATADAEFHLLCAALRQALGLPEPAARW

SEQ ID NO: 3738 - protein, 549 aa, Triticum aestivum
QKGKINSNVLREAKAVPNQTSKQPLPSLLLLCSSSLQSTYFAPTDPMDRADPARGRLAVLSSHLLAAGAEPAAALERSPASAAAPGTRAGVLAVVDSRTGKRYEVKVSEDGTVRATDFKKITAGKDDKGLKTYDPGYLNTAPVRSSICYIDGDEGILRYRGYPIEEVAESSSFVEVAYLLMYGNLPSQSQLAAWEFAISQHSAVPQGLLDIIQSMPHDAHPMGVLASAMSTLSVFHPDANPALRGQDLYKSKQVRDKQIVRVLGKAPAIAAAAYLRLAGRPAVLPSNNLSYSENFLYMLDSLGDKEYKPNPRLARVLDILFILHAEHEMNCSTAAVRHLASSGVDVFTALSGAVGALYGPLHGGANEAVLKMLNEIGAVENIPDFIEGVKNRKRKMSGFGHRVYKNYDPRAKVIRKLAEEVFSIVGRDPLIEVAVALEKAALSDEYFIKRKLYPNVDFYSGLIYRAMGFPTEFFPVLFAIPRMAGWLAHWKESLDDPDNKIMRPQQVYTGVWLRHYTPVRERVASNQGEELGQIATSNATRRRRAGSSL

SEQ ID NO: 3739 - protein, 432 aa, Burkholderia cepacia R1808
MPVAVAGDGIEIIDSTGKRYIDACGGAAVSCLGHSNQRVIDAIKRQVQQLPYAHTSFFTTDVAEELADRLVEAAPAGLEHVYFVSGGSEAIEAALKLARQYFVEKGEPQRRHFIARRQSYHGNTLGALAIGGNAWRREPFLPLLIEAHHVSPCYAYRDQAAGETDEAYAQRLADELEQKIVALGAENVAAFVAETVVGATAGAVPPVRTYLKKIRAVCDKYGVLLILDEIMSGMGRTGYLFACDEDDVAPDLLTIAKGLGAGYQPIGATLVSDRIYRTIVDGSGFFQHGHTYLGHATACAAALEVQRVIADEKLLDSVKARGEQLRASLREHYAAHPHVGDVRGRGLFVGVELVRDRDSKAPFDPKLKLHAAVKREAMQRGLMVYPMGGTIDGVHGDHILVAPPFICTAQQIDTIVERLSGAIGAALASAGA

SEQ ID NO: 3740 - protein, 261 aa, Maackia amurensis
MASSKERETFVYVAKLAEQAERYEEMVDSMKNVATLDVELTVEERNLLSVGYKNVIGARRASWRILSSIEQKEEAKGNEVNAKRIKEYRQKVESELTNICNDVMRVIDEHLIPSASAGESTVFYYKMKGDYYRYLAEFKTGNEKKEAGDQSMKAYESATAAAEAELPPTHPIRLGLALNFSVFYYEILNSPERACHLAKQAFDEAISELDTLNEESYKDSTLIMQLLRDNLTLWTSDIPEDGEDAQKANGTAKLGGGEDAE

SEQ ID NO: 3741 - protein, 475 aa, Thermus thermophilus HB27
MEVKEAPTEALIGGAWRRLERRFPVVSPATGERVAEVADCGEEEAREALEEAVLAFPAWSRATAYERAQVLRRWYERILEHQEPLARLMALEMGKPLKEGRAEVAYAAGFVEWYAEEAKRVYGETVPSQFPHKRILVRYEPVGPVYGITPWNFPAAMVTRKVAPALAAGCTFVLKPAEESPLTALYLAKLFLEAGGPPGVFQVLPTSRPAEVSRPFLEDERVRKLTFTGSTEVGVRLYGEAAKTLKRVSLELGGGAPVLVFADADLDRAVEETLRAKFRNAGESCVAANRIFVQAEVAEAFAEAYARRVQALKVGDPLSEETDVGPLVNEAALRKVRTHVEDALAKGARLVAGGEAKGLFFAPTVLLDVKPESLLFREETFGPVAPLTVFREEEEAVRWANGFPVGLAAYVFTRDLSRAFRVAEALEYGIVGVNDGVPSTPQAPFGGVKRSGLGREGGKWGLLEYLEVKYVSLGL

SEQ ID NO: 3742 - protein, 250 aa, Zea mays
MAKNYPTVSAEYSEAVEKARRKLRALIAEKSCAPLMLRLAWHSAGTFDVSSRTGGPFGTMKCPAELAHGANAGLDIAVRLLEPIKEEFPTLSYADFYQLAGVVAVEVTGGPEIPFHPGREDKPQPPPEGRLPDATKGSDHLRQVFGKQMGLSDQDIVALSGGHTLGRCHKERSGFEGAWTTNPLVFDNSYFKELLSGDKEGLLQLPSDKALLSDPVFRPLVEKYAADEKAFFDDYKEAHLKLSELGYADA

SEQ ID NO: 3743 - protein, 155 aa, Arabidopsis thaliana
MSCSATDLAVLLGPNATAAANYICGQLGDVNNKFIDTAFAIDNTYLLFSAYLVFSMQLGFAMLCAGSVRAKNTMNIMLTNVLDAAAGGLFYYLFGYAFAFGSPSNGFIGKHYFGLKDIPTASADTPTFSTNGPLQSLRLESQVARSLNGHSSWLT

SEQ ID NO: 3744 - protein, 439 aa, Arabidopsis thaliana
MDRISHLADEILSKILSFLGTKDVMQTMLLSKRFKSQWLLVPKLEFDDSTHLPETWGYQEPDYGNFRRFVDRSLLSREGRVLQTLFLKLGRQCSYDDIAIWVGIAVKRGLMELKLKYTDSYYPKRSSLPRSLYTCETLVVLKLKKGYLDVPDLVCLRSLKTLSLRDMNYSNASCLLRLLASCPVLEELFIQQGYYDSCALSFKIILPCLKKLSYLPKRKKKYSGIDRSEVSGGISGLVLDAPSLKYLHIVDRSGLFSVSEIININAVVKATLEVNASRPEKLLYSLVSVEHIRLCLSATEVVYPVGLGSSFHKLKRLEVCTCKSEWLDLFIHLLEDSPSLQDIKINQCHPVTNPRPQWNQPGSVPRCLSSSLETLEWVEYGGTHEEKELSTYLFKTAVCFKKASFTAKWSGGDANKKLQMLQELALSPRVSPTCELVFN

SEQ ID NO: 3745 - protein, 506 aa, Pseudomonas aeruginosa PAO1
MRYAHPGSEGAIVSFKARYGNYIGGEFVPPVKGQYFTNTSPVNGQPIAEFPRSTAEDIDKALDAAHAAADAWGRTSVQERSNILLKIADRIEQNLELLAVTETWDNGKAVRETLNADIPLAADHFRYFAGCIRAQEGSAAEINDSTVAYHIHEPLGVVGQIIPWNFPLLMAAWKLAPALAAGNCVVLKPAEQTPLGICVLLELIGDLLPPGVLNVVQGFGREAGEALATSKRIAKIAFTGSTPVGSHILKCAAENIIPSTVELGGKSPNIYFEDIMQAEPAFIEKAAEGLVLAFFNQGEVCTCPSRALVQESIYPAFMEEVLKKVRAIKRGDPLDTETMVGAQASQQQYEKILSYLDIAQQEGAELLAGGSVEKLEGNLASGYYIQPTLLKGHNGMRVFQEEIFGPVVGVTTFKDEAEALAIANDTEYGLGAGLWTRDINRAYRMGRGIKAGRVWTNCYHLYPAHAAFGGYKKSGVGRETHKMMLDHYQQTKNLLVSYDINPLGFF

SEQ ID NO: 3746 - protein, 253 aa, Anabaena variabilis ATCC 29413
MTSEPILSPETAIAALSDEDNQIRYYAAWWLGKHNVQAGCTALCAALFDERYRIPLGGYPLRRQAARALGMLKNPQAVPALIAALKCDEDLRLREAVICSLAAIGDKRAVIPLLNLLQSTQAQPYEALIEALATLQVWSARPQIEPFLKHYSERVQCAAARYLYLLTQESEYIERIVKNLNHDNMYLRWAAVFDLGAVAHQQAVQAILAAQVPNSLKLLNLKRILEAMLNNNSVNQEKASVLFGAIDDLLIQL

SEQ ID NO: 3747 - protein, 422 aa, Arabidopsis thaliana
MDKLSQLPEALLVRILSLLSAKDVVSTMVLSKRWQFLWMLVPKLIYDDSYQAIEYGSFSRFVDRSFTLHDAQVLDTLHFKLGKTSCGTGDIRVWIKTAEKSCLRELIIEIDKSNSDNSSVVLPRSLYTCCRMLVTLKLNNAVLVDATSSFSFPSLKTLSLVSMKFPGDELIKMLLSNCPVLEDLVVKRCPYDNVTTFTVRVSSLKCLVLHETELASINADCGFVIDTPSLECLDIEDGRGGFCVIENNMTKVVKANVCNSYVHTQQLMGSISSVKRLYVCIPSSKDAYPVGSVFHCLVRLTICTCETEWLNLLMCVLRDSPKLRELKLVKNHVYRSHQPRPCWNEPSAVPECLLTSLETLEWVKYEGTEEEKEVAAFILRSGSCLKKVTISSKSTDINKKFEMLKELSLLFRRSPTCQIAFD

SEQ ID NO: 3748 - protein, 482 aa, Geobacillus stearothermophilus
MIYVNGKWSKGEGKKRPVINPANEEIIIEINEASQQQAVEAIQAARHAFQYTDWPFNPAKRIAALRQLADLLEQNAETFASIETLNTGKPIRESRLDVSDSIQCLRYYADFVEQRAIEEIKRTDGTTSKIIEEPIGVCALIVPWNFPLLLGIWKLAPALAAGNTVVFKPSELTPLSFIELTKLIDSIGLPPGVFNLVPGGGSPVGETLVTHPDVEKISFTGGTKTGRWIYEQGARRLKRVSLELGGKSPLLIFDDADLASTIEWALFASFFNQGEVCVAASRILVQRRVYDSFLDQLTQRLASLRIGDPFAEHTEMGPLISSSHLEKVETYIQIGLQEGGVLLQGGKRMKELGYYLTPAVFAHVRQDMRIVQEEIFGPVITVQPFEHDEEAIKLANDTIYGLAAGLFSRDLERAEQIAGKLRAGTIWINSYHTPYVDAPWGGLKQSGIGRELGPQGFAAFTETKHVNISQHGKPLGWYSSHS

SEQ ID NO: 3749 - protein, 343 aa, Vibrio vulnificus YJ016
MKIKALSKLKPEEGIWMTEVDKPVLGHNDLLIKIKKTAICGTDVHIYNWDEWSQKTIPVPMVVGHEYVGEVVGIGQEVRGFEIGDRVSGEGHITCGHCRNCRGGRTHLCRNTIGVGVNRTGCFSEYLVIPAFNAFKIPANISDDLASIFDPFGNAVHTALSFDLVGEDVLITGAGPIGIMAAAVAKHVGARHVVITDVNEYRLDLARKMGVTRAVNVAEQKLDDVMVELGMTEGFDVGLEMSGNPSAFNSMLKTMNHGGRIALLGIPPSDMGIDWNQVIFKGLVIKGIYGREMFETWYKMASLIQSGLDLTPIITHHFKVDDFQQGFDIMRSGMSGKVILDWE

SEQ ID NO: 3750 - protein, 431 aa, Mycobacterium leprae TN
MADTDDTVTLKYPGGEIDLQIVRATEGNDGIAIVPVLAKTGYTTFDVGYGNTASTKSSITYIDGDAGILRYRGYPIEQLAEKSTFIEVCYLLIYGELPATDQLAEFTHRIQRHTMLHEDLKRFYDGFPRNAHPMPVLSSVVNALSAYYQDALDPMDNGQVELSTIRLLAKLPTIAAYAYKKSVGQPFLYPDNAFSLVENFLRMTFGLPAEPYEPDPEVVRALDMLFILHADHEQNCSTSTVRLVGSSRANLFTSISGGINALWGPLHGGANQAVLEMLEGIRESGDDVGGFVQKVKNCQAGVKLMGFGHRVYKNYDPRARIVKEQADKILVKLGGDDDLLNIAKGLEEAALTDDYFIERKLYPNVDFYTGLIYRALGFPTRMFTVLFALGRLPGWIAHWREMHDEGDSKIGRPRQIYTGYTERDYTAIETR

SEQ ID NO: 3751 - protein, 264 aa, Triticum aestivum
  misc_feature (170)..(170): Xaa can be any naturally occurring amino acid
  misc_feature (187)..(187): Xaa can be any naturally occurring amino acid
  misc_feature (189)..(190): Xaa can be any naturally occurring amino acid
  misc_feature (223)..(223): Xaa can be any naturally occurring amino acid
  misc_feature (240)..(240): Xaa can be any naturally occurring amino acid
MSASPSMSGGAGERTRTVVWFRRDLRVEDNPALAAAARTAGEVVPAYVWAPEEDGPYYPGRVSRWWLSQSLKHLDASLRRLGATRLVTRRSTDTVAALLELVRSTGATHLFFNHLYDPLSLVRDHRVKQVLGAEGITVQSFNSDLLYEPWEVPRRHGWPFTMFTPFWNTXLCMVDPPAPHAAPKRIXSXXMSRCCSSDELIFEDESERGSNALLAPALSRGGXNATKVLRALFKGPFIDXPGPGRRAEGKKPKGLPPYLHLGEA

SEQ ID NO: 3752 - protein, 510 aa, Nicotiana tabacum
MALLDLQPSTSLLFCLVPLLFLFFIKFNKTITNTLLSSNSSKIPRSYPLIGSYFSILANHDQRIKWISDIILSTPNLTFTLIRPLNFHTIFTANPSNVQHMLKTNFQVYQKGHNSNTTLKDFLSNGIFNVDGDIWKYQRQVASHEFNTRSLRKFVETVVDTELSERLIPILATAAANKTVLDFQDILQRFAFDNICKIAFGYDPGYLLPSLPEAEFAVAFEDAVRLSTERFILPFPLIWKMKRALNIGSEKKLRFAVEQVREFAKEIVREKQRELKDKSSLDSADLLSRFLSTGHSDENFVTDIVISFILAGRDTTSAALTWFFWLISKHPEVESQILKEIGEKSESLLLYDEVKNMIYTHASLCESMRFYPPVPMDTKEATKDDILPDGTFVKKGNRVTYHPYAMGRVEKVWGKDWAEFRPERWLDKDEVTGNWTFVSKDAYTYPVFQAGPRVCLGKEMAFLQMKRVVAGVLRRFKVVPVVEQGAEPVFISYLTAKMKEVFPVTIEERI

SEQ ID NO: 3753 - protein, 512 aa, Vicia sativa
MELETLVAWLLFSATLLWLLLLATKTQSKSLKSPSSTTNSTIPKSYPIFGSIFSIAANFHRRVQWISDILQTTPSSTFILHRAFGSRQVFTANPLVVQHILKTNFPCYPKGLTLNRSLGDFLGNGIFNADGETWKLQRQISSHEFNAKSLRKFVETVVDVELSGRLLPILSEASKTEKILPDFQDILQRFTFDNICIIAFGFDPEYLLPSLPETAFAKAFDYGTRISSLRFNAAVPLIWKVKKILNIGTEQRLKEAVAEVRGLASRIVREKKQELLEKSALESLDILSRFLSSGHSDESFVIDIVISFILAGRDTTSAALTWFFWLLSKHSHVETEILKEVTAKSESVSYDEVKDMVYTHAALCESMRLYPPVPVDTKEVAYDDVLPDGTFVKKGWRVAYHIYAMGRSEKIWGSDWAEFRPERWLRRDEDGMWSFVGMDPYAYPVFQAGPRVCLGKEMAFLQMKRVAAGVLREFRVVPAMENGIEPEYTAHLTALMKGGFPVRIEKRSHTDE

SEQ ID NO: 3754 - protein, 78 aa, Zea mays
MVTELAWTHRHQSSRGEGEREMKEGTANCIDILIAIILPPLGVFLKFGCKVEFWLCLLLTFLAYLPGIIYAIYVITKD

SEQ ID NO: 3755 - protein, 91 aa, Brassica napus
MGSTPAEVPCDVVSDNRSGLGGGISDVYGEDLATLDQLVTPWVSSVASGYSLMRDPRYNKGLAFTDKERDAHYLTGLLPPVVLSQEVQERK

SEQ ID NO: 3756 - protein, 141 aa, Zea mays
  misc_feature (120)..(120): Xaa can be any naturally occurring amino acid
  misc_feature (131)..(131): Xaa can be any naturally occurring amino acid
MASSMLSSAAVVTSPAQATMVAPFTGLKSSSAFPVTRKANNDITSIVSNGGRVSCMKVWPPVGKKKFETLSYLPDLTEVELGKEVDYLLRNKWIPCVEFELEHGFVYREHGTTPGYYDGXRYGTMWKLPLXFGGTDSASRV

SEQ ID NO: 3757 - protein, 159 aa, Zea mays
PVACAETGVTLISPFVGRILDWYKKSTGKEYTAETDPGVKSVQRIFNYYKQHGYNTIVMGASFRNTGEITELAGCDYLTIAPKLLEELKNSDAKVPKKLDAAPADQAKEEKVSFVDNEAAFRWELFNDPMAFDKLHEGIRGFAKDGDACKEMLREKLRA

SEQ ID NO: 3758 - protein, 122 aa, Calycanthus floridus var. glaucus
MIQPQTHLNVADNSGARELMCIRIIGASNRRYAHIGDVIVAVIKEAVPNMPLERSEVIRAVIVRTCKELKRDNGMIIRYDDNAAVVIDQEGNPKGTRVFGAIARELRKLNFTKIVSLAPEVL

SEQ ID NO: 3759 - protein, 484 aa, Xanthomonas campestris pv. campestris str. ATCC 33913
MLRGLTCRCRVCMSYAIVWFRRDLRLEDNPALRAALDAGHDPIPLYIDAPHEEGQWAPGAASRAWRHRSLAALDASLRARGSALLIRQGDSAQVLDAVIAQTEAVAVYWNRKYEPATQPRDAQIKRSLRERGLEVQSCNAALLFEPWTLATQQGRPYKVFTPFWRNALTQLRLPDAMPAPRSLPPLPASLDGVHVDALNLLPTPAWDQGFWEHWQPGEAGAHEMLEIFVDGALSGYRENRDRPDRVGTSQLSPHLHFGEIAPWRIASTLEAQRSARNGADIDGYIRQLGWRDFAYHLLHHFPDTTTQNLNPRFAGFDWATVDPVTLDAWQRGRTGIPIVDAGLRQLWHTGWMHNRVRMIVASLLCKHLRVHWLEGARWFWDTLVDADLANNTMGWQWVAGTGADAAPYFRVFNPVTQAEKFDPQATYITRWIPELAALPVKERFAPWLHPLSLARLAPTYPRAPIIGLAEGRDAALAAYAGTRG

SEQ ID NO: 3760 - protein, 498 aa, Burkholderia cepacia R18194
MLSLVSHLDHLNVRPGRLFIDGQWLDWPDARFDQLNPCTNEVMTSFADAGAQGVELAVAAARKAFDEGPWPRMRAQDRKRLLQPIVERLYAAEEEIARLQTLDNGIPYAFSRHSRVSAKSAADVFDHFLGWIDKINGDTLPIFSGASNMQYMTFRDPVGVVAAVLPYNGPVLTFAMKVAPALACGCTVIVKSSELTNLAVARLAQIIADSDLPPGVFNFVTGGVETGSALTSHAGVDKVTFTGSPAVGEKIMIASAPTMKRLSLELGGKSAALVFPDTRSVQTTAHALMGLCSTFLSGQVCSTPSRAVVHRSIMDEFLHHAQEQLQKVRFGDPFDAATTSAPMISRRHQARVLDYVESGRQQGATLLAGGRAPGGEFRNGNWVEPALFANVSNDMTIAQEEIFGPVLSVIPFDTEEEAIRIANDSAYGLAGCVYTTDVSRAFRVARAVKSGAIGVNGFASIPNAPFGGIKRSGTGREGGWSTIEAFTELKTVNFNLDA

SEQ ID NO: 3761 - protein, 316 aa, Methylobacillus flagellatus KT
MANLFDQLKEFTTIVADTGDVEAIKSVKPYDATTNPSLLLKASTIPQYAPLIDEAIAYAKSQSGDKAQQIEDAADKLAVLIGLEILKHIPGKISTEVDARLSFDTEAMVQKGRKLIKLYEDAGIAKDRVLIKLASTWEGIKAGEILEKEGINCNLTLLFSFAQARACAEAGVFLISPFVGRILDWYKAKTGETYTAETDPGVQSVRKIYAYYKEHGYKTVVMGASFRNTGEIIALAGCDRLTVSPNLLEELKATEGKLERVLVDNGVTKQRPPLLTEKEFRFDLNEDAMATEKLAEGIRGFVVDQNKLEKALAEKL

SEQ ID NO: 3762 - protein, 383 aa, Pyrobaculum aerophilum str. IM2
MLKECIKIEGRAFLGGKVTRVKLGSGECKTLQLSNKYLILPGMVDIHVHFRDWGLSHKETLRGGAAAALAGGVVAVGDMPNTKPHIRTADLYKKRLEEGSALPIIYKVHMGIPQDLEELRAARPPTIKIYPEDVEAFGWGHIEKAAEACASLGCRLVLHCEDPAYFKEGERPPIAELACVERTRQMAFKTGVKIHLTHITLSQTAEAARGWATVDATPHHLLLDVENCKDSGLCHVNPRLRTPEMRKRLLAAFASGLVDIYATDHAPHTLEEKRSGAPPPGICSLDVALSLLLTLWKRGVVTLSDVVRLYSHRPARFFDLQIDVKKGYFTVVRLEEFTVRGEEFAGTCKHTPFEGFKAFGRVFATSVGGRIYFKDGDVYMINI

SEQ ID NO: 3763 - protein, 344 aa, Bacillus sp. KSM-K16
MKAVFVDDAEKINIKEIDIPVVKDNDVLIKVAVAGICGSDIHTYKGLHPFRKPPVVIGHEVAGEVVSVGQAVKRVQVGDRVTVEPQIGTGESEGVMTGQANLSDKRLAPGMGDWLGTMAEYFVSPEAQVIKLPDAVSYEKGVLVEPLAVGVHAARKGGIQPGDRVAILGAGPIGLLTLMAVKAKGASHVVVTDVLDYSLDVAKQMGATAAINIKGKPDWIEEAKSKVGRSFDKVLITAGVPGIINDSLNLLKKGGRAVTVAMFHGQQDFDVEQLQQNEKEIVGCMTYNRPDTEEALDIIAKGALPVEKVISHQLSYEQADKGFEMVDKKQDNSVKVIVSFEQEG

SEQ ID NO: 3764 - protein, 296 aa, Pseudomonas putida
MAGKSPLINLNNGVKMPALGLGVFAASAEETASAIASAISSGYRLIDTARSYNNEAQVGEGIRNSGVDRAEMFVTTKLFNCDYGYERALRAFDESLGRLGLDYVDLYLLHWPTKDWNATIQSWKAAEKILGDGRARAIGVCNFLEDQLDELIAASDVVPAVNQIELHPYFAQKPLLAKNRALGIVTEAWSPIGGAINDGDGDNHGGRKHPLTDPVITTIAEAHGRSAAQVILRWHFQNDVVAIPKSVNPERIAKNIDVFDFALSDAEMAQLDELDTGVRIGPDPRDVDTSSFAEFV

SEQ ID NO: 3765 - protein, 447 aa, Magnaporthe grisea 70-15
MSAVRDKQQPDAAPAAAAAGNKPAPSITPEQVAVVKSTAPVLKEHGVTITTVFYKNMIDAHPELHNVFSTTSQATGAQPRALASAVLAYATHIDDLARLSHAVSRIAHKHVSLHITPDQYDIVGKYLIEAIGQVLGDAATPEIVAAWIAAYGVLADVFIGVEGKMYQEHSDWLGFRKFRVLRKEAEAESITSFYLAPSDGKTPLPRFLPGQYVSVQLFVPELGYLQSRQYSLSEGYRKGGEHYRISVKREEGVEVGAPGIISNMLHDKISVGDEVEVSHPQGEFFVDPADATKAGAPLVLLSAGVGATPLLSILESVTVADGGVPAPAATRPVSWIHASRSRAQRPFETRVAEIQKTVGEERLRSRLFLGKIDAEKDVANQHFHFGGGRMDLDKLDADRDLHTSDARAEYYLCGPEAWMLDTREKLEQMGVAHERIHLELFATGDVQ

SEQ ID NO: 3766 - protein, 431 aa, Xanthomonas axonopodis pv. citri str. 306
MSTTLQSAEQLQQDWSNNPRWAGIARNYSAADVARLRGTVHVEHSLARLGAEKLWNSLHATPFVNALGALTGNQAMQQIKAGLKAIYLSGWQVAADANLAGQMYPDQSLYPADSVPAVVKRINNTLLRADQLHHAEGNDAIDFLQPIVADAEAGFGGVLNAFELMKAMIEAGAAGVHFEDQLASVKKCGHMGGKVLVPTREAIEKLNAARLAADVLGVPTVLIARTDAEAADLITSDVDANDQPFTTGERTVEGFFKTRNGLDQAISRGLAYAPYADLIWCETGKPDLEFARAFAQAIHARFPGKLLAYNCSPSFNWKKNLDDATIAKFQTELASYGYKFQFITLAGFHALNHSMFHLAHGYARRQMSAFVELQQAEFEAAEMGFTAVKHQREVGTGYFDAVTQAIQQGQSSTTALRGSTEEEQFQSDKAA

SEQ ID NO: 3767 - protein, 127 aa, Oryza sativa (japonica cultivar-group)
MDATTTAKRKRPAASDIADDAPTTVDEVSDAEVEEFYAILRRMRDATRRLGARPPPPRAPAWRPSFSWEDFADAPPKQAPPPPQQPADHERVAENATPPRRPAPGLDLNVEPPSDAPATPRSARAPA

SEQ ID NO: 3768 - protein, 235 aa, Glycine max
MSLFAAFSICKVAKDAAGVAGNVFAFGLFVSPIPTFRRIIRNGSTEMFSGLPYIYSLLNCLICMWYGTPLISADNLLVTTVNSIGAVFQFVYTIIFLMYAEKAKKVRMVGLLLAVLGMFAIVLVGSLQIDDVIMRRFFVGFLSCASLISMFASPLFIIKLVIQTKSVEFMPFYLSLSTFLMSTSFLLYGLFNDDAFIYVPNGIGTILGMIQLILYFYFESKSRVSSREPLIVSYA

SEQ ID NO: 3769 - protein, 371 aa, Bacillus cereus G9241
MTVIRGLEGVVATTSSVSSIIDDTLTYVGYNIDDLAENATFEEVVYLLWHRKLPNEQELAEFNEIVSEYYKVPGEILAYLKQVDLKIAHPMSVLRTAISMLSLYDESAEIMDEKSNYLKAVKLQAQVGTLVAAYARIRKGLDVVEPRNDLSLAANFLYMLNDREPNEVEIEAFDKALVLHADHELNASTFTARVCVATLSDVYSGITAAIGALKGPLHGGANENVMKMLTEIGEEENVESYIHNALQNKVKIMGFGHRVYEQGDPRAKHLREMSKRLCVLLGEEKWYNMSIKIEDIVTKEKGLPPNVDFYSASVYHCLGIDHDLFTPIFAISRMSGWLAHILEQYENNRLIRPRADYNGPTHQVYVPIAQR

SEQ ID NO: 3770 - protein, 267 aa, Glycine max
GSSSSRIGLSGSSGSSGSRAFRGDYETCLVYTEEMKERCVEQFKQGTVCMEQLAAVEGLCELVRKAVGAAESVRRYHVNLSIFTSVPDAWGIDQVFPIIPIHRLEEKPSVRGILSDLTCDSDGKIDKFINGESSLALHEMEGGSYYLGMFLGGAYEEALGGVHNLFGGPRVIRVSQSDGPHSFAVTRAVPGPSCGDVLRVMQHQPELMFETLKHRAQEYVSHDNAAAVLAAGLARTFDRMPYLLPLSSFVADDVACAAAVPAGEDDE

SEQ ID NO: 3771 - protein, 213 aa, Oryza sativa
MAEGAELVGESAHQDMPRVVAALAGILERVAGRNDAAATPAELAAAPASPFRATAKPGISVRAYAARIARFAGCSPACYVVAYIYLDRLLRRGRRCLALALAVDSYSVHRLLITAVLSAVKFMDDICYNNAYFAKVGGISLAEMNYLEVDFLFGVGFDLNVTPETFADYCAVLQSEMLCAAAPPTRLHYCCLSEDDAGSSSSSSLREAAMEAS

SEQ ID NO: 3772 - protein, 116 aa, Glycine max
  misc_feature (10)..(10): Xaa can be any naturally occurring amino acid
  misc_feature (70)..(70): Xaa can be any naturally occurring amino acid
MAGEDYTFKXAMIVDARARNISHNVTCTESGSQSIEDSQAYIAILLRKLILDEIQSGKTDKDIYNKLADXFTETVLYTPNFDMQTTPIWLLPLLIASSAARVWAYNMHKQKTNVHI

SEQ ID NO: 3773 - protein, 511 aa, Nicotiana tabacum
MMIDLELSTSLLFCLIPFLFLLFIKTTLANLFSSNKSTSKIPKSYPIIGSCFSILANKERRIQWTSDIMQNTSNLTFTLNRPFGFRQIFTANPANVQHMLKTQFHIYQKGDVFKTTMADFLGDGIFNVDGDIWKYQRQVSSHEFNTKSLRKFVETVVDTELNERLIPILATAAVEKTVLDFQDILQRFAFDNICKIAFGYDPAYLLPSLPQAKFAVAFEEAVKLSSERFNAIFPFVWKIKRNFNIGSEKKIRVAVNEVRQFAKELVKEKQKELKEKSSLDSVDLLSRFLSSGHSDEDFVTDIVISFILAGRDTTSAALTWFFWLIFEHPETENQILKEAKAKSESPVYDEVKDMIYTHASLCESMRFYPPIPIDTKAATEDNILPDGTFVKKGTRVSYHIYAMGRVENLWGKDWAEFRPERWLDKDEASGNWTFVARDTYTYPVFQAGPRICLGKEMAFLQMKRVVAGVLRRFKVVPLAEKGVEPVFLSYLTAKMKGGFPVTIEERNGTDI

SEQ ID NO: 3774 - protein, 121 aa, Leuconostoc mesenteroides subsp. mesenteroides ATCC 8293
MAFDKDAIIASLKDATILDLADLVSAIEEEFNVSAAAPVAAAGAADGAAAAKSEFDVELTSAGTAKVKVIKAVREATGLGLKEAKDLVDNAPSVVKEGLSEDDANALKESLEATGASVTVK

SEQ ID NO: 3775 - protein, 180 aa, Zea mays
MADAPASPGGGGGSHESGSPRGGGGGGGGSVREQDRFLPIANISRIMKKAIPANGKIAKDAKETVQECVSEFISFITSEASDKCQREKRKTINGDDLLWAMATLGFEDYIEPLKVYLQKYREMEGDSKLTAKSSDGSIKKDALGHVGASSSAAQGMGQQGAYNQGMGYMQPQYHNGDIKK

SEQ ID NO: 3776 - protein, 511 aa, Nicotiana tabacum
MALLDLQLSTSLLFCLVPLLFLFFVKFKKTITNTLLSSNNSSKIPRSYPLIGSYFSILANHDRRIKWISDIILTTPNLTFTLIRPLNFRTIFTANPSNVQHVLKTNFQVYQKGHGSYSTLKDFLSNGIFNVDGDIWKYQRQVASHEFNTRSLRKFVETVVDTELSERLIPILATAAANKTVLDFQDILQRFAFDNICKIAFGYDPGYLLPSLPEAEFAVAFEDAVRLSTERFIVPFSLIWKIKRALNIGSEKKLRVAVEQVREFAKEIVREKQKELNDKSSLDSADLLSRFLSTGHSDEDFVTDIVISFILAGRDTTSAALTWFFWLISKHPEVESQIMKEVGEKSESLLLYDEVKNMMYTHASLCESMRFYPPVPMDSKEATKDDILPDGTFVKKGTRVTYHPYAMGRVEKVWGEDWAEFKPERWLDKDEVTGNWTFVPKDAYTYPVFQAGPRICLGKEMAFLQMKRVVAGVLRRFKVVPVVEQGVEPVFISYLTAKMKGGFPVTIEERI

SEQ ID NO: 3777 - protein, 498 aa, Anabaena variabilis ATCC 29413
MAINTGKNKLMNRHIQPWQRLLVLAIGSMVFAVFAPTIVQAANTPTLESLSETTIKLQISIDTTWVLLSGFLVFFMQTGFAMLEAGLVRQRSVVNTLLENFIDAAVTVLAWWAVGFGIAFGTSAGGLFGIDTFFLNQLPGADGSYPLGAPGSTAAINTYTLFFFQFAFAATASTITTGSMAGRTDFIGDLIYSAIMGAISYPIIVHWAWNSNGWLGKLSYHDFAGGSIVHTVGGWTALVGAYLLGPRPDRPPWGKLPPAHNLALATLGTMILWFGWYGFNPGSTLGTANPGLIGLVTINTTLAAGAGALTALIFLYVRTGKWDLVYCLNGSLAGLVAITAPCAYVAPWASVLIGFTGGISVVLGVSLIESLHIDDPVGAFSVHGISGMMGTLSIGFLGQAELTLNQKAGLFLGGGFDLLGIQMLGIVAITVFTVAFAFLMYGGLKAVGYLRVNAEADSIGIDAYEHGASVWPDIYPVEEVSKLQDQTKISENKTLEEQ

SEQ ID NO: 3778 - protein, 180 aa, Glycine max
MQHRNLTSGRPSGTDGSDYSYRMVVDSRYQLVAKGKKRLSLYFITEAVLLLIGVTLTYLPGIEADAPNTVAYSSVIVSVVSLIIGNIGRRRSRSGLLRFYAAVSSIAMLLLIASLAQQHLLLKAIQDSKLWKTGKYDVNELSHFQIGLLLYMVTLSVLKLCTVNAVVSLLFNMAPPKKTS

SEQ ID NO: 3779 - protein, 320 aa, Glycine max
  misc_feature (38)..(38): Xaa can be any naturally occurring amino acid
  misc_feature (268)..(268): Xaa can be any naturally occurring amino acid
YVSSEFGSCLLPDLQPENLLLDSNAVLKVTDFGLSTYXQQEDELLRTACGTPNYVAPEVLNDRGYVGSTSDIWSCGVILFVLMAGYLPFDEPNHAALYQKIGRAQFTCPSWFSPEAKKLLKRILDPNPLTRIKVPELLEDEWFKKGYKPTTFVEEEDVNVDDVAAAFNDSKENLVTERKEKPVSMNAFELISRSQSFNLENLFEKQQGSVKRETHFTSQRPANEIMSKIEEAAKPLGFNVHKRNYKMKLQGDKSGRKGHLSVAKEVFXMAPPLQMVEIQKTGGDTLEFHKFYKNFSSSSGFPKVVWHSKKKENKIIKSAK

SEQ ID NO: 3780 - protein, 364 aa, Arabidopsis thaliana
MVIMQVLASKTKINMVMELVTGGELFDRIVSNGKLTETDGRKMFQQLIDGISYCHSKGVFHRDLKLENVLLDAKGHIKITDFGLSALPQHFRDDGLLHTTCGSPNYVAPEVLANRGYDGAASDIWSCGVILYVILTGCLPFDDRNLAVLYQKICKGDPPIPRWLSPGARTMIKRMLDPNPVTRITVVGIKASEWFKLEYIPSIPDDDDEEEVDTDDDAFSIQELGSEEGKGSDSPTIINAFQLIGMSSFLDLSGFFEQENVSERRIRFTSNSSAKDLLEKIETAVTEMGFSVQKKHAKLRVKQEERNQKGQVGLSVTAEVFEIKPSLNVVELRKSYGDSCLYRQLYERLLKDVGTSSPEQEIVT

SEQ ID NO: 3781 - protein, 247 aa, Chlamydomonas reinhardtii
MGEQLRQQGTVKWFNATKGFGFITPGGGGEDLFVHQTNINSEGFRSLREGEVVEFEVEAGPDGRSKAVNVTGPGGAAPEGAPRNFRGGGRGRGRARGARGGYAAAYGYPQMAPVYPGYYFFPADPTGRGRGRGGRGGAMPAMQGVMPGVAYPGMPMGGVGMEPTGEPSGLQVVVHNLPWSCQWQQLKDHFKEWRVERADVVYDAWGRSRGFGTVRFTTKEDAATACDKLNNSQIDGRTISVRLDRFA

SEQ ID NO: 3782 - protein, 132 aa, Triticum aestivum
MDLIDHKDFGESPPWASQVLELVELILRPPEGGPPCLRDHSEEVLSVLNLLRLILIIDSRGSRSAKMLRDEKIRAVYSEWLLPLRSVVTGNQSELEKDGGDDDENQMACLLNPVQLVLHRCIELVEEKMKGL

SEQ ID NO: 3783 - protein, 136 aa, Mycobacterium leprae TN
MPTGKVKWYDADKGFGFLSQEDGEDVYVRSSALPAGVEGLKAGQRVEFGVASGRRGPQALSLKLIDPPPSFARQVRREALAEHRHSPDELHGMVEDMITLLESTVQPELRKGRYPDRKTARRVSEVVKAVAREFDA

SEQ ID NO: 3784 - protein, 336 aa, Staphylococcus aureus subsp. aureus Mu50
MRAAVVTKDHKVSIEDKKLRALKPGEALVQTEYCGVCHTDLHVKNADFGDVTGVTLGHEGIGKVIEVAEDVESLKIGDRVSIAWMFESCGRCEYCTTGRETLCRSVKNAGYTVDGAMAEQVIVTADYAVKVPEKLDPAAASSITCAGVTTYKAVKVSNVKPGQWLGVFGIGGLGNLALQYAKNVMGAKIVAFDINDDKLAFAKELGADAIINSKDVDPVAEVMKLTDNKGLDATVVTSVAKTPFNQAVDVVKAGARVVAVGLPVDKMNLDIPRLVLDGIEVVGSLVGTRQDLREAFEFAAENKVTPKVQLRKLEEINDIFEEMEKGTITGRMVIKF

SEQ ID NO: 3785 - protein, 229 aa, Pyrococcus horikoshii OT3
MNVEEMKKIAAKEALKFIEDDMVIGLGTGSTTAYFIKLLGEKLKRGEISDIVGVPTSYQAKLLAIEHDIPIASLDQVDAIDVAVDGADEVDPNLNLIKGRGAALTMEKIIEYRAGTFIVLVDERKLVDYLCQKMPVPIEVIPQAWKAIIEELSIFNAKAELRMGVNKDGPVITDNGNFIIDAKFPRIDDPLDMEIELNTIPGVIENGIFADIADIVIVGTREGVKKLER

SEQ ID NO: 3786 - protein, 227 aa, Cicer arietinum
PVYKPPVEKPPVYKPPIEKPPVYKPPVEKPPVYKPPVEKPPVYKPPIEKPPVYKPPVEKPPIYKPPVEKPPVYKPPVEKPPVYKPPVEKPPVYKPPVEKPPVYKPPVEKPPVYKPPVEKPPVYKPPVEKPPVYKPPVEKPPIYKPPVEKPPVYKPPIEKPPVYTPPVEKPPVYKPPIEEPPVYKPPVEKPPVYGPPYEKPPHYPGYPPYEKPPHHPGYPPADDDNRF

SEQ ID NO: 3787 - protein, 279 aa, Haloarcula marismortui ATCC 43049
MTQQQSPTDGGPRASGMPMLGLGTWQNEDAEQCAESVRTALEAGYRHIDTAQAYDNESAVGDGIAAADVDRDDIFLATKVWISNLSHDDVIETTEESLDKLGVDSVDLLYVHWAAGEYEPEETLPAFDELVDRGLIDNVGVSNFEPHHVETAMDVLDAPVFANQVETHPFLQQSELREHAAEQDYELVAYSPLARGEVFGHDVIEAIADDHDASEAQVSLAWLREKGVTAIPKATSEAHITDNLASLDLSLTDADIDRIDNIDTVDRRVDPDFGPAAWD

SEQ ID NO: 3788 - protein, 282 aa, Streptococcus pyogenes MGAS8232
MAMIQWFPGHMSKARRQVQENLKHVDFVTILVDARLPLSSQNPMLTKIVGDKPKLMILNKADLADATRTKEWKAYYESQGIKTLAINSKEQSTVKKVTEAAKELMADKIKRLRDRGIQKETLRTMIIGIPNAGKSTLMNRLAGKKIAVVGNKPGVTKGQQWLKSNKELEILDTPGILWPKFEDELVGLKLALTGAIKDQLLPMDEVTIFGLNYFKTHYPSRLTKRFKNIPLEEEAPEIIMTLTRQLGFKDDYDRFYSLFVKEVRDGKLGQYTLDQVGDMDAD

SEQ ID NO: 3789 - protein, 306 aa, Sporothrix schenckii
MDGKRQLNSFQQLEKLGEGTYATVFKGRNRHTGEFVALKEIHLDSEEGTPSTAIREISLMKELKHENIVALHDVIHTESKLMLVFEYMDGDLKKYMDTNGERGALKPMLIKSFMYQLLKGIDFCHQNRVLHRDLKPQNLLINGKGQLKLGDFGLARAFGIPVNTFSNEVVTLWYRAPDVLLGSRTYNTSIDIWSVGCIMAEMYTGRPLFPGTTNEDQMLRIFRIMGTPAEHNWPGISQFPEYKATAPRYATQDLRQILPQIDATGIDLLQRLLQLRPELRISAHDALQHPWFHDILQYQHCQQAAG

SEQ ID NO: 3790 - protein, 213 aa, Brassica napus
LAHFALFFNQGQCCCAGSRTYVHEKVYDEFVEKAKARALKRVVGDPFKKGIEQGPHIDSKQFEKVMKYIRSGVESNATLECGGGQVGDKGYFIQPTVFSNVKDDMLIAQDEIFGPVQSILKFSDVDEVIKRANDTRYGLAAGVFTKSLDTANRVSRALKAGTVWVNCFDVFDAAIPFGGYKMSGNGKKKGIYSLNNYLQVKAVVTPLNNPAWI

SEQ ID NO: 3791 - protein, 283 aa, Escherichia coli CFT073
MQKVKLNNGIEMPLLGFGVFQMTDAAECERAVIDAINSGYRLIDTAASYQNEIQVGNALKQSGIARNELFVTTKLWLQDTSYEGAKAQFERSLNRLQLDYVDLYLIHQPYGDVHGAWRAMEELQQAGKIRAIGVSNFHPDRLADLIAFNNVVPAVNQVEVNPFNQQLQAVPWMQSRGIQPEAWAPFAEGKNGLFQHPVLTAIGEKYGKSVGQVVLRWIYQRGIVSLAKSVRKERMEENINILDFELSPEDMLQITALDTATSAFFSHRDPAMVEWLTGRKLDV

SEQ ID NO: 3792 - protein, 155 aa, Saccharomyces cerevisiae
GASIVSLLGIKVLNNPAKFTDPYEFEITFECLESLKHDLEWKLTYVGSSRSLDHDQELDSILVGPVPVGVNKFVFSADPPSAELIPASELVSVTVILLSCSYDGREFVRVGYYVNNEYDEEELRENPPAKVQVDHIVRNILAEKPRVTRFNIVWD

SEQ ID NO: 3793 - protein, 282 aa, Mycobacterium avium subsp. paratuberculosis str. k10
MSKVPTIELNDGARIPQLGFGVYQIKPDETAAAVRAALDIGYRHIDTAEMYGNEREVAQGIRDAGLDRSEVFVTSKLNNGFHEPDAARRAFDATLNALGSDYVDLFLIHWPLPTLYGGDFVSTWRVLEEFARDGRARSIGVSNFQVAHLERLAAETDTVPAVNQVEVHPYFTNEKVRGYAREHGLAIEAWSPIAQGGVLGDAVINRIADGLGRTAAQVVLRWHIQRGDIVFPKTVNPDRMKSNFELFDFELDERAMEAISALDRGESGRRGPNPDTFDYIPR

SEQ ID NO: 3794 - protein, 294 aa, Escherichia coli CFT073
MEGLTVEFSVLSNNLKMPMMGFGVFQVTDKDVCKQSVLNAIRTGYRLIDTAAVYGNEDAVGEAVREAISEGLCTREELFITSKLWVQDMLNQDIAAAGIEASLKKSGLECFDLYLLHQAMRDYFSAWRALEDAYEEGKLKAIGVSNFYPHVLANFCETVRVKPMVNQVELHPYFAQPEALATMKYYNVQPEAWAPLGGGRHKPFENNLLQSIADAHQKSISQVILRWNIQRGVVVIPKSTHQQRIEENFAIWDFSLTEKEMAQISSLDLGYVGESVKHFNPEFVRGCLAVKIHD

SEQ ID NO: 3795 - protein, 390 aa, Zea mays
  misc_feature (140)..(140): Xaa can be any naturally occurring amino acid
  misc_feature (174)..(174): Xaa can be any naturally occurring amino acid
  misc_feature (186)..(186): Xaa can be any naturally occurring amino acid
SSLQCSLHVPDEDMLSPLGALRLDGHFSFHDVSAMARDFGNQCSFLPAAVLHPGSVSDIAATVRHVFSLGEGSPLTVAARGHGHSLMGQSQAAQGIVVRMESLRGARLQVHDGFVDAPGGELWINVLRETLKHAWHPSRXTDYLHLTVGGTLSNAGVSGQAFRHGPQVSNVNQXEIVTGLKRTLKXQPEVTELLSRLRIINRTGVLNNWRASFKPQDPVEASHFQSDGRVLYCLELTKNFNSDDTDTMEQVNLEFLDRVHTSELKLRAQGLWEVPHPWLNLLIPRSSIRRFAKEVFGKILVGFLSSAPSLSGYGSIAHSMNLNKQIVEFCEEAGIGMKQYLAPYTTQQQWKAHFGARWETFERRKHRYDPLAILAPGQRIFPKASLPLPL

SEQ ID NO: 3796 - protein, 247 aa, Zea mays
ACLQISTMFTHHQKIVVVDHEMPNQGSQQRRIVSFIGGIDLCDGRYDTQYHSLFRTLDTVHHDDFHQPNFEGGSIKKGGPREPWHDIHSRLEGPIAWDVLYNFEQRWRKQGGKDLLVRLRDLPDIIIPPSPVMFPEDRETWNVQLFRSIDGGAAFGFPETPEEAARAGLVSGKDQIIDRSIQDAYVNAIRRAKNFIYIENQYFLGSSYGWKPEGIKPEEIGALHLIPKELSLKNVSKIESWERFTVY

SEQ ID NO: 3797 - protein, 246 aa, Ralstonia metallidurans CH34
MSTEADAWIQHELMVAPMAATHGAPRSALVVGGGDGGSAFELLRIPTMREVVVAELDGEVVRLAREWLRGIHQGALDEPGDPRLSLAIGEGLGLMEAFARAGRQFDLIVYDLTEADDGSPAAALFSPHGLHTARRCLAPGGAMSLHLGPPLHRPETARRLLARLRHVFRHVAPLTTFVPAYGALWGIALASDALDIAAQPADKIATRLQQWQLEHKLRAYHAYLHPALFVHPRHVQAIFDSGSRPA

SEQ ID NO: 3798 - protein, 411 aa, Anaplasma platys
MKENAVLMCGDKKVSLPMLSGTDGIQLIDITTLYRDHKVLTYDPGFMSTAACSSEITFIDGEKGILRHRGLDIADLIGIKGGFCSVAHLLLYGVLPSDTVFEQFLAAIGAQHALSSDVLGVISSFRRDAHPMAILMACFSTLAAKYHGDNRGNEELAVLAIAQVPSLVAAIYRHRMGLELVSPDPSLSYTGNFVKMMFGALEKTRADAIEEALDAIFIMHADHEQNASTATVRMAGSAGTELFACLAAGTATLWGPAHGGANEAVIRMLESIGSPDKVEEFIGFVKDNNSKVRLMGFGHRVYKSYDPRAKILGQISRSVLDNLGCSDELLGVAEELERCALQDEYFVERKLYPNVDFYSGIVLRAMGVPVEMYTTFFALARTAGWVSQWCELLRGSESLKICRPRQLYAGK

SEQ ID NO: 3799 - protein, 1166 aa, Ustilago maydis
MPPLPYRRSSSLLPVTHSGTSTVARATTSLATRTPIHLTLEDLKRRTIKFISEEDNTTRIVNVSDCRDAYDVMARVLKKFGKPPSGNSYTPTADQGPTGDELGATETWGIFATSADGQNTKALSDNELLAICHAPQPHDPLRERGLTLRRIPNHLPGEDARKVPVRSGRNKLEAFFGERMPVAQMQPAGPGSGVNADEEDAGSVTISGKKMKRASTVSIMSGLGVGPFSSSSHNTGAGHTHGSTRAEGKLLSKKESKHMSPPPVTSKPSKIRNFFGQRPPSELINTNLADFFPSTDSKALQRTARRSIYGRASASTRSKRNSTWSFVADPDAPPLPNKGSMDGHPTPLERSSISIRERGTTPVIQIGYDSRSEDDHQSNARRTSSGTHSHLHSSLTGPPTLPPVVSRDSLDEWSRDLKAVGSPVTEENAMFQSSRHGHASGSQQHHAAMKHYPSHASGYADRPSISRRASGESARSRRSLASQVRHGLSAARERNADTASLLTVDEITQEVENRRESISLAGAGGGWVVDEDGVPIPIPGSSSPFSSSAAASTRPSSGISSSYVHNGHLEHDDSEGHSDEEANQSSDLEEATRTRKARGVPSKAASIRTVASKRASSVLQAPGDESDRHLGDPMAVARSTTSRASSVSELRRSVHDHGDPSDGESGSDFTDSDLDSDGSETDEDEQANDVYLPSAKPAPIKWHKGALIGAGSFGNVFLGMNAKTGLLMAVKQVELPSGDSHLDQRKKGMLEALEREIKLLKSLEHENIVQYLDSFADDSHLNIFLEYVPGGSIVALLRNYGAFEEPLVRNFVRQILNGLSFLHNRGIMHRDIKGANILVDNKGGIKISDFGISKKVESDLVLATNKSGAGGGGAGGAAHRPSLQGSVFWMAPEVVKQTSYTIKADIWSLGCLVVEMISGTHPWAELNQMQALFQIGMGRKPSLPDEISNECRDFLEKTFELDYNNRPSADELLNHAFMGTEMTFPPSSGADGSGGGDDDAGGSGDAGDGDASTMGMTNDAETGTTRETRETKDGKRPTRSKSTRRLEREKRHKEAAAAAAAATALDTGTPNTPTSHTAAAAAAAAAAAASASASASASPAVASTSPAPGDAETGSPTNGKSAVPPAGSTGGTPESILTVSIATARGNSTSTALSAADAAFSEEADS

SEQ ID NO: 3800 - protein, 402 aa, Bacillus cereus G9241
MHKVHQGKLETVSKVKVENAKDLSLAYSPGVAEPCKEIYDDKSKVYEYTMKGNMVAVVTDGTAVLGLGNIGPEASLPVMEGKAVLFKSFAGVDAFPIALNTNDVDKIVETVKLMEPTFGGVNLEDIAAPNCFIIEERLKKETNIPIFHDDQHGTAIVTVAGLVNALKLVGKKMSDIKVVANGAGAAGIAIIKLLYRYGVRDIIMCDRKGAIYDGRPTGMNPVKDEVAKYTNKNRIEGSLADVVQGADVFIGVSAEGALTEEMVRTMNDDAIIFAMANPVPEIMPELAKAAGAAVVGTGRSDFANQVNNVLAFPGIFRGALDVHATQINEEMKMAAVQAIAELVAEDELNADYIIPAPFDARVAPQVAAYVAKAAMETGVARRQVDPNEVAEKTKQLALIGKE

SEQ ID NO: 3801 - protein, 250 aa, Zea mays
MYFRPPPKGPEWYAGDAETGQAARPLYPMMLEDPRLRWAFIRKVYSILSIQMLLTVAVAAVVVYVRPVALFFVSTAAGFGLYIFLIILPFIVLCPLYYYYQRHPVNLLLLGLFTVAISFAVGLTCAFTKGEVIPDSAVLTAVVVLSLTAYTFWAAKRGHDFNFLGPFLFAAVMILMLFALIQLFFPLGRISLMIYGGLAALVFCGYIIYDTDNLIKRYSYDEYVWAAGALYLDRINLFLSLVTLFRAADS

SEQ ID NO: 3802 - protein, 460 aa, Ralstonia metallidurans CH34
MSDMQEHKVTPYDQFNYEVPENVFPREGISANAAAAIVISDEWTDTNPMLNMSSFVTTFAEPEAREVAARNIFKNYIDHDMYPRLFAMEGRMVRWLHELWNGPKGVEPYGTCTVGSSEACMLGGLAHKWNWRQRRQAEGKDATRPNMVTGGNVQIVWKKFLRYFDVEPRIVPLKPGNYCLTAEDLDKYVDENTICVVAIAGQTFTGEDDDIQGIHDWLDAYEKRTGISIPMHIDGASGGFVNPFLYPDYKWDFRLPRVQSINASGHKYGLTPPGLGWVVFRERKIFNEELVFYVNYLGGEMPTATLNFSRNAFQVAVQYYQFLRLGFDGYKRVMQHTLDNAIFLRQQLVDSGYFDIMNTTQRIPVVAVTLNKKYKNFNEFDVSNKVREKGWVLSAYTMPPNAESVTSLRVVVRPHVNHNVAQLLANDIINACKFLEANGGNAKPPALHKHAEAQSTSLKC

SEQ ID NO: 3803 - protein, 303 aa, Brassica napus
STDAPGGRFRLVSNLGGGRVMATAAKVAGIGVAKSGFRGGFGVPAAANDQFIVRNASASKPVSASISSAVHPSVEEDAVVMRKPVWEDEWEFAEVETKTIPRVVFDKPPSLQEAKEATDDLKDALNMAYMEGSNEVGSVSRMFSSFQPSENRAVESAVPQVALKAFAFLSENTAAQSVVASIASDPKVWDAVMENKDLMKFLETNTASTTVEADNDDKSELSSETESEEESEAKPINLMEILRDMKLKAVQMMENVSSYFGGGFRTKTFTKGGQERKRMLLNDPTTLFGLAVCVIFMVVLKRA

SEQ ID NO: 3804 - protein, 320 aa, Zea mays
  misc_feature (20)..(20): Xaa can be any naturally occurring amino acid
  misc_feature (29)..(29): Xaa can be any naturally occurring amino acid
  misc_feature (49)..(49): Xaa can be any naturally occurring amino acid
MEAEAAAKRTRESGEDAAAXGISAVIPGXWFSEISPMWPGEAHSLKVEXKVLFQGKSDYQNVMVFQSSTYGKVLVLDGVIQVTERDECAYQEMITHLPLCSIKDPKKVLVIGGGDGGVLREVSRHSSVEQIDICEIDKMVVDVSKQFFPHLAVGFEDPRVSLHIGDGVAFLKNAPEGTYDAVIVDSSDPIGPAQELFEKPFFQLVARALRPGGVVCTQAESIWLHMHIIEDIVVNCRQVFKGSVNYAWTTVPTYPSGVIGFMLCSTEGPAVDFQHPVFNIEEDEHPMKSKGPLKFYNSEIHTASFCLPSFAKRVIESKAN

SEQ ID NO: 3805 - protein, 224 aa, Burkholderia cepacia R1808
MVAVPEVPEVPEVPEVPEVPEVPEVPEVPEVPEVPEVPEVPEVPEVPEVPEVPEVPEVPEVPEVPEVPEVPEVPEVPEVPEVPEVPEVPEVPEVPEVPEVPEVPEVPEVPEVPEVPEVPEVPEVPEVPEVPEVPEVPEVPEVPEVPEVPEVPEVPEVPEVPEVPEVPELPPPDVPDEPPPDVPDVPDVPDVLGLIDGVTGPSTDPQPYSVTTDKAASATVVFLK

SEQ ID NO: 3806 - protein, 347 aa, Azotobacter vinelandii
MKALVLEKQHDLKIRDIDLPTPPVGPDDVRIRIHTVGVCGSDVHYYTHGRIGHFIVDRPLVLGHEAAGTVVEVGSGVTRLAVGDRVCMEPGIPDPKSKASRLGLYNVDPSVVFWATPPVHGCLTPEVVHPAAFVYKLPDNVGFAEGALVEPFAIGMQAAVKARIKPGDVAVVIGAGTIGMMTALAALAGGASRVLVSDLMVEKLAIAQRYEGITAVNVRERSLRDAVAEVTDGWGADVVFEASGSARAYGDALAAVCPGGALVLVGMPVEPVPFDVVAAQAKEIRIETVFRYANVYERAVNLIASGKVDLKPLVSATYPFERGVEAFERAASARPGDVKVQITFGDG

SEQ ID NO: 3807 - protein, 180 aa, Triticum aestivum
  misc_feature (95)..(95): Xaa can be any naturally occurring amino acid
PEPNLMRRGLGRLEQRGPMHKECDEANGARQDPVPYAATRKLTNGTPFRRIEGIKALAEALVSAAVSTNESFVCPENIPTTTKDNYFRTESYDFXPKNAARLTVPGGPSVACSTAKAVEWDAAWSKLLDPSGRAALGVHDAAYEEEKAPASVDPVLENAFHPPAHGESTLVKSAVPAAAV

SEQ ID NO: 3808 - protein, 284 aa, Glycine max
  misc_feature (52)..(52): Xaa can be any naturally occurring amino acid
  misc_feature (65)..(65): Xaa can be any naturally occurring amino acid
  misc_feature (71)..(71): Xaa can be any naturally occurring amino acid
  misc_feature (103)..(103): Xaa can be any naturally occurring amino acid
MVLIRLWFVLLGFFGGFGSAAEQRRWTLNDFDIEKPLGRGKFGHVYLAREKXDNHIVALKVLFKXQLQQSXVVHQLRREVEIQSHLRHPHILRLDGYFYDQSXGPKGDLYKELQKCKYFSERRVTTYVASLARAFIYCHGKHVIHRDIKPENLLIGSQIQEIYRAYVHTFNRRRTMCGTLDYLPPEMVESVEHDASVDIWSLGVLCYEFLYGVPPFEAKEHSDTYRRIIQVDLKFPPKPIVSSAAKDLISQMLVKDSSQRLPLHKLLEHPWIVQNAEPSGVYRS

SEQ ID NO: 3809 - protein, 354 aa, Ralstonia eutropha JMP134
MVQAQFHRLQIAEVVAETDQAHSLVFALPESLRDTFAYRPGQFLTLRVPVDGVPQQRCYSLSSAPDVDSALRVTIKRVQGGRVSNWVCDHLGAGDTVEVMPPAGVFTPPTLHGDFLLLAGGSGITPVLSIAKAALRHGRGTVTLVYANRDEQSVIFREALGELARRHPGRLRVIHWLDSVQGPPSQRQVEELVRPWSLAECFICGPGPFMDSAQAALQELGVPRGKLHVERFVSLPDRTSAPVQAVMPAASTVVTPVPVATMHGAALTVQLDGETHQVSVAPDETVLDAMQRAGVAAPNSCRAGLCGACMCQVTQGDVTLGENHVLDQADLESGWTLACQARPASGDIHLKFPD

SEQ ID NO: 3810 - protein, 76 aa, Zea mays
MSSGGCSTCLEVIFAAILPPLGVFFRYGCCSSEFFVSLLLTLLCYVPGVAYSLYVILRTPPEPPGIDGERPYDMLA

SEQ ID NO: 3811 - protein, 507 aa, Pseudomonas sp. KIE171
MSGDYMVQATTNLVGAAYWRGRADEIQFEGRCLIDGKMVEAQSGYTFDCVSPVDGRVLTKVSAGGEADVNRAVAAARSAFRDRRWSGQSPVSRKRTLQAFAALIRLHRDELALLETLDMGKPISASRSVDVEAVASCFEWYAEAIDKLYEQIAPTAETDLALITREPLGVVGAIVPWNFPMLTAAWKTAPALACGNSVVLKPAEQSPLTAIRLAQLALEAGVPEGVFNVVPGLGGSAGRALACHMDVDGIFFTGSTATGRLLTEYAAKSNLKRVCLELGGKSPNIILASYGDIEKAAVASAESMFNNQGEVCIAPSRLIVERSIHKRVVEIVAEVAKRRQPGDPLDPTTRMGALVDANHADRVMGFIGRAKADGATLVAGGTRALTETGGSYVVPTVFDNVSNCMEIARDEVFGPVLSVIPVANVGEAVAVANDSPYGLGAGVWTDRLSDAHKISRELRAGVVYVNCYNDCDITTPFGGVKQSGNGRDKSLYALDEYTELKTTWIKL

SEQ ID NO: 3812 - protein, 217 aa, Glycine max
MGSLALETEDVISDIYLSLGLKESDKGVGGPRVLSLLSSLLERSVQRNETSLEAKHIKDVVTVFHGLRAPTLSVRKYIDRIFKYSGCSPSCFVVAHIYVDRFIQHTEIKLTSLNVHRLLITSIMLAAKFIDDAFYNNAYYAKVGGVSTSELNRLEMSFLFGIDFRLQFSVDTFGRYCRQLEKEAAEVVQIERPMQACRIKESWSNKDDPTCASTIAR

SEQ ID NO: 3813 - protein, 256 aa, Glycine max
  misc_feature (198)..(198): Xaa can be any naturally occurring amino acid
MGRGKIVIRRIDNSTSRQVTFSKRRNGLLKKAKELAILCDAEVGVMIFSSTGKLYDFASSSMKSVMDRYSKSKEEPCQLGSSASEIKFWQREAAMLRQQLHNLQESHRRKMMGEELSGLTVKELQNLENQLEISLHGVRMKKDQLLMGEIQELNRKGNLIHQENVELYKKVYGTQDDNETNRDSVLTNGLGIGEDLQXACESPAKPATATATTLQGTFRNYKNGQIAIALIHIQDACVSQLLSRKMDSDLNLDVFV

SEQ ID NO: 3814 - protein, 351 aa, Glycine max
MRMMTFTSQLFRYVLRRTFPAMMNAAVDLNLFDIIDKAESSTLSASEIASLLPNSHPQLANRLERILPVLASYSLLNCSIRTTEDGVRERLYALSPIGQYFASDDDGGSLGPLSSLFHRGYFHVLKDVKDAIMDPNNNDHFQNVHGMPPYQYMKTDEELNKLFNKALAQTGPPAMKMLLKLYKGFEQVSTLVDVGGGVGETLKQIIFEYPSIKGINFDLPQVVQDAPPYPGIEHVEGDMFESVPKGDAILLKLVCHNWLDEDCVKFLRNCHKALPQHGKVIVIDYIIPEVPDSSKISMQTCVADSLMFLVTSGKERTEKEFESLCRNSGFSRFHVACRDSPSVLSVIEFYK

SEQ ID NO: 3815 - protein, 161 aa, Pasteurella multocida subsp. multocida str. Pm70
MPKCGKFLLSFVFVISVFARADMVDTYSFNSPEERVRAVALAKALRCPQCQNQNLVESNSPIAYDLRIEVYNMVNEGKSNQQIIDAMTARFGNFVLYKPPFQWTTLLLWLSPIFLTVLAFGLMWRYAKKREKPQHTTALDPAQQAKLTQLLKQTEHTGNKK

SEQ ID NO: 3816 - protein, 255 aa, Brassica napus
  misc_feature (94)..(94): Xaa can be any naturally occurring amino acid
  misc_feature (159)..(159): Xaa can be any naturally occurring amino acid
MTEGGEYYLARMSVDPFMAMKKSNHNKNSPRASGDEQIKSLEMMFESETKLEPRKKVQLARELGLQPRQVAIWFQNKRARWKSKQLETEFNILXRQNYNDLASQFESLKKEKQALVSELHRLNEEVQKTHEEKRLCCGDQAAVVALSSTDHESENEENXRREQEEEVRPEMEVCEKGDDGVLCGHHNDDYDDGGYNNNIKREYFGGFEEEADHLMNIVEPADSCLTSSDDWGGFKSNANLLDQSSSNFPWWDFWS

SEQ ID NO: 3817 - protein, 355 aa, Arabidopsis thaliana
MDRISGLPDELLVEILHCLPTKEVVSTSILSKRWEFLWLWVPKLTFVMNHYESDLPIQDFITKNLRLLKPQVIESFHLQCFSSSFKPEDIKHWVVTTISRRVRELIINYCDLSWLDKPVVLLDLPNSLYTCTSLVTLKLIGHSIIVDVPRTVSLPCLKTLELDSVAYSNEESLRLLLSYCPVLEDLTIHRDMHDNVKTLVIIVPSLLRLNLPIDGAYSCDGYVIVTPALKYLKVPGLYREDFSYLLTHMPNVEEADLSVEQDVERLFESITSVKRLSLFVLLDIEDESMYHNGIYFNQLEHLDLHIYRDNWSKLLVRLLEDSPKLRVLKIVVDVSFFIGNLKALVLLIISFLTKI

SEQ ID NO: 3818 - protein, 106 aa, Brassica napus
KARDNRCVNESIAMASRLVAAAASSSSLSSASPLARLISRRGLAGAADGHGSAKVPLWKDPLSPSKWKEEHFVLASLSMWGVIFYGGYKLFSGKKEAKTEAASPQA

SEQ ID NO: 3819 - protein, 266 aa, Oryza sativa (japonica cultivar-group)
MAPPQERDYIGLSPAAAAALATELRLGLPGTAEEAESEGGGGGGTDAAPLTLELLPKGGAKRGFADAIVGGPAGQRREAAGGKAAAAAAEAEEEEEKKKAQAPAAKAQVVGWPPIRSYRKNTMAMSQPALKGKDDGEAKQAPASGCLYVKVSMDGAPYLRKVDLKMYKNYKELSLALEKMFSCFTVGHGESNGKSGRDGLSDCRLMDLKNGTELVLTYEDKDEDWMLVGDVPWRMFTDSCRRLRIMKGSDAVGLAPRATDKSKNRN

SEQ ID NO: 3820 - protein, 131 aa, Triticum aestivum
  misc_feature (34)..(34): Xaa can be any naturally occurring amino acid
  misc_feature (49)..(49): Xaa can be any naturally occurring amino acid
  misc_feature (66)..(66): Xaa can be any naturally occurring amino acid
  misc_feature (97)..(97): Xaa can be any naturally occurring amino acid
RERAVHAQPTRGPRCWTSGWDGGHVLQLWRRLKXHQGTRNWSALHQKPXNYLCHQTPKHHQLLTPXDQPVYNKDKSINGGGYVEVYLHQELRTRLSXHRFRTVWDCYGITHLYEEYRKGCIDLCLGGPFLT

SEQ ID NO: 3821 - protein, 405 aa, Arabidopsis thaliana
  misc_feature (150)..(150): Xaa can be any naturally occurring amino acid
  misc_feature (374)..(374): Xaa can be any naturally occurring amino acid
MDRISGLPDELLVEILHCLPTKEVVSTSILSKRWEFLWLWVPKLTFVMNHYESDLPIQDFITKNLRLLKPQVIESFHLQCFSSSFKPEDIKHWVVTTISRRVRELIINYCDLSWLDKPVVLLDLPNSLYTCTSLVTLKLIGHSIIVDVPXTVSLPCLKTLELDSVAYSNEESLRLLLSYCPVLEDLTIHRDMHDNVKTLVIIVPSLLRLNLPIDGAYSCDGYVIVTPALKYLKVPGLYREDFSYLLTHMPNVEEADLSVEQDVERLFESITSVKRLSLFVLLDIEDESMYHNGIYFNQLEHLNLHIYRDNWSKLLVRLLEDSPKLRVLKIVVDGEPSFDEEFEHVSWIYNDESSVPKCLLDSLEVFEFAGYTRXPEERDFVSFILKHACHLKSSSISRLSCYVLE

SEQ ID NO: 3822 - protein, 227 aa, Brassica napus
CLLNKLIRFIFSLFINFFFKKACNEAMFPCRSPPNWWTEELCILNIDFFSDVLASMKQRGLKPSSLASAIITYTERSLRDLVRDHSGRGVKFSDPENNDSEERSQQRDLVESIVSLLPSDKGLFPINFLCSLLRCAVFLEASLASKNELEKRISVVLEHVTVDDLLIPSFTYDGERLLDLDSVRRIISTFVEKEKNVGVFNGGDFNKGLFSASLQRVARTVDSYLAE

SEQ ID NO: 3823 - protein, 371 aa, Malus x domestica
MGKGGMSDGDHADRCCGEAINGDVQQENMAAWLLGVKNLKIQPYKLPNLGPHDVRVRLKAVGICGSDVHHFKNMRCVDFIVKEPMVIGHECAGIIEEVGSEVEDLVPGDRVALEPGISCKRCNLCKQGRYNLCRKMKFFGSPPNNGCLANQVVHPGDLCFKLPDNVSLEEGAMCEPLSVGIHACRRANVCQETNVLVVGAGPIGLVTLLAARAFGAPRIVIADVNHERLLIAKSLGADAVVKVSTNIEDVAEEVAKIQKVLENGVDVTFDCAGFNKTITTALSATRPGGKVCLVGMGQREMTLPLATREIDVIGIFRYQNTWPLCLEFLRSGKIDVKPLITHRFGFSQKEVEEAFETSARGGNAIKVMFNL

SEQ ID NO: 3824 - protein, 254 aa, Brassica napus
MTHTLQSPPSAAALSASIQKGRWKTAAAGFSVAPPPPAVNFTLRRSIPRIHASASSSSSSSSPSSPSLGAGENSELDAVSAFSEIVPDTVVFDDFERFPPTAATVSSALLLGICGLPDTIFRNAVDMALADSTCAGLDTTDSKLSCFFDKAIVNVGGDLVKLVPGRVSTEVDARLAYDTNAIIRKVHDLLRLYNEIDVPHDRLLFKIPATWQGIEAAKLLESEGIQTHLTFVYSFAQAAAAAQAGASVIQIFVG

SEQ ID NO: 3825 - protein, 368 aa, Malus x domestica
MGKGGQSCNGVVRDAKPVEQENMAVWLVDVNTIKILPFKLPAIGPNDVRIRIKAVGICGSDIHYLKTMKCGDFQVKDPMVIGHECAGIVDKVGSKVKHLVPGDRVAVEPGISCAHCQQCKGGRYNLCFDMKFFATPPVHGSLANQIVHPADLCFKLPENVSLEEGAMCEPLSVGVHPFRRANVGPETTVLIVGAGPIGLVSVLAARAFGAPRIVIVDMDDRRLAMAKSLGPDGTVKVSTKMEDLDDELAKIKEAMGSEVDVTFDCVGFNKTMSTGLNATRPGGKVCLVGMGHGVTTVPLTPAAAREVDVVGVFAYKNTWPLCLEFLRSGKIDVKPLITHRFGFTEKEVEEAFATSARGGNAIKVMFTL

SEQ ID NO: 3826 - protein, 368 aa, Malus x domestica
MGKGGQSCNGMVRDVKPVEKENMAAWLVDVNTIKILPFKLPTIGPNDVQIRIKAVGICGSDVHYLKTMKCADFEVKEPMVIGHQCAGIVDKVGSEVKHLVPGDRVAVEPGISCAHCQQCKGGRYNLCPDMKFFATPPVHGALANQIVDPADLCFKLPENVSLEEGAMCEPLSVGVHACRRANVGPETTVLIVGAGPIGLVSVLAARAFGAPRIVIVDMDSKRLAVAKSLGADGTVKVSRKMEDLDDEVAKIKETMGAEVDVTFDCVGFNKTMSTGLNATRPGGKVCLVGMGHSMMTVPLTAAAAREVDVVGVFRCKNTWPLCLEFLRSGKIDVKPLITHRFGFTEKEVEEAFATSARGGDAIKVMFNL

SEQ ID NO: 3827 - protein, 85 aa, Brassica napus
MSLFLKDDSIQIREVWHDNLESEMALIRDIVDDFPFVAMDTEFPGIVCRPVGTFKTNTEYHYETLRTNVNLLKMIQLGLTFSDER

SEQ ID NO: 3828 - protein, 472 aa, Guillardia theta
MNKLFSIKIGPYYLGKTLGVGSFGKVKLGEHELCGQKVAVKILNRKKIKNLKMEEKVKREICILKLFMHPHIIRLYEVIETPTDIFVVTEYITGGELFDYIVERGRLNEDESRKFFQQMISGIEYCHNHMVVHRDLKPENILLDAHLNVKIADFGLSNIMKDGNFLKTSCGSPNYAAPEVINGKSYLGPEVDVWSCGVIMYALLCGSLPFDDENIPNLFKKIKSGIYILPGYLSDLSRDMIAKMLITNPLLRITINEIRDHPWFNSRLPKYLSFPTFKKNFVIQKKLNIDDNILELVSNKTFLSKKYIKLGIMKHERNSTAIIYHLIRESITPFDMITVDNSYIRDIIKKENVIKKSNEKEHNTSLHQAFLGIESPRENLKDILNEIQRAIKTFRSKTHNLNHFSVIIVINTNSLFETKYKKKKEIILRTTTILIQIFKRSMKYLIDLQKINGDSFFFLSTCNFIKQELNLK

SEQ ID NO: 3829 - protein, 203 aa, Schizosaccharomyces pombe
MSAFKKSGSKSETSKKLVVVGDGGCGKTCLLIVFSSGTFPERYVPTVFENYITDITYGPNSKVIELALWDTAGQEEYDRLRPLSYPNSNVILLCFSIDCPASLNNVTEKWYPEVQHFCPRTPIVLVGLKADLRKDRNATEVLRTQGLTPVTYQQAQSVALSMNAPYVECSAKENTGVNEVFQLAVGLTIKKSFSFSKKSCVIL

SEQ ID NO: 3830 - protein, 494 aa, Klebsiella aerogenes
MSEITLLAEVTAFLRQPHGQFIAGQREAGRGAPFAVINPATGRAIAEVTAADSDQADRAMESARQALSQWREMPTLARGALLLKLADTLAEHREALAQLESLCSGKTITLVRMLELDQSVALLRYFAGWAGKVTGETLDVSLPSMAGEKYTAFTRRQPLGVVVGIVPWNFSIMIAIWKLAAALVCGCTIVLKPSEYTPLTLLRVAELAKAVGIPDGVINVVNGAGGEIAQRLITHPACAKVSFTGSVATGEKVQQSASASGKRVTLELGGKYAALFLDDLTPEAMVNGIIEAGYLNQGQICAAAERFYLPQGKLDAVLALLKDKLSAFAPGSPLDERTLMGPLANRQQYDKVLRLIQTARDEGDTIVCGGEALPGEGYFLQPTAVKVRSEESTLMREETFGPVCSFIGYRSEEEALARINASPYGLAASVWSDNIRQALRYSEAIEAGIVWVNMHTFLDPAVPFGGMKGSGIGREFGSAFIDDYTELKSVMVRY

SEQ ID NO: 3831 - protein, 146 aa, Zea mays
VMASKSKIYFVLEYAKGGELFNKIAKGGKLSEDAARKYFQQLVSAVDFCHSRGVYHRDLKPENLLLDENENLKVSDFGLSALAESKRQDGLLHTTCGTPAYVAPEVLSRKGYDGAKSDVWSCGVILFVLVAGYLPFHDTNLIEMYR

SEQ ID NO: 3832 - protein, 200 aa, Neurospora crassa
MASGSPQNVIRRKLVIIGDGACGKTSLLSVFTLGFFPATYIPTVFENYVTDCRVDGKSVQLALWDTAGQEDYERLRPLAYSKAHVILIGFSVDTPDSLDNVKHKWVTEANERCPNVPIILVGLKKDLRGDPVAIEEMRKRSQRFVMEDEGQRIAKEIGARKYLECSSLTGEGVDDVFEAATRAALLTFEKKEGSGCCVIL

SEQ ID NO: 3833 - protein, 168 aa, Triticum monococcum
MAAASSATSVHDFTVKDSSGKDVDLSVYKGKVLLIVNVASQCGLTNSNYTELSQLYPKYKDQGFEILAFPCNQFGGQEPGTNDEIVQFACTRFKAEYPIFDKVDVNGNNVSPLYKFLKSSKGGLFGDSIKWNFSKFLVDKEGHVVDRYAPTTSPLSIEKDIKKLLGSS

SEQ ID NO: 3834 - protein, 470 aa, Ralstonia metallidurans CH34
MTNLGGVMRSDRQEASGDGGNPGFEAFRQALGGQLVQRGDPDYDMARKVWNGAIDKHPALVVYCADATDVAGAVRFARATGLTIAVRSGGHNLAGLSTCDNGIVIDLSRMKRIDVDVARRRARAEAGLNLGEFDQATLRHGLATTMGVNSDTGIAGLTLGGGFGKLGRKYGLSCDNLEAVEIVTADGERLHASTTEHPDLFWAIRGGGGNFGIVTAFHFRLHPIPARLPVCAVVYPWDQAREAMLHYDAFARAAPDDVAADAALVTQPSGERCLSISACHVGPDGTEETRQAALRPLVEFGNPVDAQLDFVPYLQMQSASDALFARGRRYYWKAQFLRQIRAEAVDALLAAYALAPSPGCLVVFQQVGGAIARVPDEATAYGNRSADFDCFPLAIWDDPADDDKHREWARGLWEAVQPYSTGGVYANNLGDEGAQRTRAAYGVNHSRLVAVKRQYDPDNAFRLNQNIDPA

SEQ ID NO: 3835 - protein, 72 aa, Brassica napus
MIPICVQCGTGGNPCRCKVVGPTLGLVAFLAAGVVEWPVGALVYIFKHAKGRRIMGHPATHVYPKVSRSIPI

SEQ ID NO: 3836 - protein, 816 aa, Zea mays
  misc_feature (92)..(92): Xaa can be any naturally occurring amino acid
  misc_feature (123)..(123): Xaa can be any naturally occurring amino acid
  misc_feature (159)..(159): Xaa can be any naturally occurring amino acid
  misc_feature (183)..(183): Xaa can be any naturally occurring amino acid
  misc_feature (197)..(197): Xaa can be any naturally occurring amino acid
MAQILLHGTLHATIFEAESLSNPHRATGGAPKFIRKLVEGIEDTVGVGKGATKIYATVDLEKARVGRTRMISNEPVNPRWYESFHIYCAHMXAADVIFTVKIDNPIGASLIGRAYLPVQDLLXGEEIDKWLEICDEKREPVGDSKIHVKLQYFDVCKDXRNWARGVRSTKYPGVPYTFFSQRXQGCKVTLYQDAHVXPDNFVPRIQLADGKNYEPHRCWEDIFDAISKAQHLIYITGWSVYTEITLVRDTNRPKPGGDVTLGELLKRKASEGVRVLMLVWDDRTSVGLLKKDGLMATHDEETANYFHGTDVNCVLCPRNPDDSGSFVQDLQISTMFTHHQKIVVVDHEMPNQGSQQRRIVSFIGGIDLCDGRYDTQYHSLFRTLDTVHHDDFHQPNFEGGSIKKGGPREPWHDIHSRLEGPIAWDVLYNFEQRWRKQGGKDLLVRLRDLSDIIIPPSPVMFPEDRETWNVQLFRSIDGGAAFGFPETPEEAARAGLVSGKDQIIDRSIQDAYVNAIRRAKNFIYIENQYFLGSSYGWKPEGIKPEEIGALHLIPKELSLKIVSKIEAGERFTVYVVVPMWPEGVPESASVQAILDWQRRTMEMMYTDIAQALEANGIEANPKDYLTFFCLGNREVKQEGEYEPEEHPEPDTDYIRAQEARRFMIYVHTKMMIVDDEYIIIGSANINQRSMDGARDSEIAMGAYQPYHLATRQPARGQIHGFRMSLWYEHLGMLEDVFQRPESVECVQKVNEVAEKYWDLYSSDDLEQDLPGHLLSYPIGVTADGSVTELPGMENFPDTRARVLGNKSDYLPPILTT

SEQ ID NO: 3837 - protein, 181 aa, Brassica napus
MASSMLSSATVVSSPAQAAMVAPFTGLKSSAAFPVTRKTNTDITSIASNGGRVNCMKVWPPVGKKKFETLSYLPDLTDVELAKEVDYLLRNKWIPCVEFELEHGFVYREHGNTPGYNDGRYWTMWKLPLFGCTDSAQVLKEVQECKTEYPNAFIRIIGFDNNRQVQCISFIAYKPPSFTGA

SEQ ID NO: 3838 - protein, 471 aa, Chromobacterium violaceum ATCC 12472
MSKRYRTALVWLRRDLRLDDHAAFYHALKHSEAVLPVFVFDASILAALPRDDRRVDFIWQSAAALKAELNQLGGDLLIRHGLPQHEIPRLAAELGAEAVFCNRDYEPAARARDAEVAQRLAEQGVAFRDSKDQVIFETDEVLTGAGKPFSVFTPYKNAWLKKLTPFHLQAYPVRRYLDALMPREPQSMPSLADIGFLPSDLASLPVKAGAAGAEALFADFAGRIERYKAQRDFPGVKGVSYLSVHLRFGTLSIRRLAAYAWHDGGEGAMTWLSELIWRDFYQQVLWHRPDAAKHAFKPEYDALPFPNDPEWFDAWREGRTGYPLVDAAMRQLNRSGYMHNRLRMVAASFLVKDLLIDWRWGEQYFAEKLLDFDLAANNGGWQWAASTGCDAQPYFRIFNPVSQSEKFDPDGRFIRRYVPELAALPDKLIHAPWQAKPEQLMSAGVRLGRDYPHPIVDHAVQRELALALFKR

SEQ ID NO: 3839 - protein, 262 aa, Burkholderia fungorum LB400
MKARLDISDITIAGHAQDITLRSFHPFAHSAMPIVLYFHGGGFVKGSLDETSKPATLIAAQTPAWVIAVGYSLAPEFPFPAATEDAHLALEWAVGNARGYRADPNRIAAVGHDAGGNIAAGLAAIARDRGVRRLSAQALLAPLLDPSMTRLMEGQCPGRSDLAPEDCARSYRAYLPSANHRIHPYAAPLESRRLATLPPTLIATAEQDLVRGDGETYARELITAGVPVEMTRHGGVCHGELISHSPALDGVVEFLRKRLARD

SEQ ID NO: 3840 - protein, 363 aa, Triticum aestivum
  misc_feature (207)..(207): Xaa can be any naturally occurring amino acid
  misc_feature (211)..(211): Xaa can be any naturally occurring amino acid
  misc_feature (214)..(214): Xaa can be any naturally occurring amino acid
  misc_feature (253)..(253): Xaa can be any naturally occurring amino acid
MGSTAADMAASADEEACMYALQLVSSSILPMTLKNAIELGLLETLVAAGGKLLTPAEVAAKLPSTANPAAADMVDRMLRLLASYNVVSCTMEEGKDGRLSRRYRAAPVCKFLTPNEDGVSMAALALMNQDKVLMESWYYLKDAVLDGGIPFNKAYGMSAFEYHGTDPRFNRVFNEGMKNHSIIITKKLLEVYKGFEGLGTIVDVGGXGVGXTVXAITPPHSAIKGINFDLPHVISEAQPFPGVTHVGGDMHVXQKVPSGDPILMKWILHDWSDEHCATLLKNCYDALPAHGKVVLVECILPVNPEATPKAQGVFHVDMIMLAHNPGGRERYEREFEALAKGAGFKAIKTTYIYANAFAIEFTK

SEQ ID NO: 3841 - protein, 180 aa, Triticum aestivum
  misc_feature (112)..(112): Xaa can be any naturally occurring amino acid
NDRWCVQATEGMNIKEECKRWFTEMKWKKVHRFVVYKIDERTRAVLVDKVGGPGEGYDELVAALPGDDCRYAVFDFDFVSVDNCQKSKIFFIAWSPAASRIRAKILYATSKXGLRRVLEGVHYEVQATERSEMGSTHHQERAQFSDPPAKSFYMFGLPVPTIPVYYNPTDLIWAGGCLVV

SEQ ID NO: 3842 - protein, 240 aa, Triticum aestivum
  misc_feature (92)..(92): Xaa can be any naturally occurring amino acid
MGERVKGTVKWFNVTKGFGFISPDDGGEDLFVHQSSIKSDGYRSLNENDAVEFEIITGDDGRTKANDVTAPGGGALSGGSRPVEGGGDRGGXRGGYGGGGGGYGGGGGGYGGGGGGYGGGGGGYGGGGGGYGGGGYGGGGGGGRGCYKCGEEGHISRDCPQGGGGGYGGGGYGGGGGGGGGRECYKCGEEGHISRDCPQGGGGGGGYGGGGGRGGGGGGGGCFSCGESGHFSRECPNKAH

SEQ ID NO: 3843 - protein, 381 aa, Arabidopsis thaliana
MTNHLQDPLPTYPKPVLTKEEQEVDEKMVSLQAESIVNTVAFPMVLKAAFELGVIDTIAAAGNDTWLSPCEIACSLPTKPTNPEAPVLLDRMLSLLVSHSILKCRMIETGENGRTGKIERVYAAEPVCKYFLSDSDGTGSLVPLFMLLHTQVFFKTWTNLKDVILEGRDAFNSAHGMKIFEYINSDQPFAELFNRAMSEPSTMIMKKVLDVYRGFEDVNTLVDVGGGNGTVLGLVTSKYPHIKGVNFDLAQVLTQAPFYPGVEHVSGDMFVEVPKGDAVFMKWILHDWGDEDCIKILKNCWKSLPEKGKIIIVEFVTPKEPKGGDLSSNTVFAMDLLMLTQCSGGKERSLSQFENLAFASGFLRCEIICLAYSYSVIEFHK

SEQ ID NO: 3844 - protein, 311 aa, Sulfolobus tokodaii str. 7
MKREELLVEEIKDLTLEELKGYADFYKILDKVYGFTAESVVRGVKILKDMIKEADLRFLSFTANLVSTGLRGLFADLIKQGYFNVIITTGGTIDHDIARSFGGKYYKGLFEYDDSMLRELEIHRLGNILVPMESYGKVIEDVVRKYMNEIVSIKKEWPVYELLWEFGKRISDENSILKAAYEKKVPIIVPGIIDGSFGTNLFIYSQFTQLKLNLFEDMKLIKDLIFSCKKSGALIIGGGISKHHTIWWNQFKDGLDYAIYITTAQEYDGSLSGAKPREAISWNKIKPTSENVVIYGDATIILPILSASLLG

SEQ ID NO: 3845 - protein, 350 aa, Bacteroides thetaiotaomicron VPI-5482
MLAYTYIEHGKFELREKPEPKITDARDAIVRVTLGSICTSDLHIKHGSVPRAVPGITVGHEMVGVVEEVGAEVTSVRPGDRVTVNVETFCGECFFCHHGYVNNCTDPNGGWALGCRIDGGQAEYVRVPYADQGLNRIPDTVSDEQALFVGDVLATGFWATRISEITEKDTILLIGAGPTGICTLLCSMLKNPKRIIVCEKSPERIQFVREHYPDVLITTPENCKEFVLQNSDHSGADVVLEVAGTEDSFRMAWDCARPNAIVTIVALYDKPLLFPLPEMYGKNLTFKTGGVDGCDCAEILSLIEEGKIDTTPLITHRCSLNEIEEAYRIFENKLDGVIKVAIVCQTESNK

SEQ ID NO: 3846 - protein, 131 aa, Sulfolobus tokodaii str. 7
MSIQYTTVGDLKVGNYVVIDGEPCRVVEISKAKTGKHGSAKANIVAIGLFTGQKRTLMAPVDQQVEVPIIEKHIGQILADKGDTITIMDMENYETFDIEKPTDADIVDKIRPGAEVEYWEIMGRKKIVRVK

SEQ ID NO: 3847 - protein, 321 aa, Kineococcus radiotolerans SRS30216
MLVRIVYGGICGSDLHYAADGRNGAYVVTEPLVLGHEVVGVVERAGPDTPAAPPAGTRVAVHPATPCAPAGAAAPTGLHLRPGGTYLGSASTHPHTQGGFTGLLAVGVERLRELPAALPLRRAVLAEPLAVALHAVGRLEGRVAGARVLVSGAGPIGVLAVAALKRAGAAHVTAADLQELPLRVATAVGADEVVDLSRGGSLPEAGFDVVVEAAGVVPSLLAAIRAVRPGGSILQLGILPAGPQPVPVGELLSKEVALFGTQRFDTELDAAVELLAADDSLDAVVTDVFGIEDAAAAFARARDSANSSKTVLRITPDPDDA

SEQ ID NO: 3848 - protein, 373 aa, Haemophilus influenzae 86-028NP
MHGYNHPRLNAAAQNQLAKMSHIMFGGFTHDPAVELAQLLVQILPNGLDKIFFADSGSVAVEVAMKMAIQYQHAKGEVQRQKFATIRSGYHGDTWNAMSVCDPTTGMHHLFHHSLPVQYFLPQPNIPFNESWNDCVIEPLADLLKKKGSEIAALILEPVVQGAGGMYFYSPTYLVKAQALCKQYGVLLIFDEIATGFGRTGKLFAAEHAGISPDIMCIGKALTGGYLTLSASITTTEIAQIICSGEAKCFMHGPTFMANPLACAIAAESIRLLLESPWQQNIQRIEHSLKQQLSPLAEKDYVKEVRALGAIGVVEMKSAVNMKTLVPRFVEQGVWIRPFGKLVYVMPPFVIKDDELQKLTEGMILALIQEYEH

SEQ ID NO: 3849 - protein, 348 aa, Pseudomonas putida
MLAIRKTKAGPGGLSVDDVAAPKEAHSTDVLVKVEAAGICGTDLLIYKWGEFAKRMKLPTILGHEVSGVIEQVGSDVKGLRPGMRVSLESHLPCGTCYTCRRGWAHVCPKTRYPGVDFDGGFASFVVVPESVCWPVPCGIPPLQATMMEPFGLAVHASLEGSGVSGLNVLVSGCGPIGLMNIAAAKALGASKVIATDIHPLRLTAAAKMGADECINATEESVYKTVRSLLGERGVDVAIDYSGQAAALKELIQSITHGGELRLMGVPSHDILLNLEEWLFKGLIVRGLHGRRLYETWERSTSLLVTGRVDLSSLVSHRLPLSAAEDAFEMALNGQSLKILFEPNGSCI

SEQ ID NO: 3850 - protein, 183 aa, Streptococcus agalactiae
AIKQQTIFDIDNAKTEVEIDNLVHDAFSKMNATVAKFQKGLETNTPETPDTPKIPELPQAPDTPQAPDTPHVPESPKAPEAPRVPESPKTPEAPHVPESPKTPEAPKIPEPPKTPDVPKLPDVPKLPDVPKLPDAPKLPDGLNKVGQAVFTSTDGNTKVTVVFDKPTDADKLHLKEVTTKELA

SEQ ID NO: 3851 - protein, 371 aa, Senecio vernalis
MEESIKQASVMENLRSVVFKESESLEGTCAKIRGYDFNNGIDYSQILKSMVSTGFQASNLGDAIETVNQMLDWRLSHEQVTEDCSEEEKNPTYRESIKCKIFLGFTSNLISSGVRDIIRYLVQHHMVDVIVTTTGGIEEDLIKCLADTFKGEFSLPGAELRSKGLNRIGNLLVPNDNYCKFEDWIIPIFDQMLEEQKAKNVVWTPSKLIMRLGKEINNESSYLYWAYKNDIPVFCPGLTDGSLGDMLYFHTFRNPGLIVDVVQDIRAINSEAVHANPRKTGMIILGGGLPKHHICNANMMRNGADYAVFINTAQEFDGSDSGARPDEAVSWGKIRGSAKSVKVHCDATIAFPLLVAETFAAKREKSVEPSS

SEQ ID NO: 3852 - protein, 281 aa, Arabidopsis thaliana
MDIFDNSDLEYLVDEFHADFDDDEPFGEVDVTSESDSDFMDSDFDFELSESKTNNETSALEARNGKDIQGIPWESLNYTRDRYRENRLLHYKNFESLFRSREELDKECLQVEKGKNFYDFQFNTRLVKSTIAHFQLRNLVWATSKHDVYFMNNYSLMHWSSLLQRGKEVLNVAKPIVPSMKQHGSLSQSVSRVQISTMAVKDDLIVAGGFQGELICKKINEPEVAFCTKLTSADNDITNSVDIYNAPSGSLRVMTANNDCTVRLFDATNFALLNRLPFTGL

SEQ ID NO: 3853 - protein, 491 aa, Escherichia coli CFT073
MMSRMAEQQLYIHGGYTSATSGRTFETINPANGNVLATVQAAGREDVDRAVKSAQQGQKIWAAMTAMERSRILRRAVDILRERNDELAKLETLDTGKAYSETSTVDIVTGADVLEYYAGLIPALEGSQIPLRETSFVYTRREPLGVVAGIGAWNYPIQIALWKSAPALAAGNAMIFKPSEVTPLTALKLAEIYSEAGLPDGVFNVLPGVGAETGQYLTDHPGIAKVSFTGGVASGKKVMANSAASSLKEVTMELGGKSPLIVFDDADLDLAADIAMMANFFSSGQVCTNGTRVFVPTKCKAAFEQKVLARVERIRAGDVFDPQTNFGPLVSFPHRDNVLRYIAKGKEEGARVLCGGNVLKGDSFDNGAWVAPTVFTDCSDDMTIVREEIFGPVMSILTYESEDEVIRRANDTDYGLAAGIVTADLNRAHRVIHQLEAGICWINTWGESPAEIPVGGYKHSGIGRENGVMTLQSYTQVKSIQVEMAKFQSIF

SEQ ID NO: 3854 - protein, 81 aa, Zea mays
MKTSVVVVAALAAVLFLAQSYASLAGASGPRVIIVGAGMSGISAGKTLWEAGVRDLLILEATGRVGGRMHKHNFGGINVEI

SEQ ID NO: 3855 - protein, 497 aa, Ralstonia solanacearum
MTRTDLPPAPITLNDPALWRTQAFLAGAWTDADDGSTRDVTDPATGRVIGTVPAMGAAETRRAIEAAQAAQRAWRKVTARERARILRKLADLMLEHQQDLARILTAEQGKPLPEATGEIAYAASFIEWFAEEARRVYGDTIPAPQGDRRIVVNKEPIGVTAAITPWNFPIAMMTRKVGPALAAGCAMVVKPALETPYSALAFAELAARAGVPAGLLSIVTGDAQGIGGELTANPVVRKLSFTGSTAVGRLLMRQCADDVKKLSLELGGNAPFIVFDDADLDAAVEGAMVAKYRNAGQTCVCANRFYVQRGIYDAFAARLSEAVRALRVGNGAEPGVQQGPLIHQRAMDKVRAHVDNAVAQGARVLVGGKPHALSAQGGAFFEPTVIVDARPGMLVAHEETFGPLAALIPFDTEDEAVAAANDTEFGLAAYFYTRDLGRAWRVSEALESGMVGVNTGLISTAEAPFGGVKQSGLGREGSKYGIDEYLEIKYVCMAGLG

SEQ ID NO: 3856 - protein, 496 aa, Burkholderia cepacia R18194
MTIVTEAAQAARTQALAWINRGPKRLLIGGRWVDAASGNTFETINPATEQVLCRVAEADSADVDAAVIAARRAFDAPSWGGLSPHARTRALLKIADAIEQHVDELAAIESLDNGMPLWFALAAVTATIDIVRYYAGWCSKVLGTTIPSDGSTLIYTLREPLGVCGQIIPWNVPILMAAIKFANALCCGNTVILKPAELACLTSIRLAELIQETDLPPGVINVLPGYGPTAGAALAQHPGVDKIAFTGSTPVGKQITRDATLNLKKVTLELGGKAPNVIFADADIEKAVQAAVKTFCGNSGQVCSAGTRLFVQEGIHEQVAERVAQIAATWKAGDPFASDTKLGPLISAKQRDRVWSYIGVGQEGGATLRLGGDPWRGAGYFVEPTVFDNVRNGMRIAQEEIFGPVLSIIPFKDEGDAVLQANDTTYGLSAAVWTRDVARAHKVVRALKAGRLWINTFGESDPAMAFGGYKQSGWGREFGQESIDAYTQTKSIMLRM

SEQ ID NO: 3857 - protein, 543 aa, Glycine max
  misc_feature (127)..(127): Xaa can be any naturally occurring amino acid
TRPQKFGWVSLVSHLRLSVLLLSVSLGNSASLQENFVQCLNLNSDRTFPFNPLIYTPKSPSFTSVLDSSGKNQRLLVPSTPKPKFIFTPTRDSHVQAAVICSKKLGIHLRVRSGGHDFEGVSYVSEXESPFIVVDLIKLRDINVDIKSNTAWVQAGATTGELYYRIYEKSSLHGFPAGLCTSLGIGGHITGGAYGSMMRKYGLGVDNVLDAKIVDANGRILDRKAMGEDLFWAIRGGGGGSFGILLWWKVKLVPVPPTVTVFTVKKTLEQGATKILDKWQEVAPYIDENLFIRVIIQPSSDARNKTQRTIATSYNALFLGGARTLLQVMKTSFPELGLTIKDCLETSWIKSVLYIAGFPSDTPPEVLLKGKSTFKNFFKAKSDFVREPIPETGLEGLWQRLLVEDSPLMIWNPYGGRMSQFSESETPFPYRNGTLYKIQYFSLWQEGDKNAAKHIDWIRKLYNYMGPYVSSLPREAYVNYRDLDLGINTKNSTSYIQASAWGYRYYKNNFDRLVKIKTKVDPENVFRHEQSIPPLPKKVDLLV

SEQ ID NO: 3858 - protein, 489 aa, Burkholderia cepacia R18194
MSVNIPGFIEGNKKLLIGGQWVEPAGGEHIEAINPATGEVLCHIAKGGTQDVERAVAAARRAFEGPWSRFTPHERRKLLLRVHDVILDHFDELALIETLDMGAPLARTRGYKEWLSQLLQFYASQTGAGTVQAAPMSIAPGFTALKHLMPVGVVGGIIPWNGPLMGLWWIYGPALATGCTAVLKPAEDASLSSLRVSELMMEAGVPDGVINVVTGYGKDVGQALAEHPDVDRVAFTGSVGTAQAIVRASAGNLKRLQLELGGKSPDIVFADADLDKAVPGAAMGVFTNTGQVCVAGTRIFVQRAIHDEFVQRIAAFAKTIRIGDGLSPDTQIGPLISQRQLERVMHYVDIGGKEATLVHGGQRPGGELARGYFVEPTVFANVRNDMTIAREEIFGPVASVIPFDTMEEALQLANDTPYGLAGGVWTSSLSTAHKVSQGIRSGTVWVNCYGVIDPAVGFGGTKMSGYGWKGGKEHVESFLYPKATYINLG

SEQ ID NO: 3859 - protein, 159 aa, Listeria monocytogenes str. 1/2a F6854
MNVHDFSEKAMNGKEIALSDYKGKVLLIVNTASKCGLTPQLEGLEAMYKKLGGDNFEILGFPCNQFLRQDPGSDEEILEFCQMNYGVTFQMFSKIKVKGKDASPLYKYLTEQTGGKKVEWNFAKFLIDENGEVVERFPSKMKPEDFEDKVEALVAKVNN

SEQ ID NO: 3860 - protein, 100 aa, Glycine max
  misc_feature (76)..(76): Xaa can be any naturally occurring amino acid
MSGVWVFKNGVVRLVENHGSDRWVLAHTASNEIITPYAVLEHKPSSLGWERYYDDPDLLQFHKRSTVHLISLPRDXNKFRSMHMYDIVVKNKNYFEVRDM

SEQ ID NO: 3861 - protein, 462 aa, Zea mays
FIRHHRTATEEGGMAAAGGGPRRTTRVGPYELGKTVGEGSFAKVKIAKDTRNAATCAIKVLDRNHVLRHKMVEQIKREIATMKLIRHPNVVQLHEVMASKSKIYMVLEFVEGGELFDKIVNSGRLGEDEARIYFHQLINAVDYCHSRGVYHRDLKPENLLLDSNGALKVSDFGLSAFAPQTNEDGLLHTTCGTPNYVAPEVLADKGYDGMAADVWSCGIILFVLMAGYLPFDDANLMRLYKLVKICQAYFSCPPWFSSGAKKFIKRILDPNPDTRITIAEILEDEWFKKDYKPPRFEQGEDVSLDDIDAAFNDSEDRLVAEKREKPESMNAFALISRSQGFNLGNLFEKEMMGMVKRETSFTSQCTAQEIMTKIEDACGPLGFNVRKQNYKMKLKGDKSGRKGHLSVATEVFEVAPSLHMVELRKTGGDTLEFHSFYKNFSSELKDIVWKAESDANNKQTNK

SEQ ID NO: 3862 - protein, 81 aa, Triticum aestivum
MALGHELVHHGYSQSSKWSTDISPNLEWKLIYVGSAEDENYYQQFESVLVGPVNVGTYHFVLEVVERCRLGSGVVRSTTVQ

SEQ ID NO: 3863 - protein, 186 aa, Carica papaya
FGSVYKGFIDDKLRPGLKAQPVAIKLLDLDGSQGHKEWLTEVIFLAQLRHPHLVKLIGYCCEEEHRLLVYEYMPRRSLENQLFRRYSVSLPWSTRMKIAHGAAKGLEFLHEAENLVIYRDFKASNILLDADYNPKLSDFGLAKDGPEGDDTHVSTRVMGTQGYAAPEYIMTGSHLTAKSDIYSFGI

SEQ ID NO: 3864 - protein, 320 aa, Rubrivivax gelatinosus PM1
MPSAAFQPPQHGLTPTMRDVLDRMRRAGRPPLHTMSVDAAREAYRLGAEILDLPRVALARVEDLLVPARDGHLLPARLYAPSSARLPVLLYLHGGGFTIGSLDTHDSLCRQLALQGGAAVLSLDYRLAPEHRFPAAVDDAWDALQWVAREGGARLGLDDTRLAVGGDSAGGTLSAVCALMARDAALPLALQLLFYPGTAARQDSDSHRRFAEGVLLARPLIDWFFGHYIATEHREDWRFAPLLAPDHGGVAPAWIGLAECDPLVDEGVAYGDVLRAAGVPVQLELWRGVVHDFIKMGRAVPEARQAHAAAARALREAFSP

SEQ ID NO: 3865 - protein, 303 aa, Neurospora crassa
MPLEAVMIVVDNSESSRNGDYIPTRYDAQADAVNIIFQNVVQGNPESSVGLMSMAGRGPEVLVTLTTDQGKILEGLHRTKKNIRGSAQLSRAIQVAWLALKHRQNKSQRGRIVIFVCSPIEEEESDLVKLAKKMKKNNTSVDFVLFGDIDDENQKKLEAFNREVKSGEGSNMVVIPPSSKLLSDQLISTPILLGEAAAGGSGGAGGDAGGAANEDFPFGIDPSVDPELALALRMSMEEEKARQEKRAKEEAEAAKKASLEDVKEEAGESEPLLGKDGEPSGSGSKKDGDKPGKSDDGDKMDTS

SEQ ID NO: 3866 - protein, 694 aa, Zea mays
MPALAVDAATPVAHAFASCDAARFPAPPVVGPAAAAEAAPWSADLSAALYNVDGWGAPYFFVNDDGDVAVRPHGAATLPGQEIDLAKVVAKAAGPRAGGGLGLPLPLLVRFPDVLRHRVETLNAAFGYAVRSTGYGSRYQGVYPVKCNQDRYVVEDIVEFGAPFGFGLEAGSKPELLLAMSCLAARGGLDALLICNGYKDDGYVSLALMARSMGLNTVIVLEQEEELDIVVEASRRLGVRPVVGMRAKLRTKHAGHFGSTSGEKGKFGLSAAQILSVVTKLKAIGMLDCLQLLHFHIGSQIPTTALLSDGVGEAAQIYCELARLGADMRVIDVGGGLGIDYDGTHSAQTDMSVAYSLEEYAGAVVAAVGRVCDRKGVQHPIICSESGRALVSHHSVLVFEAFSATAPGRLDAATAYLLDELTDDCRADYRNVMAAAVRGDYDTCGLYADQLKRRSAEQFKEGVLGLEHLAAVDAFCELVARGMGAPEPPRTYHINLSVFTSLPDMWAIGQQFPIIPIQRLQERPAVDGVLSDLTCDSDGKVSEFIGGRHSLPLHELPTHATRGYYLGMFLGGAYQEALGGLHNLFGGPSVVRVSQCDGPHCFAVTRAAAGPSCADVLRAMQHEPEVMYEVLKQRTDGATAAALARAFGAMPYLVFDPEAAVMSGGESSDSERSAAGAAEEEDDEEWEFMRGLTV

SEQ ID NO: 3867 - protein, 512 aa, Arabidopsis thaliana
MTSSFLLLTFAICKLIIAVGLNVGPSELLRIGAIDVDGHFTVHPSDLASVSSDFGMLKSPEEPLAVLHPSSAEDVARLVRTAYGSATAFPVSARGHGHSINGQAAAGRNGVVVEMNHGVTGTPKPLVRPDEMYVDVWGGELWVDVLKKTLEHGLAPKSWTDYLYLTVGGTLSNAGISGQAFHHGPQISNVLELDVVTGQFGIITRARISLEPAPQRVRWIRVLYSSFKVFTEDQEYLISMHGQLKFDYVEGFVIVDEGLVNNWRSSFFSPRNPVKISSVSSNGSVLYCLEITKNYHDSDSEIVDQEVEILMKKLNFIPTSVFTTDLQYVDFLDRVHKAELKLRSKNLWEVPHPWLNLFVPKSRISDFDKGVFKGILGNKTSGPILIYPMNKDKWDERSSAVTPDEEVFYLVALLRSALTDGEETQKLEYLKDQNRRILEFCEQAKINVKQYLPHHATQEEWVAHFGDKWDRFRSLKAEFDPRHILATGQRIFQNPSLSLFPPSSSSSSAASW

SEQ ID NO: 3868 - protein, 383 aa, Actinobacillus pleuropneumoniae serovar 1 str. 4074
MKNITKFAVTLLAGLVITACGSKNHSIDIKPKSDKPKQEQPKQPQPKQDQPKQEQPKQEQPKQEQPKQEQPKQEQPKQEQPKQEQPKQDQPKQEQPKQEQPKQDQPKQEQPKQDQPKQEQPKQDQPKQEQPKQDQPKQDQPKQDQPKQDQPKQDQPKQEQPKQDQPKDKTSGGVFIVEGVSKNLPQLTKEKLTDANLNSIKVDGIEIKFADATKAKGNWKVSPDNSLVVCCDKYSSVRFGVYESKGKSYSFYNGNATAEMPTSGKFTYTGDAYLLASVVGNGAESIGTSKFEADFGTKKLTGTLTFDKLKDSKNVDIDSKISGNSFTGKATFDSFKGTDAIVEGKFYGENAKELAGAFDSAKEKGAKLGDKSWGGVFGAKQQK

SEQ ID NO: 3869 - protein, 477 aa, Mesorhizobium loti MAFF303099
MSHNLQFYVDGAWVDPVVPNTLDVIDPSNEDAFAQISLGSKADVDKAVAAAKRAFNSFGFTSVEERLDILNRVIEVYKKRSKDLALAVSREMGAPRQMALDSQVGVGLAHLEKMAEVLRTFQFRHVKGSALIVKEPIGVVGLITPWNWPLNQITCKVGPALAAGCTMVLKPSEIAPLDAIIFAEIIDEAGVPKGVFNLVNGDGPGVGQALSSHPDVDMMSFTGSTRAGILVAKAAADTVKRVHQELGGKSANILFPDVDLARAVTKGVAGCFGNSGQSCNAPTRMFVPRDRHDEAAGYAKAAAEKFVVGPADGANTKLGPVVSQMQFDKIQDLIQAGIDEGATLVAGGPGRPAELNRGYYVRPTVFADVTHDMRIAREEIFGPVLAILPYDTVEKAVEQANDTVYGLASYIQAKDIQKARDVAARMRSGNVYINYPAWDAGLPFGGYKQSGNGREYAEYGLEDFLEIKGIAGYEAAE

SEQ ID NO: 3870 - protein, 218 aa, Ipomoea batatas
MGRGKVEIRRIEKSTNRRVTFWKRRNGLLKKAMEMGILCDAEVGLMIFSSTGKLHEFATTSIRSVIERYNKTQGDSLQSPLDPTLELKFWQIEVAILRQQLHNMQEDHRKVMGEVYGLSVKDLQNLENQLEMSLSGIRMKKEQILIEQIQELTHKQGSFVHQENFELFNKFQAYGTSDPNAVNGDTISPYDFTISEESQGHIHFQLPQNFSDLARALY

SEQ ID NO: 3871 - protein, 404 aa, Chromobacterium violaceum ATCC 12472
MLSEQTRSLVKATVPVLQQHGVALTSHFYRRMFEHNPELKNVFNQGHQHSGQQQQALAMAVLAYARHIDDPSPLLPVLTRVAHKHVSLGIRAEHYPIVGKHLLASIRELLGEAAGDDLIQAWAEAYGLLADTLIGIENGMYGDATSADGGWSGWRPFRVAKKEIESEEIASFYLEPSDGGALPAFKPGQYVSVKRFVAEWGLSQPRQYSLSDAPNGEYLRISVKREDAAQGKPAGRVSNLLHREVQVGDVLELSAPQGDFFLHEERDGPAVLISAGVGQTPMQAMLGQLLKRGGREVRFLHAARHGGAHAMGAKVRQLADRHPQLKVHVCYETPRAQDAIGVDYQAAGRLNLADVKGIALLPDADYYLCGPLGFMRAQRDSLRGLGVAADRIHYEVFGSHPGDD

SEQ ID NO: 3872 - protein, 571 aa, Glycine max
KALNKGTAFSMTERDRLDLRGLLPPNVMSPDLQIERFMVDLKRLEVQARDGPSDPNALAKWRILNRLHDRNETMYYKVLIAKIEEYAPIVYTPTVGLVCQNYSGLFRRPRGMYFSAEDRGEMMSMVYNWPAEQVDMIVVTDGSRILGLGDLGVQGIGIAIGKLDLYVAAAGINPQRVLPVMIDVGTNNEKLLEDPLYLGLQQHRLDGDDYLAVVDEFMEAVFTRWPNVIVQFEDFQSKWAFKLLQRYRNTYRMFNDDVQGTAGVAIAGLLGAVRAQGRPMIDFPKQKIVVAGAGSAGIGVLNAARKTMARMLGNNEVAFESAKSQFWVVDAQGLITEGRENIDPDALPFARNLKEMDRQGLREGASLVEVVKQVKPDVLLGLSAVGGLFSKEVLEALKGSTSTRPAIFAMSNPTKNAECTAEEAFSILGDNIIFASGSPFSNVDLGNGHIGHCNQGNNMYLFPGIGLGTLLSGARIVSDGMLQAAAERLATYMSEEEVLKGIIFPSTSRIRDITKQVATAVIKEAVEEDLAEGYHGMDARELQKLSEDEIAEYVQNNMWSPEYPTLVYKKE

SEQ ID NO: 3873 - protein, 195 aa, Streptococcus agalactiae
AIKQQTIFDIDNAKTEVEIDNLVHDAFSKMNATVAKFQKGLETNTPETPDTPKIPELPQAPDTPQAPDTPHVPESPKTPEAPHVPESPKTPEAPHVPESPKTPEAPHVPESPKTPEAPKIPEPPKTPDVPKLPDVPKLPDVPKLPDAPKLPDGLNKVGQAVFTSTDGNTKVTVVFDKPTDADKLHLKEVTTKELA

SEQ ID NO: 3874 - protein, 245 aa, Hordeum vulgare subsp. vulgare
MAGEDATRAATEEELSSVAEAAPVTAQRPVRSDLEKYIPKPYLARALVAPDVYHPQGSKERGHEHRHRSVLQQHVAFFDMDGDGVIYPWETYQGLRALGFNMIVSFVIVIIIHATLSYTTLPTGYRLSLPFYIDNIHRAKHGSDTATYDTEGRYMPVNFENIFSKNARWSPDKLTFREIWTMTDDQRQANDPFGWVASKAEWILLYMLAKDEEGNLPREAIRRCFDGSLFEFIADERRQAHGKQY

SEQ ID NO: 3875 - protein, 195 aa, Streptococcus agalactiae
AIKQQTIFDIDNAKTEVEIDNLVHDAFSKMNATVAKFQKGLETNTPETPDTPKIPELPQAPDTPQAPDTPRVPESPKTPEAPHVPESPKAPEAPRVPESPKTPEAPHVPESPKTPEAPKIPEPPKTPDVPKLPDVPKLPDVPKLPDAPKLPDGLNKVGQAVFTSTDGNTKVTVVFDKPTDADKLHLKEVTTKELA

SEQ ID NO: 3876 - protein, 118 aa, Oryza sativa (indica cultivar-group)
MARAQLVLVALVAAALLLAGPHTTMAAISCGQVNSAVSPCLSYARGGSGPSAACCSGVRSLNSAASTTADRRTACNCLKNVAGSISGLNAGNAASIPSKCGVTIPYTISPSIDCSSVN

SEQ ID NO: 3877 - protein, 395 aa, Burkholderia fungorum LB400
MESLKTGTDTLFLLLGAGMVLAMHAGFAFLELGTVRKKNQVNALVKILVDFSVSTIAYFFIGYAIAYGVQFFGSAESLAAHNGYALVRFFFLLTFAAAIPAIVSGGIAERSKFNPQLFATFVLVGFIYPFFEGIAWNGRFGIQNWLAEMFGAQFHDFAGSVVVHAFGGWVALPAVLLLGARHGRYHRDGGIAAHPPSNIPFLALGAWVLAVGWFGFNVMSAQTVDKISGLVAVNSLMAMVGGTLTAWLAGRNDPGFSYNGPLAGLVAVCAGSDIMHPLGALVTGGIAGVLFVYMFTCVQNRWRIDDVLGVWPLHGLCGAWGGLAAGIFGLRALGGMGGVSFGAQLVGTLGGIVVATLGGTLVYGAIRLTVGLRLDQEDEYNGADLSIHKISATPE

SEQ ID NO: 3878 - protein, 97 aa, Glycine max
  misc_feature (72)..(72): Xaa can be any naturally occurring amino acid
  misc_feature (86)..(86): Xaa can be any naturally occurring amino acid
MASSMISSPAVTTVIRAGAGMVARFTGLKSMAGFRSSKTINDITSIATNGGRVHCMQVWSPVGNKLFETLSXLPFLDDVQLAHELXYLLMNGWIPCL

SEQ ID NO: 3879 - protein, 195 aa, Streptococcus agalactiae
AIKQQTIFDIDNAKTEVEIDNLVHDAFSKMNATVAKFQKGLETNTPETPDTPKIPELPQAPDTPQAPDTPHVPESPKAPEAPRVPESPKTPEAPHVPESPKTPEAPKIPEPPKTPDVPKLPDVPKLPDVPKLPDVPKLPDVPKLPDAPKLPDGLNKVGQAVFTSTDGNTKVTVVFDKPTDADKLHLKEVTTKELA

SEQ ID NO: 3880 - protein, 106 aa, Rickettsia felis
NMLKEIGSSENIPKYIAKAKDKNDPFRLMGFGHRVYKNYDPRAAVLKETCKEVLKELGQLENNPLLQIAIELEAIALKDEYFIERKLYPNVDFYSGIIYKAMGIPS

SEQ ID NO: 3881 - protein, 195 aa, Streptococcus agalactiae
AIKQQTIFDIDNAKTEVEIDNLVHDAFSKMNATVAKFQKGLETNTPETPDTPKIPELPQAPDTPQAPDTPHVPESPKAPEAPRVPESPKTPEAPHVPESPKAPEAPRVPESPKTPEAPHVPESPKTPEAPKIPEPPKTPDVPKLPDAPKLPDGLNKVGQAVFTSTDGNTKVTVVFDKPTDADKLHLKEVTTKELA

SEQ ID NO: 3882 - protein, 510 aa, Candida albicans SC5314
MGRATIKSGSINLLNTIIGAGILAMPYGLKNNGLLFGCILIIWSSLTSSMGLYLQNKVAKYTGQRGSVSYFSLSQLTYPNLSILFDSAISIKCFGVGVSYLVVIGDLMPKIVESLVGGGNINSDSLLMARNFWITIFMIVIVTPLSYLKKLDSLKYTSILALFSVGYLICLVVAHYFTTPTTSPSGGGGGDDDDIVYHYIGPISLKSTLSSFPIFVFAYTCHQNMFAIINELKPSDTDGSQTRQSNLIIRNAISIACLSYLIVGIFGYLTFGNSVNANIITMYPHNSISSLIGRLCIVVMVSLSFPLQCHPCRGSINHVIHFCTHGVQQSKFRSTTTNNNYNNGDQHGYTSLSSDIESLQSIGGNDTTAGSIGSIGGGDSVVGDADESFISTTPVEGAQDTDGHDPIIVPMTTKKFYIITTVIVVLSYLVAISVTSLAHVLAFVGSTGSTSISFILPGLFGYLLIKPIEGNTSLNNLEKFCKYGGLFLAIWGILVMIVCLSATIFLGATH

SEQ ID NO: 3883 - protein, 513 aa, Zea mays
MGNCCPGSSSSAEPAPPQPPDPSGSSRPVASPASVSPTAAPAPARPPAPIGPVLGRPMEDVSTIYTVGKELGRGQFGVTTLCTHKATGHRFACKTIAKRKLSTKEDVEDVRREVQIMYHLSGQPGVVELKGAYEDKGSVHLVMELCAGGELFDRIIARGHYTERAAASLLRTIVEIVHTCHSMGVIHRDLKPENFLLLSKDEDAPLKATDFGLSVFRDIVGSAYYIAPEVLKRSYGPEADIWSIGVIVYILLSGVPPFWAESEHGIFNSILRGQVDFTSDPWPRISPSAKDLVRKMLTPDPKKRISAYDVLNHPWIKEDGEAPDTPLDNAVLGRLKQFRAMNQFKKAALRVIAGCLSEEEIRGLKEMFKSMDSDSSGTITVDELRRGLANKGTKLSEAEVQQLMEAADADGNGTIDYEEFITATMHMNRMDRDEHLYTAFQYFDKDNSGYITMEELEQALREKGLLDGRDIKEIVAEVDADNDGRINYTEFAAMMRKGDPEPSNPKKRRDIVL

SEQ ID NO: 3884 - protein, 201 aa, Streptococcus agalactiae
AIKQQTIFDIDNAKTEVEIDNLVHDAFSKMNATVAKFQKGLETNTPETPDTPKIPELPQAPDTPQAPDTPHVPESPKAPEAPRVPESPKTPEAPHVPESPKAPEAPRVPESPKTPEAPHVPESPKTPEAPKIPEPPKTPDVPKLPDVPKLPDAPKLPDGLNKVGQAVFTSTDGNTKVTVVFDKPTDADKLHLKEVTTKELA

SEQ ID NO: 3885 - protein, 482 aa, Oryza sativa (japonica cultivar-group)
MQKEALAMVSSDVNFPKGHFPDYKIGPNNQIIDPEEIHEAVPLKEIVAKETAQLLEQRRRLSVRDLKEKFEKGLSGASKLSEEAKRREAASLDRQVLLKKLRDVLDTLKGRVAGRNRDDADEAISLVEALAVQLTQREGELIYEKAEVKKLASFLKQATEDARKVAEEERALALAEIEKARTAIAIVEKGLQEHDAASSSREKEEIEGLRKEVREARRIKMLHQPSKVMDMEFELKALRTLIAEKNQLCNQLMKELAMIKRLEEDSSDLYDLEGSDILGSQFCIIPRFDDAPDISSCPTQWYRVISGGNRNLILGATKPTYAPEPFDVGRLLQAEIVLNAEKVTIQTMGPINPAAGLEHYVESLMKRADVEFNVVVTQMNGNDYSSNSVHAFHIGKMRIKLRKGWSTKARESYSTTMKLCGSRGGGNAAATAVFWQARKGLSYTLAFETDRDRNAAIMLARKFASNCNITLTGPGDEVHAGS

SEQ ID NO: 3886 - protein, 230 aa, Saccharum hybrid cultivar CP65-357
MAAPRRLSSCCLLFAVLLGAVLATATAFFDEAAAAGVGLGHGARFARKHGRAAAELPQPEPQPKPEPKPEPQPQPEPLPKPEPQPKPTPKPEPKPKPEPVPKPKPEPKPEPEPKPHPKPEPKPEPEPKPEPKPEPKPEPKPEPKPEPLPKPEPQPEPKPEPKPEPVPKPEPKPEPKPEPKPEPKPEPKPEPLPKPEPEPKPEPKPEPLPKPEPKPEPKPEPKPEPLPKPE

SEQ ID NO: 3887 - protein, 198 aa, Picea mariana
MSTCKFIKCVTVGDGAVGKTCMLISYTSNTFPTDYVPTVFDNFSANVVVDGNTVNLGLWDTAGQEDYNRLRPLSYRGADVFILAFSLISKASYENIMKKWLLELRHFAPGVPIVLVGTKLDLRDDKQFFTDHPSAVPITTAQGEELKKQIGAAAYIECSSKTQQNIKAVFDSAIRVVLQPPKVKRKKKRKSHKTCSIL

SEQ ID NO: 3888 - protein, 250 aa, Manihot esculenta
MPKNYPKVSEEYQKAIDKARRKLRGFIAEKGCAPLMLRIAWHSAGTYDVKTNTGGPFGTMRHAAEQGHAANNGLDIAVRLLEPIKEQFPILSYADFYQLAGVVAVEITGGPDIPFHPGREDKPEPPPEGRLPNATKGADHLREVFGKTMGLTDKDIVVLSGGHTLGRCHKERSGFEGPWTPNPLIFDNSFFQVLLDEPTEDLLQLPTDSVLVTDPVFRPYVEKYAADEEAFFADYAESHMKLSELGFAEA

SEQ ID NO: 3889 - protein, 112 aa, Bartonella washoensis
ANEACLKMLQEIGSVKRIPEFIARAKDKNDPFRLMGFGHRVYKNYDPRAKIMQQTCHEVLKELNIQDDPLLDIAIELENIALNDEYFVEKRLYPNVDFYSGITLKALGFPTE

SEQ ID NO: 3890 - protein, 440 aa, Bordetella pertussis Tohama I
MSNRETEIRNLQKDWAENTRWQGIKRAYSAEDVIRLRGSVAVEHSLARRGATRLWDSLHSEPFVNSLGALTGNQAMQQVKAGLKAIYLSGWQVAGDANLAGEMYPDQSLYPANSVPQVVRRINNALARCDQIQWMEGKNPGDQDYIDYYAPIVADAEAGFGGVLNAFELMKAMIEAGAAGVHFEDQLASVKKCGHMGGKVLVPTREAVSKLVSARLVADVMGTPTILLARTDADAADLVTSDVDENDRPFITGERTVEGFFRTRAGLDQAISRGLAYAPYADLIWCETSTPNLEYARKFAEAVHRQFPGKLLAYNCSPSFNWKKNLDDGTIAKFQRELGAMGYKFQFITLAGFHALNYGMFELAHGYARRQMSAFVELQQKEFAAAELGFTAVKHQREVGTGYFDAVTQTIEGGQSSTTALTGSTEEVQFEQGGQAVKAA

SEQ ID NO: 3891 - protein, 389 aa, Escherichia coli CFT073
MSDTTILQNSTHVIKPKKSVALSGVPAGNTALCTVGKSGNDLHYRGYDILDLAEHCEFEEVAHLLIHGKLPTRDELAAYKTKLKALRGLPANVRTVLEALPAASHPMDVMRTGVSALGCTLPEKEGHTVSGARDIADKLLASLSSILLYWYHYSHNGERIQPETDDDSIGGHFLHLLHGEKPSQSWEKAMHISLVLYAEHEFNASTFTSRVIAGTGSDMYSAIIGAIGALRGPKHGGANEVSLEIQQRYETPGEAEADIRKRVENKEVVIGFGHPVYTIADPRHQVIKRVAKQLSQEGGSLKMYNIADRLETVMWESKKMFPNLDWFSAVSYNMMGVPTEMFTPLFVIARVTGWAAHIIEQRQDNKIIRPSANYVGPEDRQFVALDKRQ

SEQ ID NO: 3892 - protein, 67 aa, Triticum aestivum
MDNRSGMPQNSIQHQPAEEVIDEVVKEAINKPWLPLPLGLKPPSTDSVLAELSRQGISTIPPRNQRL

SEQ ID NO: 3893 - protein, 329 aa, Chlamydophila pneumoniae AR39
MPMSNQFDQLKKLSTIVCDSGDPELVKASGSQDATTNPSLILKVAQEPKFQELLNEAVVWGIRQNGDDLQTLSFILDKIQVNFALEIIKNIPGRISLEIDARLSFNVEAMVQRAVFLSQLFEAMGGDKKRLLVKIPGTWEGIRAVEFLEAKGIACNVTLIFNLVQAIAAAKAKATLISPFVGRIYDWWIAAYGDEGYSIDADPGVASVSNIYAYYKKFGIPTQIMAASFRTKEQVLALAGCDLLTISPKLLDELKKSQHPVKKELDPAEAKKLDVQPIELTESFFRFLMNEDAMATEKLAEGIRIFAGDTQILETAITEFIKQIAAEGA

SEQ ID NO: 3894 - protein, 420 aa, Oryza sativa
MYGRMPKKSNNTKYYEVLGVSKTATQDELKKAYRKAAIKNHPDKGGDPEKFKELAQAYEVLNDPEKREIYDQYGEDALKEGMGGGSSSDFHSPFDLFEQIFQNRGGFGGRGHRQKRGEDVVHTMKVSLEDLYNGTTKKLSLSRNALCTKCKGKGSKSGAAATCHGCHGAGMRTITRQIGLGMIQQMNTVCPECRGSGEMISDKDKCPSCKGNKVVQQKKVLEVHVEKGMQHGQKIVFQGEADEAPDTVTGDIVFVLQLKDHPKFKRKFDDLFTEHTISLTEALCGFQFVLTHLDGRQLLIKSNPGEVIKPGQHKAINDEGMPQHGRPFMKGRLFVEFNVEFPEPGALTPGQCRSLEKILPPRPRNQLSDMELDQCEETTMHDVNIEEEMRRRQQHRRQEAYDEDDDEDAGAGPRVQCAQQ

SEQ ID NO: 3895 - protein, 495 aa, Pseudomonas aeruginosa PAO1
MSIAIDPSVSAFLRSPHGLLIDGESGPARSGADMPLYDPATGAELARVARAGAEDVDRAVAAARRAFEGNWAGQRPADRERLLLRLAERIEAHGEQLAQLETLNNGKSINLSRALEVGASVEFIRYMAGWATKIEGRSLDLSIAAVPGARYRAYTVPEPVGVVGAIVPWNFPLLMAIWKIVPALACGCTVVLKPADETPLTALRLGQLCLEAGIPPGVVNIVTGTGAEAGAALAAHPGIDKLAFTGSTPVGKLIGHAAVENMTRFSLELGGKSPVIILDDTSLDMAAAGSAGAIFFNQGQVCTAGSRLYVQRKRFDQVLERLAAIAGDLSIGPGLDPTTQINPLVSARQQERVLGMIESGVAEGASVVCGGARQGETGFYVQPTILADVTPGMQVVREEIFGPVLVATPFDDLDEAVRLANDSIYGLGASIWSNDLRQVMDLVPRIKAGTVWVNAHNLLDPSMPFGGFKQSGIGREMGHAAIEAYTENKSVCIAY

SEQ ID NO: 3896 - protein, 511 aa, Zea mays
  misc_feature (55)..(55): Xaa can be any naturally occurring amino acid
  misc_feature (66)..(66): Xaa can be any naturally occurring amino acid
  misc_feature (108)..(108): Xaa can be any naturally occurring amino acid
  misc_feature (177)..(177): Xaa can be any naturally occurring amino acid
  misc_feature (431)..(431): Xaa can be any naturally occurring amino acid
  misc_feature (500)..(500): Xaa can be any naturally occurring amino acid
MMASQAMVPLRQLFVDGEWRPLALGRRLPVVNPTTEAHIGEIPAGTTEDVDPAVXASSRAALKRNXRGRDWARAPGAVRARDLRAIVAKGIERKQELAKLEALDCGKXYDEAAWDMDDVAGCFEYFADQAEALDKRQNSPVSLPMETFKCHLRREPIGVVGLITPWNYPLLMATWKXVAPALAAGCTAVLKPSELASVTCLELADICKEVGLPSGVLNIVTGLGPDAGAPLSAHPDVDKVAFTGSIETGKKIMASAAPMVKPVTLELGGKSPIVVFDDVDIDKAVEWTLFGCFWTNGQICSATSRLLIHTKIAKKFNERMVAWAKNIKVSDPLEEGCRLGPVVSEGQYEKIKKFISNAKSQGATILTGGVRPAHLEKGFFIEPTIITDITTSMEIWREEVFGPVLCVKEFSTEDEAIELANDTQYGLAGAXVISGDRERCQRLSEEIDAGCIWVNCSQPCFCQAPWGGNKRSGFGRELGEGGIDNYLSVKQVTEYISDEXPWGWYQSPSKL

SEQ ID NO: 3897 - protein, 122 aa, Rickettsia australis
AHGGANEAVINMLKEIGSSENIPKFIAKVKDKNDPFRLMGFGHRVYKNYDPRAAALKETCKAVLKELGQLENNPLLQIAIELEAIALKDEYFIERKLYPNVDSHSGIIYKAMGIPSQMSTVL

SEQ ID NO: 3898 - protein, 172 aa, Escherichia coli
DAAVEKAYKGERKISWMEIYTGEKSTQVYGQDVWLPAETLDLIREYRVAIKGPLTTPVGGGIRSLNVALRQELDLYICLRPVRYYQGTPSPVKHPELTDMVIFRENSEDIYAGIEWKADSADAEKVIKFLREEMGVKKIRFPEHCGIGIKPCSEEGTKRLVRAAIEYAIAND

SEQ ID NO: 3899 - protein, 183 aa, Triticum aestivum
  misc_feature (130)..(130): Xaa can be any naturally occurring amino acid
MAPTVMASSATSVAPFQGLKSTAGLPVSRRSNGASLGSVSNGGRIRCMQVWPIEGIKKFETLSYLPPLSTEALLKQVDYLIRSKWVPCLEFSKVGFIFREHNASPGYYDGRYWTMWKLPMFGCTDATQVXKQVEEVKERITLTPNVRINRIHNIVSACVSSSPARAQDRKAKQYSHRHLMVCL

SEQ ID NO: 3900 - protein, 409 aa, Triticum aestivum
  misc_feature (110)..(110): Xaa can be any naturally occurring amino acid
  misc_feature (128)..(128): Xaa can be any naturally occurring amino acid
  misc_feature (149)..(149): Xaa can be any naturally occurring amino acid
  misc_feature (200)..(200): Xaa can be any naturally occurring amino acid
  misc_feature (233)..(233): Xaa can be any naturally occurring amino acid
  misc_feature (263)..(263): Xaa can be any naturally occurring amino acid
  misc_feature (284)..(284): Xaa can be any naturally occurring amino acid
  misc_feature (326)..(326): Xaa can be any naturally occurring amino acid
  misc_feature (349)..(349): Xaa can be any naturally occurring amino acid
MVLESTMICIDNSEWMRNGDYSPSRFQAQADAVNLICGAKTQSNPENTVGVMTMAGKGVRVLVTPTSDLGKILACMHGLEVGPDANLPAAIQVAQKLALQHRQNERPQLXNYVFIGSPGTYDRKSGTXEAAEDRMKLGALDVPLGDLIXGESDDQAPEKLEALIAAVNSSDSSHIVHVPPGDHALSDVLISHSYLYWRRXGGSGFAASAAAAAATGATGYDFGVDPNVDPELXLALRLSMEEERARQEAIAKKAAEDNQGSGXSSSTDAIMAEAELTLNAPADXNADLLKDDDDAQLLQQALAMSMDEGASGAAAVADAAMAEAAXDDQDWALALQMSVQDAEAGWSIXYEAKVFEDSAFVTSILNSLPGVDPNDPSVKDLLASLHGQGEQEEKKDTEDKPDKPEDGKN

SEQ ID NO: 3901 - protein, 481 aa, Salmonella typhimurium LT2
MTIWENAMQYQLLINGVLVDGEGERQSVYNPATGEVILEIAEASPAQVDAAVQAADNAFAEWGQTTPKARAECLLKLADSIEQNALEFARLESQNCGKPLHCVINDEIPAIVDVFRFFAGAARCLSGLAAGEYLEGHTSMIRRDPIGVVASIAPWNYPLMMAAWKLAPALAAGNCVVIKPSEITPLTALKLAVLAKDIFPPGVLNVLFGRGQTVGDVLTGHEKVRMVSLTGSIATGEHILRHTAPAIKRTHMELGGKAPVIVFDDADLDAVAQGVRTFGFYNAGQDCTAACRIYAQRGIYDALVEKLGNAVSSLKMGAPEDESTELGPLSSLAHLKRVTAAVEEAKALSHIRVITGGSQTEGKGYYFAPTLLADAKQEDAIVQREVFGPVVSITVFDDEDQVLRWANDSRYGLASSVWTQDVGRAHRLSARLQYGCTWINTHFMLVSEMPHGGQKQSGYGKDMSLYGLEDYTLVRHIMVKH

SEQ ID NO: 3902 - protein, 203 aa, Pyrococcus horikoshii
MAHGPRYRVPFRRRREGKTNYRKRLKLLKSGKPRLVVRKSLNHHIAQIIVYDPKGDRTLVSAHTRELIRDFGWKGHCGNTPSAYLLGLLIGYKAKKAGIEEAILDIGLHPPVRGSSIFAVLKGAIDAGLNVPHSPEIFPEDYRIRGEHIAEYARMLKEQDEDRFRRQFGGYLEKGLDPEKLPEHFEEVKARIIEKFESEGARE

SEQ ID NO: 3903 - protein, 343 aa, Vibrio vulnificus CMCP6
MKIKALSKLKPEEGIWMTEVDKPVLGHNDLLIKIKKTAICGTDVHIYNWDEWSQKTIPVPMVVGHEYVGEVVGIGQEVRGFEIGDRVSGEGHITCGHCRNCRGGRTHLCRNTIGVGVNRTGCFSEYLVIPAFNAFKIPANISDDLASIFDPFGNAVHTALSFDLVGEDVLITGAGPIGIMAAAVAKHVGARHVVITDVNEYRLDLARKMGVTRAVNVAEQKLDDVMAELGMTEGFDVGLEMSGNPSAFNSMLKTMNHGGRIALLGIPPSDMGIDWNQVIFKGLVIKGIYGREMFETWYKMASLIQSGLDLTPIITHHFKVDDFQQGFDIMRSGMSGKVILDWE

SEQ ID NO: 3904 - protein, 284 aa, Picea mariana
KKAAGSSYQSESFGGRAIKSLARSINGNVCVKTGGLMQSDICRLRAVAEDGGLGVGEEEEGNDFPPDSQQPRILSVLSYALRRLVTRNDQFTPKNFVTVFHGVRTPGISIAKYLERVYKYTSCSPSCFVVAYIYIDRLVHRQPNFPVISLNIHRLLLTSLMIAAKMLDDAHYNNAFYARVGGVSIAELNRLEVDFLFRLDFRLKVTASVFESYCLHLEKEMLCGASGQRIDRTLPGFHRSTDVVSSDLDIVIREESKVQVSVRCPRCSPATTMVVGDHPDPPGR

SEQ ID NO: 3905 - protein, 534 aa, Glycine max
  misc_feature (146)..(147): Xaa can be any naturally occurring amino acid
  misc_feature (157)..(157): Xaa can be any naturally occurring amino acid
  misc_feature (200)..(200): Xaa can be any naturally occurring amino acid
MVSPISHLPLIIVLLLSFSLANSASLQESFVQCLNLNSDRTFPFYSSIYTPSNPSFTSILDSSAQNLRLLVPSAPKPEFIFTPSRDSHVQAAVICSKKLGIHIRVRSGGHDYEGISYVSEIETPFIVVDLVKLRGINVDVKSNTAXXVQAGATTGEXVYYRIYEKSSVHGFPAGLCTSLGIGGHITGGAYGTMMRKYGLXGVDNVLDAQIVDANGRVLDREAMGEDLFWAIRGGGGGSFGILLWWKITKTMVPPTVTVFTVTKTLEQGATKILHKWQEVAPYIDENLFIRVIIQPSSDARNKTQRTIATSYNALFLGGARTLLQVMKTSFPELGLTIKDCLETSWIKSVLYIAGFPSDTPPEVLLKGKSTFKNFFKAKSDFVREPIPETGLEGLWQRLLVEDSPLMIWNPYGGRMSQFSESETPFPHRNGTLYKIQYLSLWQEGDKNAAKHIDWIRKLYNYMGPYVSSLPREAYVNYRDLDLGINTKNSTSYIQASAWGYRYYKNNFDRLVKIKTKVDPENVFRHEQSIPPLPL

SEQ ID NO: 3906 - protein, 254 aa, Arabidopsis thaliana
MENEREKQVYLAKLSEQTERYDEMVEAMKKVAQLDVELTVEERNLVSVGYKNVIGARRASWRILSSIEQKEESKGNDENVKRLKNYRKRVEDELAKVCNDILSVIDKHLIPSSNAVESTVFFYKMKGDYYRYLAEFSSGAERKEAADQSLEAYKAAVAAAENGLAPTHPVRLGLALNFSVFYYEILNSPESACQLAKQAFDDAIAELDSLNEESYKDSTLIMQLLRDNLTLWTSDLNEEGDERTKGADEPQDEN

SEQ ID NO: 3907 - protein, 348 aa, Schizosaccharomyces pombe
MTDLDLDWQLEELENGRLIPESNVVELCQRVRDILIEESNIQWISSPVTICGDIHGQLHDLLELFRIGGSCPGTKYLFLGDFVDRGFYSVETFLLLLTLKCKYPKEMTLIRGNHESRQITQVYGFYDECVRKYGSANVWRYCCEIFDYLSLGALVDGKVFCVHGGLSPSISSIDQIRLLDRKQEVPHEGAMCDLLWSDPEDISGWGLSPRGAGFLFGADVSEVFNRANDLSFIARAHQLVMEGYKIHFSDKDKQYPKFTNEEDSELDSDSASPVDDSPAPGDIITIPEKDKGSVVTVWSAPNYCYRCGNVASILQLDENQTQSFKIFGTASQERSGIPTKRPIADYFL

SEQ ID NO: 3908 - protein, 203 aa, Pyrococcus abyssi GE5
MAHGPRYRVPFRRRREGKTNYRKRLKLLKSGKPRLVVRKSLNHHIAQIIVYDPKGDRTLVSAHTRELIRDFGWKGHCGNTPSAYLLGLLIGYKAKKAGIEEAILDIGLHPPVRGSSVFAVLKGAVDAGLNVPHSPEIFPEDYRIRGEHIAEYARMLKEQDEEKFRRQFGGYLEKGLDPEKLPEHFDEVKARIIEKFESEGARE

SEQ ID NO: 3909 - protein, 359 aa, Arabidopsis thaliana
MEGDVGIGLVCQNTMDGKASNGNGLEKTVPSCCLKAMACVPEDDAKCHSTVVSGWFSEPHPRSGKKGGKAVYFNNPMWPGEAHSLKVEKVLFKDKSDFQEVLVFESATYGKVLVLDGIVQLTEKDECAYQEMIAHLPLCSISSPKNVLVVGGGDGGVLREISRHSSVEVIDICEIDKMVIDVSKKFFPELAVGFDDPRVQLHIGDAAEFLRKSPEGKYDAIIVDSSDPVGPALALVEKPFFETLARALKPGGVLCNMAESMWLHTHLIEDMISICRQTFKSVHYAWSSVPTYPSGVIGFVLCSTEGPAVDFKNPINPIEKLDGAMTHKRELKFYNSDMHRAAFALPTFLRREVASLLAS

SEQ ID NO: 3910 - protein, 122 aa, Zea mays
  misc_feature (42)..(42): Xaa can be any naturally occurring amino acid
  misc_feature (79)..(79): Xaa can be any naturally occurring amino acid
MAGCCVFLRWPSASPSRIGYRSLVDAAADDDAAAPPSTVTVXGKERRAFAVDRLVLDSYPLRLLLETAARREERRAGGXAIFVDVDAILFEHILWLACDARSVSQILHLDLKEIIDFYAQDA

SEQ ID NO: 3911 - protein, 315 aa, Pinus pinaster
LYEMIFSAVKPLALKAAVLLNLPDIIATRGNGGPLSAEQIAFHIAAANSSSTGNSHVDVGYLYRILRFLASYGVFAEQEEADQPDDAETKKIKFGLTGISKLLVHGGNGQSRGPVLLLIANNVLLEAFQHLHESVLEGCYTFNKAHGMDLWEYLANNLEFNKIFNEAMATNTRSVMASVAKMYEDGFKSMATLVDVGGGMGSALSIIVKEHSHIRGINLDLPHVIATASITGVEHMEGNMFEHIPSADAVMMKWILHDWADEECVNCREEATTQRSEGKVLVVSSCCGDKSEACRAIGLLYDISMMVTHWWKNER

SEQ ID NO: 3912 - protein, 380 aa, Azotobacter vinelandii
MSTASCESKITYIDGDKGILLHRGYPIEQLAEKSDYLETCYLLLNGELPNADQKAKFVNNIKNHTMVHEQLKNFLNGFRRDAHPMAVMCGVVGALSAFYHDSLDINDPQHREISAIRLVAKMPTLAAMVYKYSLGQPLMYPRNDLDYAENFLHMMFNTPCEVKPISPVLAKAMDRIFVLHADHEQNASTSTVRLAGSSGANPFACIAAGIAALWGPAHGGANEAVLTMLDEIGDVSNIEKFVAKAKDKNDPFKLMGFGHRVYKNFDPRAKVMKQTCDEVLSELGINDPQLELAMKLEEIARNDPYFKERNLYPNVDFYSGIILKAIGIPTSMFTVIFALARTVGWISHWKEMLSGPYKIGRPRQLYTGYEKRDYISVEKR

SEQ ID NO: 3913 - protein, 508 aa, Ralstonia solanacearum
MTLDVTRQDPRYDTLRHGFNLRWPSSDAQAAGRIALCEKTDEVAPALQRIIDTGMRPTVRSGGHCYEDFVSNNPGGVIVDLSLLNAPEVRADGAVRVPAGMQNWNGALELYKRHGVTLPGGSCYSVGAGGHISGGGYGLLSRLQGLTVDWLSAVDIVTVDKQGRAAPRTVDAARDPDLFRACRGAGGGNFGIITSYTFARLPEAPREVALATVAFDWAAMTPERFAELLRLYGDYWATRGKDPDTWGLFSLLKLTHKSAGQIVMLTQFCNPDGTCRDLSVLNDFLARFQVCAPVPARARPPGYGPAHRQGVGQLLCSKPHTVVQYDWLTATQSLNGSGPNQRGKYKSAYMKRGFTAREAQRIYTHLTRTVQGIDLSQSLLQVDSYGGAVNKAERIADTAVPQRASVMKLQYQTYWTSAADDAGHLRWIGDFYRDVYGTPDVSAPHAGTPYPGDRYEGCYINYPDVDMLAYPFWPQLYYGDGDLYAFLQRVKRRYDPNNIFHHAMSVRP

SEQ ID NO: 3914 - protein, 291 aa, Bordetella pertussis Tohama I
MTARDPLAAIRARLAEVTACWQAAESLAQIRASFADYLAEVGPRGAAMARPRPQPLAPALAGAWIGQGARRALYCHGGGFQIGGIASHASLIARLAEAGQARILAVEYRLAPEHRYPAAIDDAFAAYQWLLANGGAPAAIIGDSAGGALALQTAQRARDAGLPLPRSLVLLSPWLDLSMQGRSYVELAEQDIFSKPAQLRAMARSYLGHLGPPPASPLWDDLSGLPPIVVHAGAHDITLDDSHTLAARVRAAGGQVQLQVFPGMCHHFQIYEALAEAQESIDALGRHLRQD

SEQ ID NO: 3915 - protein, 191 aa, Nicotiana tabacum
MTFAGTTQKCSACEKTVYLVDRLAADNRIYHKACFRCYHCKSTLKLSNFNSFEGVIYCRPHFDQLFKRTGSLDKSFEGTPKVTKPEKPVDNENGSGTKVSSLFAGTREKCVGCTKTVYPIEKVSVNGTAYHKACFKCSHGGCTISPSNYIAHEGRLYCKHHHIQLFKEKGNYSQLESDHETDPALSTQSLT

SEQ ID NO: 3916 - protein, 486 aa, Burkholderia cepacia R18194
MTNRTIELKHPRAFYIGGQWVAPSTPDTFDVLDCATEEVVATVAKAASADMQRAIDAARDAFDNGPWPRMTPQERAGYLEKFAERLEALNDEFARIWTIETGIVYKVAQPRIGLFISGAFRQYAAMAATFPFVEEQRSVTGNLGYRVYEPVGVVGEIIPWNGPAGLMAYKTAPALLAGCTLVIKSSPEAPCSAYLFAEICDEIGLPPGVVNVVTADRDVSEELVRHPGVDKITFTGSTGAGRRIASIAGDRIARVTLELGGKSPAVILDDYDIETAANVLGPSYFGYNTGQICHSLTRVIVPRAKHDAMVEALSAIAKQIVVGDPFAPETTSGPLASARQRETVERFVATGIAEGATLATGGKRPAGLARGFFFEPTVFGNVDNRSTIAQDEIFGPVLSVIPADDEASAIRMANDTPFGLNAAVFTNDRARALHVARQIRSGTVGHNGPRTDFSIGFGGFKQSGIGREGGVEGLTAFMESKTIVMA

SEQ ID NO: 3917 - protein, 188 aa, Helianthus annuus
MAFAGTTQKCMACDKTVYLVDKLTADNRVFHKACFRCHHCNGTLKLSNYNSFEGVLYCRPHFDQLFKKTGSLDKSFEGTPKIVKQPKTIDGEKPMANKVSSMFVGTKDKCLGCKNTVYPTEKVSVNGTAYHKSCFKCSHGGCTISPSNYIAHEGHLYCRHHHTQLIKEKGNLSQLEGERSARVGETAP

SEQ ID NO: 3918 - protein, 358 aa, Glycine max
  misc_feature (314)..(315): Xaa can be any naturally occurring amino acid
  misc_feature (334)..(335): Xaa can be any naturally occurring amino acid
  misc_feature (343)..(343): Xaa can be any naturally occurring amino acid
  misc_feature (346)..(346): Xaa can be any naturally occurring amino acid
  misc_feature (348)..(348): Xaa can be any naturally occurring amino acid
MSSNSDAAAATVHAHGRLAMLAAHLLPSQLTDHGALHPLHLSSQLPPTPNLAGSLTVVDERTGKKYQLQVSKEGTVKASEFKKILTGKNDKGLKLYDPGYLNTAPVRSTISYIDGDEGILRYRGYPIEELADKSTFTEVSYLIMYGSLPSESQLAEWEFAISQHSAVPQGVLDMIQSMPHDAHPMGVLVNAMSALSVFHPDANPALRGLDIYDSKQIRDKQITRVIGKITTIAAAVYLRMAGRPPVLPSNHLSYTENFLYMLDSFGNRSYKPNPRLTRVLDIIFILHAEHEMNCSTSAVRHLASSGVDVYTAIXXAVGALYGPLHGGANEAVLXXLSEIGTVXDIXRXIESVKARKRK

SEQ ID NO: 3919 - protein, 181 aa, Nicotiana tabacum
MTFAGTTQKCSACEKTVYLVDRLAADNRIYHKACFRCYHCKSTLKLSNFNSFEGVIYCRPHFDQLFKRTGSLDKSFDGTPKVTKPEKSVENENGSGSKVSSLFAGTREKCVGCTKTVYPIEKVSVNGTAYHKGCFKCSHGGCTISPSNYIAHEGRLYCKHHHIQLFKEKGNYSQLESDHET

SEQ ID NO: 3920 - protein, 448 aa, Borrelia burgdorferi B31
MVYRIKNENLDFKIDSLGECKQNNPLIDFYASEGSSHFVNEKNKIKFSVYRNEDKGDRYEDVLLEKAGPREKIYFVPRHVKAAITTCGGLCPGFNDVIRSIVRTLWKIYGVRNIYGVKFGYQGLLPESNSPFINLNPDVVDDINKFGGTILGSSRGGIKPVEIVDTLERMNINMIFNIGGDGTQKGSLLIAEEIEKRNLKIAVVGIPKTVDNDFMFVQKSFGFETAVEQAVAAVAGAHFEANSAYNGIGLVKVMGRDSGFIAAHTALSSNDVNFCLIPELDFDIEGPNGFLVHLERRLLEKESLEEIPHAVILIAEGAGQKYFDHFPKKKDDSGNLLYEDIGLYIKDKITEYFKAKNIQFTLKYIDPSYIIRSSPANASDSLYCARLGSNAVHAAMAGKTKMLISLWSTKFVHIPIKMAVIDRNKVNPNGSFWRDVLSSTGQPISMKN

SEQ ID NO: 3921 - protein, 302 aa, Glycine max; identical to SEQ ID NO: 264

SEQ ID NO: 3922 - protein, 417 aa, Pseudomonas stutzeri
MDSTALIPVQYGLDTFYFVICGALVMWMAAGFAMLEAGLVRAKNTAEILTKNIVLYALASIMYLLVGYYIMYSSPEGGIFPSLGFLIGDEHAVDLVAAGGEDAPYYSARADFFFQIVFAATCMSVVSGAVAERMKLWAFIAFAVVMTGFIYPIQGFWKWGGGFLDAAGFLDFAGSGVVHMAGAAAALAGVLLLGARKGKYGPNGQINAIPGANMPLATLGAFILWMGWFGFNGGSQLKMSTIEDANAVAQVFVNTNMGAAGGLIAALITARLLFGKSDLTMVLNGALAGLVAITAEPLTPSALQATLIGGVGGVLVVFSILGLDKLKLDDPVGAISVHGVAGMWGLLAVTADQCRRFFRQSSCLGLVSIFLWVFFASLIVWGIIKAVMGLRVSEEEEYEGVDVVECGLEAYPEFTRQ

SEQ ID NO: 3923 - protein, 185 aa, Zea mays
WGASIPRRSGNTLATRTPCTSPPRPPEEFQLALFKNQRKEYLFANRIFDLFDVKKRGAIDFGDFVRALNVFHPNIPMDEKIDFSFKLYDMDSTGFIERKEVKQMLIALLGESEMRLSDDIIETILDKTFSDADANQDGKIDRTEWENFVTRNPSLMKIMTLPYLKDITTTFPSFVFNSEVDDLVT

SEQ ID NO: 3924 - protein, 477 aa, Neisseria meningitidis Z2491
MNEYSQLIKHPDISLSPISDGIGVGNPATGEILAYVRNTGSDKLKNLIQKAAAAQKLWAAKTALERADILWRWYFLVKENKEALARLMTMEQGKSLTESRGEIDYAASFVRWFAEEARRIDGDVLTSVKASQKLIVLKQPVGVTAAITPWNFPSAMIARKAAPALAVGCAMIVKPASLTPLSAYALVVLAYEAGVPQDLLPVVSGRASEIGREFATNPIIRKISFTGSTEVGAKIFADSAADIKKLSLELGGNAPFIVFDDADLDKAVEGALASKFRNSGQTCVCTNRVYAQSGIYDAFCRKLSEKAAALKLGNGLEDGVNQGPLIEEKAVEKVEQHIADALSKGAVCLTGGKRSALGGTFFEPTVLSGVTAQMAVAREETFGPLCPVFRFETEAEVIEAANNTEYGLAAYLFTADTARQWRVGEALEYGMVGINTGLISNEAAPFGGVKRSGLGREGSKYGADEYLELKYLCMDVG

SEQ ID NO: 3925 - protein, 162 aa, Triticum aestivum
MEGRMFGLETPLMTALQHLLDVPDGESGGAGNAGGEKQGPTRAYVRDARAMAATPADVKELPGAYAFVVDMPGLGSGDIKVQVEDERVLVISGERRREEKEDAKYLRMERRMGKLMRKFVLPENADMEKISAVCRDGVLTVSVEKLPPPEPKKPKTIQVQVA

SEQ ID NO: 3926 - protein, 315 aa, Glycine max
  misc_feature (63)..(63): Xaa can be any naturally occurring amino acid
  misc_feature (193)..(193): Xaa can be any naturally occurring amino acid
NHYPKFLSLSIHLSIAHFHANGPHTKPSHSKDSSEVSGSAAEQRRWTLNDFDIGKPLGRGKFXHVYLAREKTSNHIVALKVLFKSQLQQSQVVHQLRREVEIQSHLRHPHILRLYGYFYDQKRVYLILEYAPKGELYKELQKCKYFSERRAATYVASLARALIYCHGKHVIHRDIKPENLLIGAQSQLKIADXFGWSVHTFNRRRTMCGTLDYLPPEMVESVEHDASVDIWSLGVLCYEFLYGVPPFEAKEHSDTYRRIIQVDLKFPPKPIVSSAAKDLISQMLVKDSSQRLPLHKLLEHPWIVQNAEPSGVYRS

SEQ ID NO: 3927 - protein, 435 aa, Ralstonia eutropha JMP134
MDAAKAAFPAWSRATSQERFDILRKASDEIIARKEELGRLLSREEGKTLAEGIGEVARAGQIFAFAAGECLRAGGEAIPSVRAGVGVEITREPVGIVGMITPWNFPIAIPAWKIAPALAWGNCVVIKPADLVPGSAWALVDIIQRAGLPKGVLNLVMGRGSVVGQALLEHKDVHAISFTGSVATGRKVAATCIASNPMKKVQIEMGGKNPLVVLDDADLNTAVEVAVNGAFFSTGQRCTASSRLVVQAGIHDRFVEACIERLKSIVVDDALKQGTQIGPVVDQSQIDQDLRYIQIAKDEGGKLVFGGELLKRATPGFYLQPALFTETTNAMRISREEVFGPVANIVRVRDYDEALALANDTEFGLSAGICTTSLKYATHFKRSSEAGMVMVNLPTAGVDYHVPFGGRKGSSYGSREQGTYAKEHYTTIKTAYTMA

SEQ ID NO: 3928 - protein, 323 aa, Photorhabdus luminescens subsp. laumondii TTO1
MSNEIKRIGVLTSGGDAPGMNAAIRGVVRAGLTEGLEVFGIYDGYLGLYENRMKKLDRFSVSDMINRGGTFLGSARFPEFRDEKVRTVAIENMRKNGLDALVVIGGDGSYLGAKKLTEAGFPCIGLPGTIDNDVAGTDYTIGYFTALETVVEAIDRLRDTSTSHKRISIVEVMGRYCGDLTLSAAIAGGCEFIVLPEVSFSCDELVAEIKAGIDKGKRHAIVAITEHVCDVYELAKHIEKETHHETRATVLGHVQRGGSPVAYDRILASRMGAYSIQLLLEGYGGRCVGIQNEKLVHHDIIDAVQNMKRVFKQDWLETAKKLY

SEQ ID NO: 3929 - protein, 189 aa, Zea mays
FLDKEFINVAMGMDPEWKMYDKNLGRIEKWVMRKAFDDYEHPYLPKHILYRQKEQFSDGVGYNWIDGLKSFTEQQVTDEMMNNVAQMFPYNTPSTKEAYYYRMIFERLFPQDSARETVPWGPSIACSTPAAIEWVEQWKASNDPSGRFISSHDSAATDHTAVSRRWPTAAARPANGTVNGKDVPVPIAV

SEQ ID NO: 3930 - protein, 182 aa, Salmonella typhimurium LT2
MKTVFSLTAAAMMALSGGVSAASAFSLSSADIPADFRLTQQHVFKGFGCSGENISPQLSWRNPPAGTKSYAITVFDPDAPTGSGWWHWTMVNIPAQIHDLPTGADKKTLPAGVVQGRNDFGYAGFGGACPPPSDKPHRYQFTVWALNTATLPLDSESSGALVGFMLNAHVIAKAKFTATYGR

SEQ ID NO: 3931 - protein, 155 aa, Lycopersicon peruvianum
MDLRLMGIDNTPLFHTLHHMMEAVGEDSVNAPSKKYVRDAKAMAATPVDVKEYPDSYVFVVDMPGLKSGDIKVQVEEDNVLLISGERKREEEKEGVKFIRMERRVGNFMRKFSLPENANTDAISAVCQDGVLTVTVQKLPPPEPKKPKTIQVKVA

SEQ ID NO: 3932 - protein, 106 aa, Glycine max
SMIFFPAGTTVNRAGARMGGSFTGLKFMGGFPTKKNNHDLTFIGCNRGRIPCMPVWAPIGKKKFETLFYLPDLDDAPLGKEVEYLLRKGWISCVEFELEHRFVYRE

SEQ ID NO: 3933 - protein, 276 aa, Oryza sativa (japonica cultivar-group)
MASAAVAAAAAPLRRSLLPSLNPSCLFSSLASSSHRLSLPRALRPAGPLPSDVEDSDDSNAGDGAGEALRKSRNDLKREARRAVQWGMDLAKFSPLQIKRILRAASLDREVFDALMLVKRFGSDVREGKRRQFNYIGRLLRGAQPELMDTLIQYSKDGDDNRLLALMSENTFLMEDEEIEDLPCNEEEGDKEHIEIADRWFEGLLSKDISVTNEIYAIHNVEFDRQELRKLVRTVHMVQDNIENEHEEESTMKLLGAKKQLLCFLRSIAKEAYVKS

SEQ ID NO: 3934 - protein, 196 aa, Glycine max
MGERVKGTVKWFNVTKGFGFISPDDGGEDLFVHQSSIKSDGYRSLNENDAVEFEIITGDDGRTKANDVTAPGGGALSGGSRPVEGGGDRGGRGGYGGGGGGYGGGGGGYGGGGGGYGGGGGGYGGGGYGGGGGGGPCLLQVGREEGPSSPMASRGRRPPARPPPVNGYKWRLRKGHLLSGTAPQRGLGWSSGFTEI

SEQ ID NO: 3935 - protein, 117 aa, Fragaria x ananassa
MASSTAMKLSLVALLCIVVALPIAQAITCGQVASNISPCLTYVKSGGAVPAACCSGIRNLNGMAKTTADRQAACNCLKQAAGGIKGLNPNLAAGLPGKCGVSVPYKISTTTNCAAVK

SEQ ID NO: 3936 - protein, 66 aa, Glycine max
MVQFFSAVSILILVAVAASMVVLPLMLPPLPPPPLILLFFPVGIMAALMLLAFVPSEVPMATNLIL

SEQ ID NO: 3937 - protein, 470 aa, Schizosaccharomyces pombe
MVSLKKKSKRRTTRLRSRIEKKAAESKRKQKRADKKNPQWKSRIPKDPGIPNSFPYKDKILAEIEEQKRIREEEKLARRASGQVDAAMEEEDAVDENGSLMISKIAEAAQASNPDDEEEFVMEEDNLGEAPLLVDSESYEASVKADTSRKAYDKEFKKVVEASDVILYVLDARDPEGTRSKDVERQVLASSAEEKRLIFVINKIDLVPSEVLNKWVTYLRNFFPTIPMRSASGSGNSNLKHQSASASSTISNLLKSLKSYSAKKKLKSSLTVGVIGYPNVGKSSVINALVNRSANGRSAPCPAGNVAGMTTSLREVKLDNKLRLVDSPGIVFPSSDSKDDLYRLVMLNAVSSTKVDDPVAVASYILQFLSRVPGQLERMFQRYELPPLLNTSDIDTATDFLVNIARKRGRLGRGGIPNLNAAANIVINDWHAGRIEWWAEPEVINEKNSSEVQDTQIVTEWAKEFDLNDF

SEQ ID NO: 3938 - protein, 470 aa, Pirellula sp. 1
MPQITSRIGRRLGETRWMLRIWALNRNAIVFGNSSSPGSVIVAELAHHNLDIKRVAILFAGGPAPAANAVISTAAFSFLEEGAQVFGIKHGYSRLAEYTAAGPLQEGTDYIRFTHDSLTHARSSRGIMIGTARTNPGKHVSSPEHLKDPELVAPLRRVYEGLCSLEVDALISIGGDDTLKTANKLKMFQDNLPGDARRFPVVHLPKTIDNDYSGIDFTFGFFTAVETLAEEIRNLNYDAAAGRAYFLCEAMGRSAGWLAYGAAIAGEASMVLSVEDITGALADEEVVNQETGETRKIMAMDRVIDRMVDMMLAREREGRQYGTIVIAEGMAEYLPAKYLEGVTRDDHGHINISLVNLSAVMSRLLAARYNERTGRTRKVNGLQMGYESRCAPPHAYDVMLGSQLGVGAYRALVEEKLNGVMVSVSGQFDLHFVPFEELVDPQTLVTKVRFIEQNSDFHRLARFLETCVDN

SEQ ID NO: 3939 - protein, 209 aa, Zea mays
MGRGLGAAPVSPRLASLGAAALALLVAAALPSPAAGAGLNATAVLSAFPNFADFARLLASTPVASELAGRSSLTLLAVPNANLPQSPSAFVAGADIADVLRYHVLLEYLSPSDLARLPPSGKLVTTLFQTTGRAPSDFGAVNLTVGPNSTVVVRSPAPSPGSSATVLGAVTAVPYNLSVLAVGGLIVPSRIDLAASMLQASGVASEFEA

SEQ ID NO: 3940 - protein, 211 aa, Schizosaccharomyces pombe
MASNTAPKNVVTINQKLVLLGDSAVGKSSLVLRFVKDQFDDYRESTIGAAFLTQTLPIDENTSVKLEIWDTAGQERYKSLAPMYYRNANCAIVVYDITQAASLEKAKSWIKELQRQAPEGIVIALAGNKLDLAQERRAVEKADAEAYAAEANLLFFETSAKTAENVNELFTAIAKKLPLEDKLNQARGAVNRGVNLSEARPAAQPSGSCSC

SEQ ID NO: 3941 - protein, 321 aa, Pasteurella multocida subsp. multocida str. Pm70
MIKKIAVLTSGGDAPGMNAAIRGVVRSALAAGLEVYGIYEGYYGLYHNKVKQMTRYSVSDIINRGGTFLGSARFPEFKDPAVRAKCAEILRSHGIDALVVIGGDGSYMGAKLLTEEHGFPCVGIPGTIDNDVAGTDYTIGYQTALQTAVEAIDRLRDTSSSHQRISIVEIMGRHCSDLAISAGIAGGCEYIVASEVEFNREELIQQIERSIIKGKRHAIIAITELICDVNELAREIESRVKHETRATILGHIQRGGTPCAFDRILGSRMGVYAVDLLMQGKGGYCVGIQNEQLVHHDIIDAINNMRREFKADWLALSKRLD

SEQ ID NO: 3942 - protein, 320 aa, Buchnera aphidicola str. Sg (Schizaphis graminum)
MIKKIGVLTSGGDAPGMNAAIRGVVRTALSEKLEVFGIYDGYLGLYENRMTLLDRYSVSDMINRGGTFLGSARFPGFYKNEIRTIAVNNLNKRNIDALVVIGGDGSYIGAQKLTKMGIPCISIPGTIDNDVAGTDYTIGYFTALETVVEAIDRLRDTSSSHQRISIVEVMGRYCGDLTLAAAIAGGCEFIVLPEIHYKKEELVSEIQAGIEKGKKHAIVAITEYICDVEKLAKYIEKKTNRETRATILGHIQRGGAPVVYDRILASRMGAYAVELLIEGYKGKCVGIQNEKMVFNDITDALKNMKRVFKKDWLITAKKLY

SEQ ID NO: 3943 - protein, 457 aa, Bordetella parapertussis 12822
MARPLDTLLANTLVFLEGQGLVPGSIGIADGRIAVIGSHGQDMPAARETIDCQGLWTLPGVIDPHVHFGFGSPETDFETESRNAALGGTTSVISFHRSADIRESFDAVRARAESQSCIDFGFHFGITSRLHVDTLDEISRRFGVSSYKLYMMYKGAAGLSKGFTDIDDGLLWGALNATRAIPGAVLGVHCENVEVIPWLRDPLRAAGRDDLAAWNEQSPDFLEAENVHRVCYFAGKTGTPVNIVHLSSREALREVRRHRHEGRAAPIYVETCPHYLFLDDRSPAGTYAKVNPPVRSAADIDAMWEGVCDGAITTIGSDHVPRKRATKDKDIWAASNGFPGTGMILPILLHEGYHRRQVPLETLMRVASGASARIYGMPAKGRIAVGNDADLVIVDPDLEKTVDPGELESHADYSPYEGMRLKGWPVRTLVRGRTVARDGRIADEARQTPGGRYLRRL

SEQ ID NO: 3944 - protein, 173 aa, Flaveria bidentis
MASIPATFATVAQANMVAPFTGLKANAAFPVTKKVNGFSTLPSNGGRVQCMKVWPPVGKKKYETLSYLPELTEAQLAKEIDYLIRNKWVPCLEFELEHGFVYRENARSPGYYDGRYWTMWKLPMFGCTDSAQVMKELQECKKEYPQAWIRIIGFDNVRQVQCVSFIASKPTGF

SEQ ID NO: 3945 - protein, 439 aa, Arabidopsis thaliana
MRKLFFFLCTHVPKQRAKFTRIMESCQKKQKLETPTELSDMPDDLIFKIFSFLPFFKEDLATRFISEYGKGLWNPDPNAIFDDESLDMTCMSFVYGSLMSKDAQILDSLHLKLRKYYIASDINFLVQLGVNRSMRELRIDFFGKTLELPCCLSTCTTLKVLVLDHLNIMSVPGWFRLPSVETLQLSSVTGGSNYVPSLIRLCSVHERLVVDQNRNKDLVNINVPTLRSLSIDNKRRGHVPLGSFWINVPSLMFLNIKDTFQTIFESMPAMIKANIEVAHDQSQSVKFIESLTSTRHLCLCSPTSENPYPNGTKFSNLVHLKLCTCSAGWQNLLACMLNDAPNLRSLTLKLRQKSDVNPKKVWEKPTVVPECLSTRLEILKWRDYEGTEHEKDMVGYILANATFLQRATFSTKDRNQCDSRFSELQSMERVSEICEFVFD

SEQ ID NO: 3946 - protein, 480 aa, Triticum aestivum
MAIAVSPTHTKQKQQQQDHRRIPSQSNHTRRQARMAIAVSGQWTRLRTLGCGASGAVVTLAADAASGELFAVKSVRAADAAQLSREQGILSGLSSPHVVGCIGGGGDRDGSYHLFLEFAPGGSLADEAARNGGRLEERAIRAYAADVLRGLAYIHGKSLVHGDVKSRNVVIGADGRAMIADFGCARALGSAGPIGGTPAFMAPEVARGEEQGPAADVWALGCTVVEMATGRAPWGEMDNVLAAVHRIGYTDAVPEVPTWLSAEAKSFLAMCFARNARDRCTAAQLLEHPFVALQAGEAKARWVSPKSTLDAAFWESETDEEEEEEEEVSESPSERIKSLSCSVLPDWDSDEGWIDVLGEQCEACDSPAATKGPADVSSRAPSKVLGSPAVPAEDVAVVGTLSSDEHEVDAEDEPFGDDTILAADPSVDRQNQVCSSSDRDVLSSSHVPCNNRVLAIEKFRFPQKKKKKKKKKKKKKKKKK

SEQ ID NO: 3947 - protein, 173 aa, Flaveria bidentis
MASIPATVAAVPQTNMVAPFTGLKANAAFPVTKKVNGFSTLPSNGGRVQCMKVWPPVGKKKYETLSYLPELTEAQLAKEVDYLIRNKWVPCLEFELEHGFVYRENASSPGYYDGRYWTMWKLPMFGCTDSAQVMKELQECKKEYPQAWIRIIGFDNVRQVQCVSFIASKPTGF

SEQ ID NO: 3948 - protein, 502 aa, Oryza sativa (japonica cultivar-group)
MAAANGGDSKGFEVPKLEIKFTKLFINGRFVDAVSGKTFETRDPRTGEVIAKIAEGDKADIDLAVKAAREAFDHGPWPRMSGFARGRILHKFADLVEQHVEELAALDTVDAGKLFAMGKLVDIPGGANLLRYYAGAADKVHGETLKMARPCHGYTLKEPVGVVGHIVPWNYPTTMFFFKASPALAAGCTMVVKPAEQTPLSALFYAHLAKLAGVPDGVLNVVPGFGPTAGAAISSHMDIDKVSFTGSTEVGRLVMEAAAKSNLKPVSLELGGKSPVIVFDDADLDTAVNLVHMASYTNKGEICVAGSRIYVQEGIYDAFVKKATEMAKKSVVGDPFNPRVHQGPQIDKEQYEKILKYIDIGKREGATLVTGGKPCGENGYYIEPTIFTDVKEEMSIAQEEIFGPVMALMKFKTVEEAIQKANSTRYGLAAGIVTKNIDVANTVSRSIRAGAIWINCYLGFDPDVPFGGYKMSGFGKDMGMDALEKYLHTKAVVTPLYNTPWL

SEQ ID NO: 3949 - protein, 256 aa, Glycine max
MEAKKIPEVILNSGKKMPVIGLGTASIPLPSHEALTSILIDAFEVGYRHFDTASLYESEESLGKAVAKALELGLINSREELFITSKLWSTDAHPDLVVPALKTSLQKLGLEYVDLYLIHWPVRLKPEAKGYHNILKENVLPSFDMKGIWEAMEECYRLGLAKSIGVSNFGIKKLSQLLENATIPPAVNQVEMSPAWQQGKLKEFCKQKGIHVSAWSPLGAYKSAQGTNAVMESPILKEIACERQKSMAQVLLVSQS

SEQ ID NO: 3950 - protein, 207 aa, Zea mays
  misc_feature (143)..(143): Xaa can be any naturally occurring amino acid
MGERVKGTVKWFNVTKGFGFISPEDGSEDLFVHQSAIKADGYRSLNENDVVEFEVITGDDGRTKAADVTAPGGGALAGGSRPGDGGGDRGGRGGGGYGGGGYGGGGGGGYGGGGGGYGSGGGSYDGGGGYGGGGGGGRYGGGXGGGGRECYKCGEEGHISRDCPQGGGGGGGGYGGGGGRGGGGGGGGCFSCGESGHFSRECPNKTN

SEQ ID NO: 3951 - protein, 495 aa, Mesorhizobium loti MAFF303099
MNLPPNALWIDQDDYDVRGFSHGLYIDGRWRPSSDGRVIDVVDPSSGSVIAAVPDATLEDALAAVDAAAKAATAWRETAPRKRSEILRRCFELMVERSETLAMLISLENGKALRDARGEVAYAAEFFRWNAEEAVRITGEFGTAPSGANRIVVDYEPIGICVLITPWNFPAAMATRKIAPALAAGCTVILKPASETPLTAYALAALYSEAGVPAGVVNVLTTTSPGPLTSAMLADPRVRKLSFTGSTGVGRTLLGEAAKHVVSCSMELGGNAPFVVFDDADLDAALDGAMIAKMRNAGEACTAANRIYVQSGIHDAFADGLRKRMAALKVGPGMSADTECGPMITRKAVDKIDRLVKDAVGRGAKVLCGGSIPEEEGFFYPPTVLSQVPPDADMAHEEIFGPVAPVTRFETEAEVIMHANNTEYGLAAYIYTRDVGRGLRVASRIEAGMIGLNRGLMSDPAAPFGGVKQSGLGREGGQHHGIAEFMEAKYIAVTF

SEQ ID NO: 3952 - protein, 407 aa, Vibrio parahaemolyticus RIMD 2210633
MDIILGVVMFTLIVLALVLVILFAKSKLVPTGDITISVNGDADKAIVTQPGGKLLSALAGAGVFVSSACGGGGSCGQCRVKVKSGGGDILPTELDHITKGEAREGERLACQVAVKTDMDIELPEEIFGVKKWECTVISNDNKATFIKELKLQIPDGESVPFRAGGYIQIEAPAHHVKYADYDIPQEYREDWEKFNLFRYESKVNEETIRAYSMANYPEEHGIIMLNVRIATPPPNNPDVPPGIMSSYIWSLKEGDKCTISGPFGEFFAKDTDAEMVFIGGGAGMAPMRSHIFDQLKRLHSKRKMSFWYGARSKREMFYVEDFDGLAAENDNFVWHCALSDPLPEDNWDGYTGFIHNVLYENYLRDHEAPEDCEYYMCGPPMMNAAVIGMLKDLGVEDENILLDDFGG

SEQ ID NO: 3953 - protein, 488 aa, Arabidopsis thaliana
MSSPRSNKPKIVNGPGGYILQDVPHLIDYLPDLPTYPNPLQDNPAYSVVKQYFVHADDSVPEKVVVHKDGPRGVHFRRAGPRQKVYFESDEVHACIVTCGGLCPGLNTVIREVVSSLSYMYGVKRILGIDVSLGGYRGFYAKNTIPLNSKVVNDIHKRGGTIIGTSRGGHDTNKIVDSIQDRGINQVYIIGGDGTQRGASVIFEEIRRRRLKVAVVGIPKTIDNDIPVIDKSFGFDTAVEEAQRAINAAHVEAESNENGIGFVKLMGRYSGYIAMYATLASRDVDCCLIPESPFYLEGEGGLFEFIERRLKDHGHMVIVLAEGAGQDLMCKSMESTPMDASGNKLLKDVGLWLSQSIKDHFKKNKMVMNLKYIDPTYMIRAVPSNASDNVYCTLLAQSAVHGAMAGYTGYTSGLVNGRQTYIPFYRITETQNNVVITDRMWARLLSSTNQPSFLGPKDTSEEKKELPETPLLDDGAVDIPPVTKEVTK

SEQ ID NO: 3954 - protein, 190 aa, Triticum aestivum
MTVQTSNRGVSLRCSLGDALISNPSYPSIQRHRDSSCYLAKLPPSHSPLAAAAAASNPRLWPPAPPRARNSFSVPVDSREAAMEHGSVADSSASTFSIMEEDHTLANSVRFVLNQDPRVAFCGYSIPHPADNKVNIRVQTTGDPAKDVMKDALQDLMVMGQHVRGTFDKAVADFKSKMPAEQMDVDLNQQ

SEQ ID NO: 3955 - protein, 428 aa, Rhodobacter sphaeroides 2.4.1
MTKSAKLTIGEKVIDLPIHSPTLGPDVVDIRKLYAEADVFTYDPGFTSTAACESTITYIDGDKGELFYRGYPIEQLADRSHYLEVCYLLLYGELPNAAQQADFEYRITRHTMLHEQIHYFFRGFRRDSHPMATMVGVVGAMSAFYHDSLDINDPWQREVAAIRMIAKLPTIAAMAYKYSIGQPFNYPQNHLDYAGNFLHMCFAVPAEPYTVNPVLAKAMDRIMMLHADHEQNASTSTVRLAGSSGANPFACIAAGIACLWGPAHGGANRACLEMLREIGTVDRIPEYIRRAKDKDDPFRLMGFGHRVYKNFDPRAKVMKESADEVLGLLGIENNPTLQVAKELERIALEDDYFVAKKLYPNVDFYSGIILDAMGFPTSMFTPIFAISRTVGWISQWKEMIGDPTQKIGRPRQLYKGETRRDYVDLRHR

SEQ ID NO: 3956 - protein, 472 aa, Ralstonia eutropha JMP134
MQTHAGLLIDGKLVQGNATLDVVNPATGEVFTTVARATEREAAAAIAAAKAAQPAWGSLALEQRRALLLRFADELEANAEDLAASLVLEQGKPLAEARQELQFAQAFVRHIAGLSLPVSVVQDDATHRIELHHKPLGVVAAIAAWNFPVLIAAYKLAPALLMGNTVVLKPAPTTPLATLQMGAILKDIFPAGVVNIITDANDLGSFLTSHPDIAKVSFTGSTATGKKVMASAGPGLKRITLELGGNDAAIVLDDANVDDIAPKIFGSAFYNCGQVCLALKRLYVHASIHNQLCEALAELARQAVVGNGADEGVTIGPLQNAMQYDKAGRFLAAARHDGKILAGGALLNGDGYFVAPTIVRDLHDQSELVAQEQFAPILPVLRYDAIDEAVVRANASPYGLGGSVWSADEDRARAVAQRLQVGTAWVNHHLHFGPHIPLVGAKESGVGVEFGTEGLAEYAQLSVINIARQQAA

SEQ ID NO: 3957 - protein, 465 aa, Aspergillus fumigatus
MAMTMRSTRHASKLAQTARLALTNSRRYSTAEPDLKTALKAVIPAKRELFKQVKERSDEVIGEVKVANVIGGMRGLKSMLWEGSVLDPEEGIRFHGKTIKDCQKELPKGTSGTEMLPEAMFWLLLTGQVPSTNQVRAFSRELAEQSHLPQHILDLIKSFPRSMHPMTQLSIAVAALNTESKFAKAYEKGLSKADYWEPTFDDSISLLAKIPRVAALVFRPDEVDQVGTQALDASQDWSYNFAELLGKGGKENQDFHDLLRLYLALHGDHEGGNVSAHATHLVGSALSDPFLSYSAGLLGLAGPLHGLAAQEVLRWILAMQDKIGTKFTDDDVRNYLWDTLKSGRVVPGYGHGVLRKPDPRFQALMDFAATRPDVLANPVFQLVKKNSEIAPAVLTEHGKTKNPHPNVDAASGVLFYHYGFQQPLYYTVTFGVSRALGPLVQLIWDRALGLPIERPKSINLLGLKK

SEQ ID NO: 3958 - protein, 497 aa, Spinacia oleracea
MAFPIPARQLFIDGEWREPIKKNRIPVINPSTEEVIGDIPAATAEDVEVAVVAARRAFRRNNWSATSGAHRATYLRAIAAKITEKKDHFVKLETIDSGKPFDEAVLDIDDVASRFEYFAGQAEALDGKQKAPVTLPMERFKSHVLRQPLGVVGLISPWNYPLLMATWKIAPALAAGCTAVLKPSELASVTCLEFGEVCNEVGLPPGVLNILTGLGPDAGAPLVSHPDVDKIAFTGSSATGSKVMASAAQLVKPVTLELGGKSPIVVFEDVDIDKVVEWTIFGCFWTNGQICSATSRLLVHESIAAEFVDKLVKWTKNIKISDPFEEGCRLGPVISKGQYDKIMKFISTAKSEGATILYGGSRPEHLKKGYYIEPTIVTDISTSMQIWKEEVFGPVLCVKTFSSEDEAIALANDTEYGLAAAVFSNDLERCERITKALEVGAVWVNCSQPCFVQAPWGGIKRSGFGRELGEWGIQNYLNIKQVTQDISDEPWGWYKSP

SEQ ID NO: 3959 - protein, 486 aa, Pseudomonas sp. KL28
MRQIENFIAGEFVASASGKRFDKHSPLDNRIICSVSEAGRGEVDAAVRAARSALQGEWGGLTTEQRIELLYGVANEITRRFDDFVEAEMSDTGQPEHVMKHVFIPRGAANFKVFADVIKNVASESFQMDTPDGRGALNYSIRRPKGVIGVVCPWNAPFMLMTWKVGPALACGNTVVVKPSEESPQTAALLGEVMNAVGIPKGVYNVVHGFGPDSAGEFVTRHPQVDAITFTGETRTGTAIMKAASEGMRDVSFELGGKNAGIVFADADFEAAVESFSRSVFLNTGQVCLGTERVYVERPIFERFVQALKVKAEAVKYGRPDDHQANYGPLISQEHKQKVLSYYRKAVEEGATLVTGGGVPQMPGELAEGAWVQPTIWTGLPETAAVVQEEIFGPCCHISPFDSEDEVVEKANATDYGLSTTIWTSNLARAHRMAGRIDVGITWINSWFLRDLRTPFGGSKQSGIGREGGVHSLEFYTETRNVCVKL

SEQ ID NO: 3960 - protein, 146 aa, Brassica napus
  misc_feature (140)..(140): Xaa can be any naturally occurring amino acid
SPDYVAPSSNSLNRPNSRGSDPDGPNTIPMFANGASTPVFDGASFRQQANHAAESINRNSTRAKESEARNENEWVEQDEPGVYITLTALPGGARDLKRVRFSRKRFSEKQAEEWWAENRGRVYEQYNVRLVVDKSSVGVXSEDLAH

SEQ ID NO: 3961 - protein, 212 aa, Oryza sativa (japonica cultivar-group)
MAEGAELVGESAHQDMPRVVAALAGILERVAGRNDAAATPAELAAAPASPFRATAKPGISVRAYAARIARFAGCSPACYVVAYIYLDRLLRRGRRCLALALAVDSYSVHRLLITAVLSAVKFMDDICYNNAYFAKVGGISLAEMNYLEVDFLFGVGFDLNVTPETFADYCAVLQSEMLCAAPPTRLHYCCLSEDDAGSSSSSSLREAAMEAS

SEQ ID NO: 3962 - protein, 226 aa, Glycine max
MASNAKRSRQVSHYEVKRTLYNDIYLRRSQFQAPSPCSSRILFLRSTTIITSFSLRTDHTMATSSAKSVHDFTVKDAKGNDINLGDYKGKVLIIVNVASQCGLTNSNYTELSQLYEKYKQKGLEILAFPCNQFGAQEPGSNEQIQEFVCTRFKAEFPVFDKVDVNGDKAAPLYKYLKSSKGGLFGDGIKWNFSKFLVDKEGNVVDRYAPTTSPLSIEKDLLKLLDA

SEQ ID NO: 3963 - protein, 239 aa, Glycine max
MEAKKIPEVILNSGKKMPVIGLGTASIPLPSHEALTSILIDAFEVGYRHFDTASLYESEESLGKAVAKALELGLINSREELFITSKLWSTDAHPDLVVPALKTSLQKLGLEYVDLYLIHWPVRLKPEAKGYHEAMEECYRLGLAKSIGVSNFGIKKLSQLLENATIPPAVNQVEMSPTWQQGKLKEFCKQKGIHVSAWSPLGAYKSAQGTNAVMESPILKEIACERQKSMAQVLLVSQS

SEQ ID NO: 3964 - protein, 472 aa, Podospora anserina
MAPAMRLTSSALRASLKASSFATKQTAFTAARCYSSKTQTLKERFAELLPEKIEEIKALRKEHGSKVVDKVTLDQVYGGARGIKCLVWEGSVLDAEEGIRFRGKTIPECQQVLPKAPGGSEPLPEGLFWLLLTGEVPTEQQVRDLSADWAARAEIPKFVEELIDRCPSDLHPMAQFSMAVTALEQTSSFARAYAKGINKKEYWGYTFEDSMDLIAKLPTIAARIYQNVFKGGKVAPVQKDKDYSFNFANQLGFGNNADFIELMRLYLTIHTDHEGGNVSAHTTHLVGSALSSPFLSLAAGLNGLAGPLHGLANQEVLNWLTEMKKVIGDDISDESITKYLWDTLNSGRVVPGYGHAVLRKTDPRYSAQREFAQKHMSEDPMFKLVSQVYKIAPKVLTEHGKTKNPYPNVDAHSGVLLQYYGLTEANYYTVLFGVSRAIGVLPQLIIDRAVGAPIERPKSFSTEKWIEICKKL

SEQ ID NO: 3965 - protein, 244 aa, Zea mays
MVGGGGGGPLRRVGKYEVGRTIGEGTFAKVKFAQNTETGESVAMKVLDRSSILKNKLAVLIKREISIMKLVRHPNVVRLHEVLASRKKIFIILEFITGGELFDKIIRHGRLSEADARRYFQQLIDGVDFCHKKGVYHRDLKPENLLLDSQGNLKISDFGLSAWPAQGSFLLRTTCGTPNYVAPEVLSHKGYNGALADTWSCGVILYVLLAGYLPFDEVDLTTLYGKIESAEYSFPALFQVVQNH

SEQ ID NO: 3966 - protein, 206 aa, Emericella nidulans
MATNITHHAGLTRNERNQLRKQKGLTIWLTGLSASGKSTIAVELEHQLLQRGLHAYRLDGDNVRFGLNKDLGFSDADRNENIRRIAEVAKLFADSSSIAITSFISPFRADRDTARKLHEVPTPNDSTGLPFVEVFVDVPIEVAEKRDPKGLYKKAREGIIKEFTGISSPYEAPENPEVHVKNVDLPIQEAVKQIIDYLDSKKLLDA

SEQ ID NO: 3967 - protein, 386 aa, Corynebacterium glutamicum ATCC 13032
MIVSTQPITDRSALSAEHAEVIKATLPLVGGKINEITPVFYNKMFAAHPELIANTFNRGNQKQGDQQKALAASIATFATMLVTPDAPDPVQLLSRIGHKHVSLGITADQYDIVHEHLFAAIVEVLGAETVTAPVAEAWDAVYWIMANVLIGFENNLYASNDLEPGDVFREVTVTAKKQLSATVWEYTLAGELVAPEPGQYTSIGVVLDDGARQLRQYSLLGGSDTEYRIAVEDNGEVSGFLRDRVSVGDKIEATIAAGDLVLNKDTNPVVLISQGIGSTPMVGMLAGMNPERDVVVLHADQAESTYAQVEEVQGLVEKLPKAAFEIFYRDNDQWLEVAGRIPSGASVYLCGGVEFLKNVREQIEALDEQPRDVNFELFAPNDWLIS

SEQ ID NO: 3968 - protein, 562 aa, Glycine max
MAPTTTVPIGTLPSGSVTGRLASVYSEVQKTRVDHALPLPSVLKHPFTILDGPPSSAAGNPDEIAKLFPHLFGQPSAALAPSGAVQTQKKLKIGVVLSGGQAPGGHNVISGIFDYLQERAPGSTLYGFKGGPAGIMKCKYVELTSEYIYPYRNQGGFDMICSGRDKIETPEQFKQAEETAKKLDLDGLVVIGGDDSNTNACLLAENFRSKNLKTSVIGCPKTIDGDLKCKEVPTSFGFDTACKIYSEMIGNVMIDARSTGKYYHFVRLMGRAASHITLECALQTHPNITIIGEEVAAKKLTLKNVTDYIVDVVCKRAEINYNYGVILIPEGLIDFIPEVQHLIAELNEILAHDTVDEGGLWKKKLTDQSLKLFDFLPQAIQEQLMLERDPHGNVQVAKIETEKMLIQMVETELEKRKQEGKYNGEFKGQSHFFGYEGRCGLPTNFDATYCYALGYGAGALLHSGKTGLISSVANLCAPVEEWTVGGTALTSLMDVERRHGKFKPVIKKAMVELEGAPFKKFASLRDEWALKNCYISPGPIQFSGPGSEVINHTLLLELEALA

SEQ ID NO: 3969 - protein, 423 aa, Exiguobacterium sp. 255-15
MAIRIDHATWYKNGQLQKSSIRMEDGIFTDLDATPLETDQVIDATGYTVAPGFVDVHVHLREPGGEHKETIATGTAAAAAGGFTTICPMPNTRPVPDDRETLDALFKKIEETASVRVFPYAAISKNQLGQELVAFEQLTDAFAFTDDGVGVQSAAVMREAMTRAAAVHKSIIAHCEDDSLKAGCVHEGAYSAREGLQGIPSLAESIHIARDVLIAEATGCHYHVCHVSTKESVRVIRDAKRAGIRVTAEVTPHHLVLTEDDIIGRDPNFKMNPPLRSEADRQALLAGLQDGTIDCIATDHAPHAAEEKAIGIERAPFGITGFETAFPLLYTKLVEPGIFTLNQLFDWMSRNPADLFDLPFGRIEVGAPADLVLLDLETVRAVQPDQFLSKGKNTPFAGASLTGYPVLTLVGGEIVFKGEKAHV

SEQ ID NO: 3970 - protein, 507 aa, Oryza sativa (japonica cultivar-group)
MGSTGDCGNGKAAAGGGGLVVPEIKFTKLFINGEFVDAASGKTFKTRDPRTGDVLAHIAEADKADVDLAVKAAREAFEHGKWPRMSGYERSRVMNKLADLVEQHADELAALDGADAGKLLTLGKIIDMPAAAQMMRYYAGAADKIHGESLRVAGKYQGYTLREPIGVVGVIIPWNFPTMMFFLKVSPALAAGCTIVVKPAEQTPLSALYYAHLAKLAGVPDGVINVVPGFGPTAGAALSSHMDVDSVAFTGSAEIGRAIMESAARSNLKNVSLELGGKSPMIVFDDADVDMAVSLSSLAVFFNKGEICVAGSRVYVQEGIYDEFVKKAVEAAKNWKVGDPFDAATNMGPQVDKVQFERVLKYIEIGKNEGATLLTGGKPTGDKGYYIEPTIFVDVKEEMTIAQEEIFGPVMSLMKFKTVEEAIEKANCTKYGLAAGIVTKNLNIANMVSRSVRAGTVWVNCYFAFDPDAPFGGYKMSGFGRDQGMVAMDKYLQVKTVITAVPDSPWY

SEQ ID NO: 3971 - protein, 326 aa, Erwinia carotovora subsp. atroseptica SCRI1043
MKIGLVISGGDVSGINNFIFQVNRMTASDIVIFDGGINGLIDNCCKVLTRRDLVDYSLSSMPLVTSGRKTGKCRKTDYEKIVKNIQKQKLDALIMAGGDGSFQFLKKLSCYGIHCYGIGMTIDNDISGNSYTIGFSTACEQVMSEVEKLRNTGRGLQGRVFMIELLGGYCGELTLQAALKSNADIALIPESPWDIDALSQCILDKIAEQNSVIILCSEGYTHEYTPGFQGAIDTIIKKLEHKIGIRIRKTILGYGLRNGAPTGEEIIQGTLLAEEVVRCINAGLTNKIIIINNNNKAIPIDLEDSERRLVDIESHFYKLAKSHHLI

SEQ ID NO: 3972 - protein, 402 aa, Arabidopsis thaliana
MAEISGLPDDLLVKILAFLPTKVAISTSVLSKQWRFLWMWLPKLKYDDYDDITDGFNSVSAFQTYRDFIAKNLPLHRAPIIESLSLGFRCGTLQPEDLKSWVEVAVSRSVRELSILAYYRNNYALSSSSLYTCKSLVTLKGFNIRVDVPPTVCLLPSLRTLELKRVRYLNEDSLRMLLSFCPVLEYLSIERHDNDNLRGLVVDVPSLRRLSLTSYTGCSSDDYVIVTPSLKYFKAFDYRSEISSYKIEKIPELEEADISIERNPEKLFVYFKSIKCLSLQVDFNSKEEPGYDSGIVFNHLEELTPYINDANWSKLLFRLLNDSPKLRVLEISNSKSFYKEKIGEYLPVSWSKNQGSVPKCFLNSLETFRVKWYYSEEQEDRDFLSLIFKHARCLKSTSILHR

SEQ ID NO: 3973 - protein, 372 aa, Arabidopsis thaliana
MAKISDLSDELLMWLSKLEFYFSDGSESACLRDFIAKNLPLHKAPIIESLRFCSFFGSLQPKDLKSWVRIAVSRCVRELSISLHDTTAAVSLPSSLYTCKSLVTLKLYGKKVLLDVPRTVFLPSLKTLQLERLRYSDEDSLRLLLSYCPVLEDLSIVREDYDNLRALVVIVPSLQRLSLEIPGNCSSDGYVIVTPSLKYFKVVDYRESMSYLIEQMPELEEADIVVLQYPEKLLESVTFFKRLSIRVIFNTYTETVYRDGIVFNRLENLKLCICNGDWSKLLIQFLKDSPNLRVLNLLVDDYPSSLGDYEPVRWKNNKSSVPKCLLESLETFEFAGYIGTPEERDFLSYIFKHARCLKSSSILSRPERYHGI

SEQ ID NO: 3974 - protein, 182 aa, Burkholderia cepacia R18194
MSTIYDIPVNAIDGAQTTLRPYEGKVLLVVNVASKCGLTPQYEGLEALYEGKRAEGLEVLAFPANNFKGQEPGTDAEIQSFCTGTFGVKFPLFSKISVIGDDKHPLYRSLTQAQPQATGDGPFRTRLEGYGIQPNPAPEVLWNFEKFLVSRTGEVVARFSPDTTADDPKLVAAIDAELAKAA

SEQ ID NO: 3975 - protein, 472 aa, Arabidopsis thaliana
MSTASVIIIGAGISGISAAKILVENGVEDVLILEATDRIGGRIHKQNFGDVPVELGAGWIAGVGGKESNPVWELASRFNLRTCFSDYTNARFNIYDRSGKIFPTGIASDSYKKAVDSAILKLKSLEAQCSGQVAEEAPSSPKTPIELAIDFILHDFEMAEVEPISTYVDFGEREFLVADERGYECLLYKMAEEFLVTSHGNILDYRLKLNQVVREVQQSRNGVVVKTEDGSVYEANYVIVSASIGVLQSDLLSFQPLLPRWKTEAIQKCDVMVYTKIFLKFPQCFWPCGPGQEFFIYAHEQRGYFTFWQHMENAYPGSNILVVTLTNEQSKRVEAQSDQETMKEAMSVLRDMFGATIPYATDILVPRWWNNRFQRGSYSNYPMISDNQLLQNIKAPVGRIFFTGEHTSEKFSGYVHGGYLAGIDTSKSLLEEMKQSLLLQPLLAFTESLTLTHQKPNNSQIYTNVKFISGTS

SEQ ID NO: 3976 - protein, 100 aa, Glycine max
MSGVWVFKNGVVRLVENHGSDRKVLVHTASNEIITSYAVLEHKLSSLGWERYYDDPDLLQFHKRSTVHLISLPTRPNKFRSMHMYDIVVKNKNYFEVRDI

SEQ ID NO: 3977 - protein, 360 aa, Azotobacter vinelandii
MSKQILVLPGDGIGPEIMAEAVKVLQLANEKYQLGFVLGYDELGGAAVDKYGVPLADETLERARAADAILLGAVGGPKWDAIDPAIRPERGLLKIRSQLGLFGNLRPALLYPQLAEASTLRPEVVAGLDILIVRELTGGIYFGAPRESRLLANGERMAYDTLPYSESEIRRIAKVGFDMARVRGKKLCSVDKANVLASSQLWRAVVEEVAKDYPDVVLSHMYVDNAAMQLVRAPKQFDVIVTDNMFGDILSDEASMLTGSIGMLPSASLDADNKGMYEPCHGSAPDIAGKGIANPLATILSVSMMLRYSFGQVEAANAIEQAVSKVLDQGLRTGDIWSEGCRKVGTAEMGDAVVAALATL

SEQ ID NO: 3978 - protein, 277 aa, Triticum aestivum
  misc_feature (223)..(223): Xaa can be any naturally occurring amino acid
  misc_feature (239)..(240): Xaa can be any naturally occurring amino acid
  misc_feature (256)..(256): Xaa can be any naturally occurring amino acid
  misc_feature (259)..(259): Xaa can be any naturally occurring amino acid
  misc_feature (261)..(261): Xaa can be any naturally occurring amino acid
AGRVWHGGLTAVMKLTKLFIEKGAAGIHIEDQAPGTKKCGHMAGKVLVPIQEHINRLVAIRAQADIMGSDLLAIARTDAEAATLLSTNIDPRDHAFILGSTNSTLKPLNDLMIAAEATGKSGAELQRIEDEWLAKANLSSFDDAVAAAIDAGSFSDKAGIKQEYTSRAKGKSNFEARAVARQLLGRNIFFDWDAPRTREGYFRLKGGCDCAVNRAIAYAPYCXAIWMESKLPDFAQAEXXAQGVHAVWPEKKLAYXLSXSXNWETAMPRDEQETTSD

SEQ ID NO: 3979 - protein, 126 aa, Sinorhizobium meliloti
MADLAKIVEDLSSLTVLEAAELSKLLEEKWGVSAAAPVAVAAAGGAAGAAAPVEEEKTEFDVILTDAGANKINVIKEVRAITGLGLKEAKDLVEGAPKAVKEAVSKAEAADLKKKLEDAGAKVDVK

SEQ ID NO: 3980 - protein, 352 aa, Pseudomonas aeruginosa PAO1
MKALRWHAARDLRLSELERQAPRPGEVELEVAYCGICGSDLHEYQSGPHSIPQAEAHPLSGCRAPLTLGHEFCGVVAALGPGVEGPRIGDRVAVEPEYRCGECRYCREGRYNLCESMGFIGLMGDGGFAERARVPAYMLHRLPDAVGFRQAAVLEPAAVALHALRRSSLAPGQRCAVFGLGPIGLLLVMLARLRGIEDIAAVDVSPERLALAGEFGASRALDARDGDTAARLREGGALDCAFEAAGSQASLDAALASLRKGGELVLVSLMGEVRLDAFDLVNRELRLLGSVGYRDAYPELIALLADGRLDLARAVTRSVPLEQAVEHGFEALLRDKSQLKVLVNPNPALADA

SEQ ID NO: 3981 - protein, 510 aa, Brucella melitensis 16M
MNTAVRKIDVKKEAADLLSKLGVDASAYTGGDLTGFSPVSGEEIASIKTHSKEDAEKIIAKADEAFRAWRTVPAPKRGELIRLLGEELRASKEDLGRLVSLEAGKIPSEGLGEVQEMIDICDFAVGLSRQLYGLTIATERAGHRMMETWHPLGVVGVISAFNFPVAVWSWNAALAIVCGNAVVWKPSEKTLLTALACDAIFKRALKRFGDAPEGISQLLLGDREIGEVLVDSPKVPVVSATGSTRMGREVGPRLAKRFARAILELGGNNAGIVCPSADLDMALRAIAFGAMGTAGQRCTTLRRLFVHESVYDALVPRLQKAYASVSVGSPLETSALVGPLIDKQAFDNMQKALKEAAAHGGKVQGGERVDTGYENAYYVRPAIVEMPRQEGPVLEETFAPILYVMKYSDFDDVLASHNAVGAGLSSSIFTLNLQEAERFLSAEGSDCGIANVNIGTSGAEIGGAFGGEKETGGGRESGSDAWKAYMRRATNTINYSKALPLAQGVSFDID

SEQ ID NO: 3982 - protein, 379 aa, Zea mays
  misc_feature (173)..(173): Xaa can be any naturally occurring amino acid
MEAGGAGSGLNGAVQAKGTGADDGSAKRLPPCCVKARAAAPESEARCHATVVSGWFTEPRSRCGKASKVQYYNNPMWPGEANSLKVEKILYQGKSLYQEVLVFESSTYGKVLVLDGIVQLTDKDECAYQEMITHLPLCSIPSPKKVLVIGGGDGGVLREVSRHSSVESIDICXCKDFFPHLSVGFQDPRVQLHVGDAVEFLRNAPEGTYDAIIVDSSDPIGPAQELVEKPFFDTIARALRPGGVLCNQAESMWLHTHLIQDMLSICRETFKGSVRYAWTSVPTYPSGVIGFLLCAKEGPLVNFLTPINPIEKLEGATKAGREIRFYNSEMHRAAFVLPTFARRELEAYCVSTETEQAEETPAAPLKLTLASRSEIFATS

SEQ ID NO: 3983 - protein, 128 aa, Triticum aestivum
  misc_feature (50)..(50): Xaa can be any naturally occurring amino acid
  misc_feature (66)..(66): Xaa can be any naturally occurring amino acid
  misc_feature (81)..(81): Xaa can be any naturally occurring amino acid
  misc_feature (104)..(104): Xaa can be any naturally occurring amino acid
MVLEATMICIDNSEWMRNGDYAPSRFQAQADAVNLICGAKTQSNPENTVXVMTMAGKGVRVLVTPXSDLGKILACMHGLEXGAEANLAAAIQVAQLALKHRQNXRHIGYTSSESCEHKKFGDIGEKCA

SEQ ID NO: 3984 - protein, 132 aa, Arabidopsis thaliana
MRVTDECTSSFMDMKWKKVHRYIVFKIEEKSRKVTVDKVGGAGESYHDLEDSLPVDDCRYAVFDFDFVTVDNCRKSKIFFIAWSPEASKIRAKILYATSKDGLRRVLEGIHYELQATDPTEMGFDIIQDRAK

SEQ ID NO: 3985 - protein, 241 aa, Eschscholzia californica
MGRGRVELKRIENKINRQVTFAKRRNGLLKKAYELSVLCDAEVALIIFSNRGKLYEFCSSSSMFKTLERYQKSNYGAPETNVSVRESQEHSSHQEYLKLKARVEALQRSQRNLLGEDLGPLSGKELESLERQLDMSLKQIRSTRTQYMLDQLTDLQRREQMLSDANKTLRRRLEEGTVTCHQWEQNMQYGQQQAHAQGEGFFHPIECEPTLQMGYQQDQITVAAAAGPSMTMNSYMPGPGW

SEQ ID NO: 3986 - protein, 125 aa, Triticum aestivum
MAMEARMKGTVKWFNDTKGFGFITPADGSEDLFVHQSSIKADGFRSLAEGEVVEFAVSEGDDGRTKAVDVTGPDGSFVQGGAGGGGGGGGFGSRGGGGSRGGGGFGARGGDGSGGYGGGYGGGCG

SEQ ID NO: 3987 - protein, 268 aa, Arabidopsis thaliana
MSLNVDILKSTEIGKAVNGLRKHSSDKIRQLAKTLIAEWKELVDQWVNTTKEITGAEGTPESANPSVLDEEEAFPSLPYDVDIFTPEPNGFEISHFFDSLDFDGNPRNSEEHNTSREHERRPQNIAKRKPEGTQMRIQDAPFRSIKPSSATDFDGTRRPVKQSTEQRMKNETVSVHKSEKPMIQRKPVVTEQKRKAPGPQQEKLKGLDADAKFEFAKRKLQESYQHHENAKKQRTIQVLEMIPKQGSAQKPQLKRPGMSNRNWANGRK

SEQ ID NO: 3988 - protein, 453 aa, Zea mays
MAASARDSTDAAERVVDDHDGWASDAEMDVEMDVVEGDADRRDGGADGDDEYLLLTRIRDTSAAEARAGKDIQGIPWERIHIARQDYRKARLEQYKNYENFPQSGELMDKLCKQVEKSSKYYEFQHNTRSVKPSILHFQLRNLLWATSKHDVYFMSNSTVSHWSSLSHKLSEVLDFSGHVAPAEKYPGSLLEGFSGVQVSTLAVNEGLVVAGGFQGELIGKDVEGCSVKFCMRTTLSDNAITNAIDIHRSISGSLHITVSNNDCGVREYDMERYQLVNHYRYNWPVNHTSVSPDKKLLAVVGDDRDALLVDSRNGKVTSTLVGHLDYSFATAWHPDSRTFATGNQDKTCRIWDTRNLSTSLAVLRGNIGAIRCIRYSSDGRFLVFSEPADFVHVYSVAADYKKRQEIDFFGEVSGITLSPDDESLFIGVCDRVYASLLQYRMIRGFDYLDSYV

SEQ ID NO: 3989 - protein, 248 aa, Eschscholzia californica
MGRGRVELKRIENKINRQVTFAKRRNGILKKAFELSVLCDAEVALIIFSSRGKLYEFCSSSSILKTLERYQRCSSNASQASRSIKDNDETYQNYLKLKSRVEVLQQNQRNLLGLDLEPLSLKELDQLESQLEVSLKQVTSTKTQFMLDNLSDLQTKEEVLQEANRSLNRKMEENMAEIPQQLRWEAGDGHNIPYNRHIPITDGFYQPLECNPTFQIGSSSMKSFDHLTDPPPTVQNLLGYFPSWSFET

SEQ ID NO: 3990 - protein, 177 aa, Lemna gibba
MASSMMASTAAVARAGPAQSNMVAPFNGLRSSVAFPATRKANKNLSTLPSNGGKVSCMQVWPPEGLKKFETLSYLPPLSVEDLAKEVDYLLRNDWVPCIEFSKEGFVYRENHASPGYYDGRYWTMWKLPMFGCTDASQVIAEVEEAKKAYPEYFVRIIGFDNKRQVQCISFIAYKPT

SEQ ID NO: 3991 - protein, 346 aa, Triticum aestivum
  misc_feature (284)..(284): Xaa can be any naturally occurring amino acid
  misc_feature (292)..(292): Xaa can be any naturally occurring amino acid
  misc_feature (298)..(298): Xaa can be any naturally occurring amino acid
  misc_feature (316)..(316): Xaa can be any naturally occurring amino acid
MPRVCTHLHSFDPPILQVPELKAMASPFSAPSLIMEEEGRFEAEVAEVGAWWNTERFRLTKRPYTARDVVLLRGTLRQSYASGEMAKKLWRTLKAHQAGGTASRTFGALDPVQVTMMAKHLDTIYVSGWQCSSTHTSTNEPGPDLADYPYDTVPNKVEHLFFAQQYHDRKQQEARMSLPRAERAHAPFVDFLKPIIADGDTGFGGATATVKLCKLFVERGAAGVHLEDQSSVTKKCGHMAGKVLVAVSEHVNRLVAARLQFDIMGVENVLVARTDAVAATLIQXNIDARDHXFILGAXDPRLKNGSSRHALRRMSXGRTGGAAASRQWTHGHSNSRVVRSMELTHD

SEQ ID NO: 3992 - protein, 434 aa, Shigella flexneri 2a str. 301
MKTRTQQIEELQKEWTQPRWEGITRPYSAEDVVKLRGSVNPECTLAQLGAAKMWRLLHGESKKGYINNLGALTGGQALQQAKAGIEAVYLSGWQVAADANLAASMYPDQSLYPANSVPAVVERINNTFRRADQIQWSVGIEPGDPRYVDYFLPIVADAEAGFGGVLNAFELMKAMIEAGAAAVHFEDQLASVKKCGHMGGKVLVPTQEAIQKLVAARLAADVTGVPTLLVARTDADAADLITSDCDPYDSEFITGERTSEGFFRTHAGIEQAISRGLAYAPYADLVWCETSTPDLELARRFAQAIHAKYPGKLLAYNCSPSFNWQKNLDDKTIASFQQQLSDMGYKFQFITLAGIHSMWFNMFDLANAYAQGEGMKHYVEKVQQPEFAAAKDGYTFVSHQQEVGTGYFDKVTTIIQGGTSSVTALTGSTEESQF

SEQ ID NO: 3993 - protein, 177 aa, Lemna gibba
MASSMMASTAAAVARAGPAQSSMVPFNACRSSVPFPATRKANNNLSTLPGNGGRVSCMQVWPPEGLKKFETLSYLPPLSVEDLAKEVDYLLRNDWVPCIEFSKEGFVYRENHASPGYYDGRYWTMWKLPMFGCTDASQVIAEVEEAKKAYPEYFVRIIGFDNKRQVQCISFIAYKPT

SEQ ID NO: 3994 - protein, 242 aa, Liriodendron tulipifera
MGRGRVELKRIENKINRQVTFAKRRNGLLKKAYELSVLCDAEVALIIFSNRGKLYEFCSTSSMFKTLERYQKCNYGAPEAAVTTREIQSSHQEYLKLKARVEALQRSQRNLLGEDLGPLNGKELDTLERQLDVSLKQIRSTRTQYMLDQLTDLQRREQMLSEANKALKRRLDEGMQANPHQGWNHNPHAMEYVRQQGPPQGDGFFHPLDCEPTLQIGYQTDQITMSTAPGPSLNNYMPGWLA

SEQ ID NO: 3995 - protein, 177 aa, Lemna gibba
MASSMMASTAAAVARAGPAQTNMVPFNACRSSVPFPATRKANNDLSTLPSNGGRVSCMQVWPPEGLKKFETLSYLPPLSVEDLAKEVDYLLRNDWVPCIEFSKEGFVYRENHASPGYYDGRYWTMWKLPMFGCTDASQVIAEVEEAKKAYPEYFVRIIGFDNKRQVQCISFIAYKPT

SEQ ID NO: 3996 - protein, 483 aa, Rickettsia conorii str. Malish 7
MAEFTPITIAYGDGIGPEIMEAVLYILRKAEARIRLETIEVGEKLYKKHYTSGISEESWESIQRTGIILKAPITTPQGGGYKSLNVTIRKTLQLFANIRPAVSLHPFTRTLHPNLNLTIIRENEEDLYAGIEYRQTHNMYESMKLISHTGCEKIIRYAFEYAVKNNRKKVMCLSKDNIMKFSDGVLHKVFNEIAKEYPQINNAHYIIDIGTARLATKPEIFDVIVTSNLYGDIISDVAAEISGSVGLAGSANIGQHYAMFEAVHGSAPDIAGKDIANPSGLLNAAIMMLVHIGQGDIATLIENAWKKTIEDGVHTADIYNEQSSSKKVGTKEFAEEVTKRLGQLPTKLPKADYPLIAEKQESNIDYKIDTKEVKKLVGTDIFVNMNVSSAHDIADKINKLDLGNFELKTISSKGLKLWPRDTRFETVSDHWCCRFMNKDGTEIKHLDITRLLEALSTANIDFIKVENLFEFDGVAGYSLAQGE

SEQ ID NO: 3997 - protein, 411 aa, Microbulbifer degradans 2-40
MENSIFELQYALDTFYFLVCGALVMWMAAGFAMLEAGLVRSKNTTEILTKNVALFAIACIMYFVCGYAIMYGGDYFLTTITGDGVTGAEEPASYAPSADFFFQVVFVATAMSIVSGAVAERMKLWAFLAFAVVMCGVIYPVEGGWTWGGNSVFGMYTLGDLGWSDFAGSGIVHMAGAAAALAGVLVLGARKGKYGPNGQINAIPGANLPLATLGTFILWMGWFGFNGGSVLATASVESANSVAIVFMNTNAAAAGGLVSALILARILFGKADLTMALNGALAGLVAITAEPSTPSALQATLFGGLGGLLVVFSILTLDKLKIDDPVGAISVHGVVGLLGLLLVPVTNDASSFSGQIIGALTIFTWVFGTSLAVWFLIKLVIGVRVSEEEEFEGVDLSECGMEAYPEFTNGK

SEQ ID NO: 3998 - protein, 453 aa, Zea mays
MAASARDSTDAAERVVDDHDGWASDAEMDVEMDVVEGDADRRDGGADGDDEYLLLTRIRDTSAAEARAGKDIQGIPWERIHIARQDYRKARLEQYKNYENFPQSGELMDKLCKQVEKSSKYYEFQHNTRSVKPSILHFQLRNLLWATSKHDVYFMSNSTVSHWSSLSHKLSEVLDFSGHVAPAEKYPGSLLEGFSGVQVSTLAVNEGLVVAGGFQGELIGKDVEGCSVKFCMRTTLSDNAITNAIDMHRSISGSLHITVSNNDCGVREYDMERYQLVNHYRYNWPVNHTSVSPDKKLLAVVGDDRDALLVDSRNGKVTSTLVGHLDYSFATAWHPDSRTFATGNQDKTCRIWDTRNLSTSLAVLRGNIGAIRCIRYSSDGRFLVFSEPADFVHVYSVAADYKKRQEIDFFGEVSGITLSPDDESLFIGVCDRVYASLLQYRMIRGFDYLDSYV

SEQ ID NO: 3999 - protein, 327 aa, Zea mays
MDATPPSSRDLSLEPSRPASSAGPAKRVGLLLGRYELGRLLGHGTFAKVYHARQADTGETVAIKVLDKEKALRNGLVPHIKREIAILRRVRHPNIVRLFEVMATKSKIYFVMEFVRGGELFARVAKGRLKEDTARRYFQQLISAVGFCHARGVFHRDLKPENLLVDERGDLKVSDFGLSAVADQFHPDGLLHTFCGTPSYVAPEVLARRGYDGAKADIWSCGVILFVLMAGYLPFHDQNLMAMYRKIYRGEFRCPRWFSKDLSCLMNQLLDTNPETRITVAPGAAQARSSSPLCSSAPSIRNSEFRTHKHACSLFDKSNLLSKPSPV

SEQ ID NO: 4000 - protein, 474 aa, Mycobacterium avium subsp. paratuberculosis str. k10
MHGLLSKTRVYLVPVLGSALSAHQAGVDRLLESYRSIPATSAVRLAKPTSNLFRARTKRDAPGLDTSGLTGVLGVDPETRTADVAGMCTYADLVAATLPYGLSPLVVPQLKTITLGGAVSGLGIESASFRNGLPHESVLEMDILTGAGELLTASRTQHADLFRAFPNSYGTLGYSTRLRIELEPVAPFVALRHIRFHALADLIAAAERIIDTGGHAGTPVDYLDGVVFSADESYLCVGRRTTTPGPVSDYTGQHIYYQSIRHDSPGDEPTKDDRLTMHDYFWRWDTDWFWCSRAFGVQNPRVRRWWPRRYRRSSVYSKLVSLDRRLRISDRIEARNGRPPRERVVQDVELPVERTFEFLEWFLETVPITPIWLCPLRLRDHDGWPLYPMRPDHTYVNVGFWSSVPAGATEGATNRLIEAKVSELDGHKSLYSDSFYTREEFDELYGGEAYNTVKKTYDPDSRLLDLYAKAVQRR

SEQ ID NO: 4001 - protein, 506 aa, Zea mays
  misc_feature (51)..(51): Xaa can be any naturally occurring amino acid
MASPAMVPLRQLFVDGEWRPPAQGRRLPVVNPTTEAHIGEIPAGTAEDVDXAAVAAARAALKRNRGRDWARAPGAVRAKYLRAIAAKVIERKPELAKLEALDCGKPYDEAAWDMDDVAGCFEYFADQAEALDKRQNSPVSLPMETFKCHLRREPIGVVGLITPWNYPLLMATWKVAPALAAGCAAVLKPSELASVTCLELADICKEVGLPPGVLNIVTGLGPDAGAPLSAHPDVDKVAFTGSFETGKKIMAAAAPMVKPVTLELGGKSPIVVFDDVDIDKAVEWTLFGCFWTNGQICSATSRLLIHTKIAKKFNERMVAWAKNIKVSDPLEEGCRLGPVVSEGQYEKIKKFISNAKSQGATILTGGVRPAHLEKGFFIEPTIITDITTSMEIWREEVFGPVLCVKEFSTEDEAIELANDTQYGLAGAVISGDRERCQRLSEEIDAGCIWVNCSQPCFCQAPWGGNKRSGFGRELGEGGIDNYLSVKQVTEYISDEPWGWYQSPSKL

SEQ ID NO: 4002 - protein, 347 aa, Listeria monocytogenes str. 4b F2365
MKNTIKWIAIGFAGIILLPLLIVFFIYKKAVGKKEYNPEVLENLDEASQEFVKNTSPLSDVDSRYKYMRLATKALPSAKDIEIGDVENKKIDGPAGKIPIRIYTPQEDGPFEIIVYYHGGGFVLGGLQTHDAIARKLVQTTGARVVTVDYRLAPENPFPAAVEDAYAALLWVQNHRTSLRAKSSDIIVAGDSVGGNLATVVTQIAKSKGKPNITAQILLYPATDIFSRDASVLYPSMDEFAEGYVLTKESLDKFFKLYIANASDRKYDPLVAPIRSKDLVGLPKTFIATAEFDPLRDQGEAYAKKLKDAGVEVFAKRFEKVPHGFMTTNSEATDETYELISEFLEEK

SEQ ID NO: 4003 - protein, 344 aa, Arabidopsis thaliana
MLTQKKSFGRLSAVINPLDYIINPLDNPWFDLSEVSIESCYGSQTLPRSLRSRHWNLKTLKLKKLSFVDTDAYMWFESLKTLHLLSVRFSDDKSVQRLLSVCPKLEDLVVKRTTYVNVRIFSINVPSLRSLSIDYSWAVSRPADVHGFVIDAPSLRFMNIKDHFSNLLQFENMPKLVKANVEVDCDLSEKFIGSITSIQHISLCSKNSKIPYPSGTSFFYLEHLELCTCSQDWWNLLNRILEDAPRLQVLKLKLGNCVQCSTELMDYWNEPCSVPKCLSSHLEIFEWRHYKGTKQERKVAKYILAKASCLKVAIFSSVCIEKNLIFKKLENVDRGSKACELVFQ

SEQ ID NO: 4004 - protein, 435 aa, Arabidopsis thaliana
MEAARSGIEDVTSPDRISQLPNDLLFRILSLIPVSDAMSTSLLSKRWKSVWKMLPTLVYNENSCSNIGSLGFDQFCGRSLQLHEAPLLKTLTLELRKQTDSLDSSIFPNIHSTLLEFSIKSTGYPVYYSTISFPNNLDVFQTLVVLKLQGNICLDVVDSPVCFQSLKSLYLTCVNFENEESFSKLLSACPVLEDLFLQRLCSVGRFLFSISVPSLQRLTYTKEQAYYSNDEAILEITAPSLKHLNIFDRVGVFSFIEDMPKLVEASVRVKLSKNEKLPKVLTSVEHLSLDLYPSMVFHLDDRFISKQLLHLKLDIYDNFQSNLLLSLLKDLPNLQSLKLNHSHPSYNVEDQPCSVSEPSSVPECLSFHLETFQWIGYAGTFEEIAAAVYVLKNARCLKNATISLYSRGTENGLMMIKELESMSKGSIMCQLLVKF

SEQ ID NO: 4005 - protein, 441 aa, Arabidopsis thaliana
MKAPRLGSEEVSYSDRISYLPDDLLLRILSFIHTSDAISTSLLSKRWKFVWKMMPTLDLDEDSCRNIGTLRFDEGCCMFLKSHEAPVLTSLNLKLMTPSHDIDRLLSNIKPILHEITITSYRYSTIRFPRNLNVCQTLVVMKLQDKVLVDVSFPVCFRSLKSLHLTRVKYSCRESFTTLLSACPVLEDLDLFIGRVHYDCLNSFTIWVPSLQRLSICDESYRFRSTTFEISVPSLKYLKIACQDSCFKFVEDMPNLVEAHVEANQHETKNLLRFLTSVERLKDPDLTDRIFHQLLYLELHLHKRLNGDRILSLLKHSPNLQTLKLNEVNQNVAKPLRSIKDQPNISVRKPNSVPECLTFHLETLEWQGYAGRPEDKEIAVYILGNALRLNTATISRYFSSSRFRHHQKKDLKIVEELKSITKASTSCQLVLQQFIEIKYSM

SEQ ID NO: 4006 - protein, 488 aa, Arabidopsis thaliana
MGSKLKLYPLLNHSSVFHPDSRYQSAPTMEEEQQQLRVLFAKYEMGRLLGKGTFGKVYYGKEITTGESVAIKIINKDQVKREGMMEQIKREISIMRLVRHPNIVELKEVMATKTKIFFIMEYVKGGELFSKIVKGKLKEDSARKYFQQLISAVDFCHSRGVSHRDLKPENLLVDENGDLKVSDFGLSALPEQILQDGLLHTQCGTPAYVAPEVLRKKGYDGAKGDIWSCGIILYVLLAGFLPFQDENLMKMYRKIFKSEFEYPPWFSPESKRLISKLLVVDPNKRISIPAIMRTPWFRKNINSPIEFKIDELEIQNVEDETPTTTATTATTTTTPVSPKFFNAFEFISSMSSGFDLSSLFESKRKLRSMFTSRWSASEIMGKLEGIGKEMNMKVKRTKDFKVKLFGKTEGRKGQIAVTAEVFEVAPEVAVVELCKSAGDTLEYNRLYEEHVRPALEEIVWSWHGDNHNNNIVKSNGNYVSDENSGSDC

SEQ ID NO: 4007 - protein, 499 aa, Hordeum vulgare
MIGTRVLAHSRVDPAIRWGVAARGRVVFAAIRWGAAARGRVVFAAVRWGAAARGTKREAGQETSTSETKKTKRKWGRGFCGMASHEVEEPLTSETKKTKRKWGRGFCGMASHEAEEPLTSETKKKRKNVAASSEPDKKRWFKNKIWKKKKAKNEQLATLVKEISLATKLNSAMHVNINLSMNICPTQTYEEHSGTYLRNLAVIAVKQLDKDGLQGNREFLVEVLMLSLLHHPNLVTLLGYCTECDQKILVYEYMPLGSLQDHLLDLTPKSQPLSWHTRMKIAVDAARGLEYLHEVANPPVVYRDLKASNILLDGNFSAKLADFGLAKLGPVGDKTHVTTRVMGTYGYCAPEYAMSGKLTKMSDIYCFGVVLLELITGRRAIDTTKPTREQILVHWAAPLFKDKKKFTKMADPLLDSKYPLKGLYQALAISSMCLQEEAISRPLISDVVTALTFLADPNYDPPDDIEPLPISVPNYDKGISLREAEISLSGFEEKQVEDS

SEQ ID NO: 4008 - protein, 372 aa, Zea mays
LPSVAGQWQKGKLLGSGTFGCVYEATNRHTGALCAMKEVNIIPDDAKSAESLKQLEQEVKFLSQFKHENIVQYYGSDIIEDRFYIYLEYVHPGSINKYVKQHYGAMTESVIRNFTRHILRGLAFLHGQKIMHRDIKGANLLVDVQGVVKLADFGMAKHLSTAAPNLSLKGTPYWMAPEMVQATLMKDVGYDLAVDIWSLGCTIIEMFDGKPPWSDLEGPAAMFTVLHKDPPIPENLSNEGKEFLQCCFKRTPAERPTASELLDHPFIRNSSHYNKHGSIHSFAGIKVNDTTYSSRDNWPASKSDSNMKGKNTNVEPSRAARSSESTFRLAPLTIQEATPNFSPRPFVNSMQFTSVNPQPSPLPRPNGKEVLF

SEQ ID NO: 4009 - protein, 552 aa, Glycine max
VALVECVKAIQATKVVFNHLYDPVSLVRDHNIKEKLVEQGISVQSYNGDLLYEPWEVNSESGRAFTTFNAFWKKCLHMQMDIVSVVPPWQLIPAEGKIEECSLEELGLENESEKPSNALLGRAWSPGWRNADKALREFVELHLLHYSKKRLKVGGESTSLLSPYLHFGELSARKVFQVTCMKQILWTNEGNSAGEESANLFLRAIGLREYSRYLCFNFPFTHERALLGHLKFFPWNPDADIFKNWRQGRTGFPLVDAGMRELWATGWIHNRIRVIVSSFAVKMLLLPWKWGMKYFWDTLLDADLESDILGWQYISGGLPDGHELERLDNPEIQGVKFDPEGEYVRQWLPELARMPTEWIHHPWDAPLTVLRAAGVELGQNYPKPIIDIDLARERLTEAIFKMWESEAAAKAAGSEPRDEVVVDNSNTLENLDTRKVVVLGKAPCATISANDQKVPALQDSKNEPPTRKRPKHMIEEGQNQDHSQNHNKDTGLSSIDQDICSTADSSSCKKQCASTSSYSFSVPQQCSSSSNLKWPWQEKIDMEQSSSKDGAM

SEQ ID NO: 4010 - protein, 341 aa, Escherichia coli CFT073
MKALSKLKAEEGIWMTDVPVPELGHNDLLIKIRKTAICGTDVHIYNWDEWSQKTIPVPMVVGHEYVGEVVGIGQEVKGFKIGDRVSGEGHITCGHCRNCRGGRTHLCRNTIGVGVNRPGCFAEYLVIPAFNAFKIPDNISDDLASIFDPFGNAVHTALSFDLVGEDVLVSGAGPIGIMAAAVAKHVGARNVVITDVNEYRLELARKMGITRAVNVAKENLNDVMTELGMTEGFDVGLEMSGAPPAFRTMLDTMNHGGRIAMLGIPPSDMSIDWTKVIFKGLFIKGIYGREMFETWYKMAALIQSGLDLSPIITHRFSIDDFQKGFDAMRSGQSGKVILSWD

SEQ ID NO: 4011 - protein, 157 aa, Brassica napus
  misc_feature (137)..(137): Xaa can be any naturally occurring amino acid
MAAVTPLAKYKLVFLGDQSVGKTSIITRFMYDKFDTTYQATIGIDFLSKTMYMEDRTLRLQLWDTAGQERFRSLIPSYIRDSSVAVIVYDVANRQSFLNTSKWIEDVRTERGSDVIIVLVGNKTDLVDKRQVSIEEXDNKARDFGVIFIETSARQDL

SEQ ID NO: 4012 - protein, 250 aa, Zea mays
MVKAYPTVNEDYLKAVDKAKRKLRGLIAEKNCAPLMLRLAWHSAGTFDVATKTGGPFGTMKNPAEQAHGANAGLEIAIRLLEPIKEQFPILSYADFYQLAGVVAVEVTGGPDVPFHPGRQDKPEAPPEGRLPDATQGSDHLRQVFSTQMGLSDQDIVALSGGHTLGRCHKDRSGFEGAWTSNPLIFDNSYFKELLSGEKEGLLQLPSDKALLSDPSFRPLVDKYAADEDAFFADYAEAHLKLSELGFAEA

SEQ ID NO: 4013 - protein, 489 aa, Sinorhizobium meliloti 1021
MQSYQIREMATPLCQPAASHFIDGTFIEDRTGPEILSVNPVDGEIIAKLHGATSCIIEKAIASAKRAQKEWARKEPAERGRVLSRAADIMRARNRELSVLETRDTGKPISETLVADAASGADCLEYFGAIAATLSGDSIQFGEDWVYTRREPLGVCLGIGAWNYPIQIAAWKAAPALACGNAMIFKPSEVTPLSALKLAEILTEAGLPPGVFNIVQGAGDVGAELATHPAIAKVSLTGSVKTGARVASAAMAGIRPVTMELGGKSALIVFDDADVEAAVSGAILGNFYSAGQICSNGTRVFLQRGIREAFLARLLARVAALKIGDPMDEETDIGPLVSAAHRNRVATYVARAEVEGAYQMAPPRKLPPGDAWHEPVVFTNVTDWMTLAREEVFGPVMAVLDFDDEQDVVARANATDFGLAAGIFTRDLVRAHRLAAELEAGTVWINAYNLTPAGMAFGGIKRSGIGRENGRVAIDHYTQLKSVFVSMQT

SEQ ID NO: 4014 - protein, 576 aa, Zea mays
  misc_feature (497)..(497): Xaa can be any naturally occurring amino acid
LAARGGSNRDSSSRAPQGQPSRRRTRKLAPCSPAARAVPAMESFGVPPAPVAAPEKRKKPLDLKDPVPAAAANGGGATKASPAAKWAEKKKLVGGDAGYVLEDVLHLTDYLPQLPTYPNPLQDNPAYSVVKQYFVNPDDTVTQKIVVHKTSARGTHFRRAGPRQRVYFQPDEVNAAIVTCGGLCPGLNTVIRELVCGLYDMYGVTSVVGIEGGYKGFYSKNTVALTPRSVNGIHKRGGTVLGTSRGGHDTAKIVDCLQDRGINQVYIIGGDGTQKGASVIYEEEVRRQGLKCSVVGVPKTIDNDIAVIDKSFGFDTAVEEAQRAINAAHVEAESAENGIGVVKLMGRNSGFIAMYATLASRDVDCCLIPESPFYLEGKGGLLEFVERRLKDNGHMVIVVAEGAGQDLIARSMNFVDTQDASGNKLLLDVGLWLSQKIKDHFKKKPSFPITLKYIDPTYMIRAVRSNASDNVYCTLLAHSALHGAMAGYTGFTVAPVXGRHAYIPFYRITEKQNKVVITDRMWARVLCSTNQPCFLSHEDVENMKHDDDEHHHMHNTQLLEGGSSPVSKCNGSAAAV

SEQ ID NO: 4015 - protein, 107 aa, Glycine max
  misc_feature (5)..(5): Xaa can be any naturally occurring amino acid
  misc_feature (8)..(9): Xaa can be any naturally occurring amino acid
  misc_feature (11)..(11): Xaa can be any naturally occurring amino acid
  misc_feature (15)..(16): Xaa can be any naturally occurring amino acid
  misc_feature (25)..(25): Xaa can be any naturally occurring amino acid
  misc_feature (29)..(29): Xaa can be any naturally occurring amino acid
  misc_feature (37)..(37): Xaa can be any naturally occurring amino acid
  misc_feature (43)..(43): Xaa can be any naturally occurring amino acid
  misc_feature (46)..(46): Xaa can be any naturally occurring amino acid
  misc_feature (49)..(50): Xaa can be any naturally occurring amino acid
  misc_feature (67)..(67): Xaa can be any naturally occurring amino acid
  misc_feature (75)..(75): Xaa can be any naturally occurring amino acid
  misc_feature (79)..(79): Xaa can be any naturally occurring amino acid
  misc_feature (86)..(86): Xaa can be any naturally occurring amino acid
  misc_feature (89)..(89): Xaa can be any naturally occurring amino acid
  misc_feature (92)..(92): Xaa can be any naturally occurring amino acid
MSILXKGXXAXITEXXNDNLKEEFXLIRXIVDKYNYXAMDTEXPGXVLXXVGNMKNIDHYNYQTLTXNVDMLKLXQLGXTFYDENXNLXPAXGEPLLWQFNFRESTS

SEQ ID NO: 4016 - protein, 319 aa, Pinus radiata
MEITHTLLEDVPGFIQVYEDGFVARFDHRLTPASPQVASDGARSKDVVIDPVKGISARLFLPAELPLAQKLPLLFYFHGGGFCIGTTAWEGYHLFLSLLAATTRALVISVDYRLAPEHRLPAAYDDCFDAVEWVASGGGKAEPWLDAHADYGRCFLAGESAGGNIAHVVGSRTADQDLGPLKIRGLIVIHPYFGSEERIECEKVAAGDDAAALELNDLFWRLALPPGSDRDYPTCNPRGPRSADLRKVPLPPVLVTVAGLDLLKTRGLLYYELLQSCGKEAELMEAEGEIHAYHVFHPRSEATRLLQERMSQFIHRFDA

SEQ ID NO: 4017 - protein, 218 aa, Glycine max
  misc_feature (176)..(176): Xaa can be any naturally occurring amino acid
MVLRKVGKYEIGRTVGEGTFAKVKFAQNTESGESVAMKVLDRSAIIKHKMVDQIKREISIMKLVRHPYVVRLHEVLASRTKIYIILEFITGGELFDKIVSHGRLSEAESRRYFQQLIDGVDFCHSKGVYHRDLKPENLLLDSQGNIKISDFGLSAFPGQGVSLLRTTCGTPYYVAXGVLSTRGYYGASPDVWSCGVILYVLLAGYLPFDELDLPTFVQ

SEQ ID NO: 4018 - protein, 350 aa, Camellia sinensis
QIKVSTPLSSSIILDSFPPSQAFFNRSLNPVMVPLLSFLQSSGSSLMLNIYPYYDYMQSNGVIPLDYALFRPLPSNKEAVDANTLLHYSNVFDAMVDAAYFAMAYLNFTNIPVIVTESGWPSKGDSSEPDANLDNANTYNSNLIKHVLNKTGTPKHPGISVSTYIYELYNEDMKPGPLSEKNWGLFDANGAPIYILHLTGSGSVLANDTANQTYCTAKDGADAKMLQAALDWACGPGKVNCSALLQGQPCYEPDTVAAHATYAFDTYYQQMGKASGTCDFNGVATITTTNPTHGSCVFPGSNGKNGTFLNSTAPSLNSTSSGCPARYMRGSASASAIVAVGILSWSLVFL

SEQ ID NO: 4019 - protein, 370 aa, Brucella melitensis 16M
MASRKLLLLPGDGIGPEAMAEVRKVIAFLNSDLNLGFETEEGLVGGCAYDAHGQAISDADMEKALAADAVLFGAVGGPKWDSVPYEVRPEGGLLRLRKDMQLYANLRPAICYPALAHSSSLKPEVIEGLDILILRELTGGVYFGEPKEIIDLGNGQKRGIDTQVYDTYEIERIADVAFELARTRRNKVTSMEKRNVMKSGVLWNQGVTARHKEKHADVQLEHMLADAGGMQLVRWPKQFDVILTDNLFGDLLSDVAAMLTGSLGMLPSASLGAADSKTGKRKALYEPVHGSAPDIAGKGIANPIAMIASLAMCLRYSFGLVAEADRLEAAIAGVLDDGIRTADIWSEGNTKVGTTEMGDAILAKFKALSA

SEQ ID NO: 4020 - protein, 646 aa, Glycine max
  misc_feature (232)..(232): Xaa can be any naturally occurring amino acid
MSSAEKPSSKGQAWFCTTGLPSDIVVEVDDMTFHLHKFPLMSKSRKLHLLITQQEAASNSTVPQQQQQQQETEDEDEIVEEQCHVTFTGFPGGSEAFEMAAKFCYGVKIDLTPSNVAALRCAGEFLEMTEDYSEDNLVSKTEGFLSQHVLKNLKDSVKTLKSCDSLMPMAENLGITQRCVDSVVSRASSADPALFGWPVSDATSVSKQVLWNGLDGDGRRKVGAGAGESWFXEDLALLRLPLFKRLILAMRSAELSPEIIETCLMYYAKKYIPGVSRSNRKPLPSSSSSSSVATEAEQKEILETLVSNLPLEKSSKAATATRFLFGLLRTTNILNASEACRDALEKKIGLQLEEATLDDLLVPSYSYLNETLYDVDCVARILGHFLEEERNVAAIDGRAPRSPGLMLVGKLIDGYLSEIATDANLKPSKFYDLAISVPDRARLFHDGLYRAVDVYLKAHPWVFEAEREKICGLLDCQKLTLEACTHAAQNERLPLRAVVQVLFFEQLQLRQAIAGTLMAAEAAAEPGRQSAALEREAEDGRGEGLGLEHVQERNGTWRVAVRENQVLRLDMDSMRTRVHQLERECSSMKRVISKFDKFAASGGGWRASLGRKFGCKFKTQVCDSHESTAVDTRKGRHHQQHHPHHD

SEQ ID NO: 4021 - protein, 99 aa, Glycine max
MSAVNITNVAVLDNPTAFLNPFQFEISYECLVPLDDDLEWKLTYVGSAEDETYDQQLESVLVGPVNVGTYRFVFQADPPDPLKIREEDIIGVTVLLLTC

SEQ ID NO: 4022 - protein, 177 aa, Lemna gibba
MASSMMASTAAVARAGPAQSSMVAPFNGLRSSVAFPATRKANNDLSTLPSNGGRVSCMQVWPPEGLKKFETLSYLPPLSVEDLAKEVDYLLRNDWVPCIEFSKEGFVYRENHASPGYYDGRYWTMWKLPMFGCTDASQVIAEVEEAKKAYPEYFVRIIGFDNKRQVQCISFIAYKPT

SEQ ID NO: 4023 - protein, 462 aa, Arabidopsis thaliana
MASNGVDEQIKLVEGPAGYVLEDVPHLSDYILDLPTYPNPLQSNAAYSVVRQYFVDEDDTVQEKIVVHKDSPRGTHFRRAGPRQKVYFKPSDVRACIVTCGGLCPGLNTVIREIVCGLHFMYGVTEVIGVDCGFRGFYSKNTVALTPKTVSDIHKRGGTILGTSRGGHDTSKIVDNIQDREINQVYIIGGDGTQKGANAIYKEIRRRGLKVAVAGIPKTIDNDIPVIDKSFGFDTAVEEAQRAINAAHVEATSVENGIGIVKLMGRYSGFIAMYATLASRDVDCCLIPESPFYLEGKGGLYEFIAKRLRENGHMVIVIAEGAGQDLVAESIEQQDASGNKLLKDVGLWMSLKIKEYFAKHNVMDITLKYIDPTYMIRAIPANASDNVYSTLLAQSAVHGAMAGYTGFVSGLVNGRHTYIPFNRITERQNKVVITDRMWARMLSSTNQPSFMNPPKGTTEFTD

SEQ ID NO: 4024 - protein, 177 aa, Lemna gibba
MASSMMASTAAVARVGPAQTNMVAPFNGLRSSVAFPATRKANNDLSTLPSNGGRVSCMQVWPPEGLKKFETLSYLPPLSVEDLAKEVDYLLRNDWVPCIEFSKEGFVYRENHASPGYYDGRYWTMWKLPMFGCTDASQVIAEVEEAKKAYPEYFVRIIGFDNKRQVQCISFIAYKPT

SEQ ID NO: 4025 - protein, 323 aa, Ralstonia eutropha JMP134
MPAVPLDPQVAALLDLIARAKRPPIHVMDVEDAKIAYEKSAPILDISPLPMHAVDDLHVCARDGHGIPVRLYAPREASWADPLPMLVYFHGGGFTVGSVNSHDALCRMQAAHADCMVLSVDYRLGPQWRFPTAANDAFDVLHWVFEEAARLGADPARIALGGDSAGGTLATACAVHARDSGLAPVLQLLIYPGTCARQDTPSHGALAEGYLLTADMIQWFFSHYLDQESSRDDWRFAPLDGGGSGADVRGCCPAWIAVAGYDPLHDEGVAYADKLRAAGVTVTLADYAGMIHDFFKMGRFVPAVAQAHADAVAALRAAFGTGQ

SEQ ID NO: 4026 - protein, 151 aa, Desulfitobacterium hafniense DCB-2
MGKTLIHRGPDQNGLEYGEHFAFQHNRLAIIDIEKGRQPMTATHQGYDYTIVYNGELYNTADLRQELLEHGVKFKTYCDTEVVLYAYIIWGEQCSSKLNGIYAFVIYDSKEKKTYLSRDRFGVKPFFYTFVEGALLFASEIKALLKHPQVK

SEQ ID NO: 4027 - protein, 419 aa, Sulfolobus tokodaii str. 7
MLSRKIIEESDIYLATSTRDPELFPLVIDHGEGVWIYDVDGNKYLDFTSGIGVNNLGWPSHPEVIKIGIEQMQKLAHAAANDFYNIPQLELAKKLVTYSPGNFQKKVFFSNSGTEAIEASIKVVKNTGRKYIIAFLGGFHGRTFGSISLTASKAVQRSIVGPFMPGVIHVPYPNPYRNPWHINGYENPSELVNRVIEFIEDYIFVNLVPPEEVAGIFFEPIQGEGGYVIPPKNFFAELQKLAKKYGILLVDDEVQMGLGRTGKLFAIENFNTVPDVITLAKALGGGIMPIGATIFRKDLDFKPGMHSNTFGGNALACAIGSKVIDIVKDLLPHVNEIGKIFAEELQGLADDVRGIGLAWGLEYNEKKVRDRIIGESFKRGLLLLPAGRSAIRVIPPLVISEEEAKQGLDILKKVIKVVK

SEQ ID NO: 4028 - protein, 237 aa, Neurospora crassa
MATATESAPRNHLADKPENSMGGRNLSIITPTIQMSAPPGDPMDITSSNSNSSSNSNSSSINNNNATMAAPSNSDSLPPPKSPVEDTLNAQAAPNGRPQLSSANDQLSPDNIIMPAPAAAAPAVHQPKIVQTAFIHKLYNMLEDKSIQHLISWSPTSESFVMQPSQEFSKASSQYFKHTNISSFVRQLNMYGFHKGKESPDVAGYQQSLTWSKSERCLPPWSSRRYHLGVQAWQRQL

SEQ ID NO: 4029 - protein, 184 aa, Triticum aestivum
  misc_feature (41)..(41): Xaa can be any naturally occurring amino acid
  misc_feature (80)..(80): Xaa can be any naturally occurring amino acid
  misc_feature (99)..(99): Xaa can be any naturally occurring amino acid
  misc_feature (118)..(118): Xaa can be any naturally occurring amino acid
MAGVGRNMVAPLLVLNLIMYLIVIGFASWNLNHFINGLTNXRPGVGGNGATFYFLVFAILSRGSLAPLSKLAGVHHVRTXWRGDSLATSASSSLVAWGXPPLAFGLACKEIHIGGYRXGWRLRVLEAFVIILAFTQLLYVIALHSGLFGNQFGGNHAGGYPAEHAYGAGDPHNKGMGTGGVARV

SEQ ID NO: 4030 - protein, 497 aa, Arabidopsis thaliana
MPQAPMPEFSSSVKLKYVKLGYQYLVNHFLSFLLIPIMAIVAVELLRMGPEEILNVWNSLQFDLVQVLCSSFLVIFISTVYFMSKPRTIYLVDYSCYKPPVTCRVPFATFMEHSRLILKDKPKSVEFQMRILERSGLGEETCLPPAIHYIPPTPTMDAARSEAQMVIFEAMDDLFKKTGLKPKDVDILIVNCSLFSPTPSLSAMVINKYKLRSNIKSFNLSGMGCSAGLISVDLARDLLQVHPNSNAIIVSTEIITPNYYQGNERAMLLPNCLFRMGAAAIHMSNRRSDRWRAKYKLSHLVRTHRGADDKSFYCVYEQEDKEGHVGINLSKDLMAIAGEALKANITTIGPLVLPASEQLLFLTSLIGRKIFNPKWKPYIPDFKLAFEHFCIHAGGRAVIDELQKNLQLSGEHVEASRMTLHRFGNTSSSSLWYELSYIESKGRMRRGDRVWQIAFGSGFKCNSAVWKCNRTIKTPKDGPWSDCIDRYPVFIPEVVKL

SEQ ID NO: 4031 - protein, 493 aa, Mycobacterium avium subsp. paratuberculosis str. k10
MSDIQTQAKTEYDKLFIGGKWTEPSTSEVIEVHCPATGEYVGKVPLAAAADVDAAVAAARAAFDNGPWPTTPPKERAAVIANALKVMEERKDLFTGLLAAETGQPPTSVETMHWMSSIGALNFFAGPAVDQVKWKEVRTGGYGQSIVHREPIGVVGAIVAWNVPLFLAVNKLGPALLAGCTVVLKPAAETPLSANALAEAFAEAGLPEGVLSVVPGGIETGQALTSNTDVDIFSFTGSSAVGREIGRRGADMLKPCTLELGGKSAAIVLDDVDLPSALPMLVFSGIMNSGQACVAQTRILAPRSRYDEIVDAVSTFVQSLPVGLPSDPAAQIGSLISEKQRARVEGYIAKGIEEGARLVCGGGRPEGLDSGFFVQPTVFADVDNKMTIAQEEIFGPVLSIIPYDTEEDAIKIANDSVYGLAGSVWTADVQRGIAVSEKIRTGTYAINWYAFDRCCPFGGYKNSGIGRENGPEGVEHFTQQKSVLMPMGYTLEG

SEQ ID NO: 4032 - protein, 183 aa, Fusobacterium nucleatum subsp. vincentii ATCC 49256
MKIYDFSVKNRKDEDISLKSYKGKVLLIVNTATRCGFTPQYDELENLYEKYNKEGFEVLDFPCNQFGNQAPESDEEIHTFCQLNYKVKFDQFAKVEVNGENALPLFQYLKEQKGFSGFDPKHKLTSVLTEMLSKNDPDFAKKSDIKWNFTKFLVDKSGNVVARFEPTTSVKVIEQEIKKLLEK

SEQ ID NO: 4033 - protein, 349 aa, Nostoc punctiforme PCC 73102
MELIDRFKALLAALLYGQEDLRLEQVADPTPAAGEVVIQVGAATTCGTDLKVWRRGGHAKMLKPPTLFGHEGAGRIVALGAGVTNWQVGDRIVANNSAPCMKCFFCQRQEYSLCPNLTWNNGTFAEYLKIPAPIVEHNLLQIPDELPWELAAMTEPLACVLHGVARSNIKPKDRVVVLGDGAIGLMFVAALSEKAEVLLWGGNNHRLEIGQKLGATQTFNYHQIPDIPNLVKELTQGWGADVAIEATGVPSVWETAIACARPGATVNLFGGCPRDTSITVNTEQLHYSELTIKGVFHNTPEYVREALALIASRKIPFELLISEQRPLKDLEQVFCEMKARQVIKAAMIP

SEQ ID NO: 4034 - protein, 323 aa, Pichia stipitis
  misc_feature (58)..(58): Xaa can be any naturally occurring amino acid
MSSNSLEQLKATGTVIVTDTGEFDSIAKYTPQDATTNPSLILAAAKKPEYAKVIDVAXEYAKDKGSSKKEKAEIALDRLLIEFGKNILAIVPGRVSTEVDARLSFDKEATIKKALELIALYESQGISKDRILIKIASTWEGIQAARELEAKHGIHCNLTLLFSFVQAVACAEAKVTLISPFVGRILDWYKASTGKTYEGDEDPGVISVRAIYNYYKKYGYKTIVMGASFRNTGEIKALAGCDYLTVAPKLLEELLNSTEPVPQVLDAASASATDVEKVSYVDDEATFRYLFNEDAMATEKLAQGIRAFGKDAVTLLEQLEARF

SEQ ID NO: 4035 - protein, 123 aa, Lactobacillus delbrueckii subsp. lactis
  misc_feature (99)..(99): Xaa can be any naturally occurring amino acid
  misc_feature (109)..(109): Xaa can be any naturally occurring amino acid
MKLQTKAMLITYPDSLGHNLKDLSQVMDRYFSKAIGGIHLLPFFPSHGDRGFSPMTYEKVAPEFGTWSDVEKLGEQYYLMFDFMINHISAHSDYYLDLXKNKEKSPWRXLFLSWDKFWPAGRP

SEQ ID NO: 4036 - protein, 493 aa, Triticum aestivum
MDPNSFKTGGLLLPTIERRCASPPSVIVIGGGISGIAAARVLSNSSFEVTVLESRDRIGGRVHTDYSFGCPIDMGASWLHGVSNENSLAPLIGHLGLRLYHTSGDNSVLYDHDLESCSLFDKNGVAVPMETAAKVGVIFEKILKETVKLRDEQEHDMPLEQAISMVLERHPDLKLEGLDDRILQWCVCRLEAWFAADADEISLKNWDQEHVLTGGHGLMVDGYFPVIQALSQGLDIRLNQRVKKIARQQKGVTVTIEDGTQYSADACIITVPLGVLKANVIKFEPELPSWKSSAIADLGVGIENKVAMHFDKAFWPNVQVLGMVGPTPKTCGYFLNLHKATGHPVLVFMAAGRFAQDVEKLSDKEAVELVMCHLRKMIPDATEPTQYLVSRWGSDPNSLGSYSCDLVGKPSDVCERFSAPVESVLYFAGEAASAEHSGAVHGAYSSGMNAGKECRKKLFINKGVLNLTRLAPRLSRNWGTFSPSPNWPPQGIR

SEQ ID NO: 4037 - protein, 450 aa, Ralstonia solanacearum
MTPSTTSVFHRDPRKTLPTAVGGESMMLIDAEGKRYLDASGGAAVSCLGHGHPRVVEAICKQVRALAYAHTSFFTTAVAEELAARLAAAAPGDLGHVYFVSGGSEAIEAALKLARQYFVEIGQPQRQYFIARRQSYHGNTLGALAIGGNAWRREPFLPLLVPAHHVSPCFAYRERRDGETDAQYVQRLADELDAKIVELGADRVAAFIAETVVGATAGAVPPVADYFRKIRAVCDRHGVLLILDEVMSGMGRTGHLFACEEDGVVPDLIAIAKGLGGGYQPIGAMIASDRIYDAITRGSGFFQHGHTYIGHATACAAALEVQKVIAEENLLANVLARGEQLRAALRERFAAHPHVGDVRGRGLFVGVELVADRGTKAPLPPARKTHARVRAEAMQRGLMVYPMGGTIDGQRGDHILLAPPFIATAQDIDAIVARLGDAVEAATANALEAA

SEQ ID NO: 4038 - protein, 294 aa, Arabidopsis thaliana
  misc_feature (182)..(182): Xaa can be any naturally occurring amino acid
MAIPTETQHQEKEASDASAAAAQKRWTLSDFDIGKPLGRGKFGHVYLAREKRSNHVVALKVLFKSQLQQSQVEHQLRREVEIQSHLRHPNILRLYGYFYDQKRVYLILEYAARGELYKDLQKCKYFSERRAATYVASLARALIYCHGKHVIHRDIKPENLLIGAQGELKIADFGWSVHTFNXRRTMCGTLDYLPPEMVESVEHDASVDIWSLGILCYEFLYGVPPFEAMEHSDTYRRIVQVDLKFPPKPIISASAKDLISQMLVKESSQRLPLHKLLEHPWIVQNADPSGIYRV

SEQ ID NO: 4039 - protein, 85 aa, Glycine max
  misc_feature (13)..(13): Xaa can be any naturally occurring amino acid
  misc_feature (82)..(82): Xaa can be any naturally occurring amino acid
  misc_feature (84)..(84): Xaa can be any naturally occurring amino acid
MVLESTMVCVDKXEYMRNGDFLPTRLQAQQDAVNIVCHSKTRSNPENNVGLITLANDCEVLTTLTPDTGRILSKLHTVQPKXNXT

SEQ ID NO: 4040 - protein, 281 aa, Cucumis melo
TLEDGMKVAVKRGNPRSEQGLAEFRTEIEMLSKLRHRHLVSLIGYCDERSEMILVYEYMANGPLRSHLYGTDLPPLSWKQRLDICIGAARGLHYLHTGAAQSIIHRDVKTTNILLDENFVAKVADFGLSKTGPSLDQTHVSTAVKGSFGYLDPEYFRRQQLTEKSDVYSFGVVLMEVLCTRPALNPVLPREQVNIAEWAMTWQKKGMLDHIMDPNLVGKVNPASLKKFGETAEKCLAEYGVDRPSMGDVLWNLEYALQLEETSSALMEPEDNSTNQSLPSN

SEQ ID NO: 4041 - protein, 496 aa, Pseudomonas sp. VLB120
MNSSLSAIDGLRLPHQMLIGGQWVSAQSGKTLNVYNPATGDILTEVPDGDVEDVNAAVESAAATLRSDTWRPCLPVLASVFCCAWRISSEVHGDELARLETLNNGKLLIYSKLMEVGASAQWLRYMAGWATKLTGSTLDLSLPLPPEVRSRASTQRVPVGVVAAIIPWNFPLLMAVWKIAPALACGNTVVLKPAEETPLTALRLAELAMEAGLPAGALNVVTGRGETAGDALVRHPKVAKVAFTGSTEVGRIIGSACGRSLKAVSLELGGKSPVIVLADCDPQEAAEGAAAAIFFNHGQVCTAGSRLYVHESIYEDVIQRLAVIGESIVVGSGLEQGVHMGPMVSKKHHENVLRHIRNGIEDGADLICGGTEAPCAQGFFVKPTIFANREKKDIRLLSQEVFGPVLVATPFSDIAEVVNEANRSVYGLGASIWTNDLSAALRINDELEAGTVWVNTHNMVDPNLPFGGFKDSGVGREHGAAAIEHYTTTRSLVIAY

SEQ ID NO: 4042 - protein, 429 aa, Xylella fastidiosa Dixon
MSDLDKVTLNAGETSLVLPVLKPTLGNGCVDIAKLTKETGLFTYDSGFTATASCKSAITYIDGEKGVLLYRGYPIEQLAEHSSFLEVAYLLMNGELPRKDEFAKFDDEITHHTMMHESLKNFLGGFHYDAHPMAMLAASVASLSAFYHDTLDLNDLEQRRLAAIRLIAKVPTLAAAVHRYSIGWPIRYPRNNLGYVERFLHMMFEVPSEPLQLNPVVTKALDLLFILHADHEQNASTSTVRLVGSTGANPYASVAAGITALWGPAHGGANEAVLKMLEEIGDAKNVDLVIAKAKTKDKNSPFRLMGFGHRVYKHFDPRAKIIRETAHTVLGELGVNDPLLEVALKLEEVALKDDYFVQRKLYPNVDFYSGIIYKAINIPLEMFTVMFAIARTAGWVSHWLEQQVDPEMKISRPRQIYTGHSERDYKDAR

SEQ ID NO: 4043 - protein, 456 aa, Brucella suis 1330
MTAQPNSLEARDIRYHLHSYTDAVRLEAEGPLVIERGDGIYVEDIAGKRYIEAMSGLWSVGVGFSEQRLAEAAARQMKKLPFYHTFSYRSHGPVIDLAEKLVAMAPVPMNKAYFTNSGSEANDTVVKLIWYRSNALGEPERKKIISRKRGYHGVTIASASLTGLPNNHRSFDLPIDRILHTGCPHHYHDALPGESEEQFATRLANELEQLILAEGPHTIAAFIGEPVMGAGGVVVPPKTYWEKVQAVLGRYNILLVADEVICGFGRTGNLFGCQTFDIKPDILVMSKQLSSSYLPISAFLINERVYAPIAEESHKIGTLGTGFTASGHPVAAAVALENLAIIEERDLVANARERGARMQKRLRELQDHPLVGEVRGVGLIAGVELVIDKEAKTGLEQPGALGARANAALQERGVISRAMGDTLAFCPPLIINDQQVDTMVSALEAALNDVQASLGK

SEQ ID NO: 4044 - protein, 355 aa, Verticillium dahliae
MSRSNAPNPSGSRKISFNVSEQYDIQDVVGEGAYGVVCSAIHKPSGQKVAIKKITPFDHSMFCLRTLREMKLLRYFNHENIISILDIQKPRGYDTFNEVYLIQELMETDMHRVIRTQDLSDDHCQYFIYQTLRALKAMHSANVLHRDLKPSNLLLNANCDLKVCDFGLARSAASQEDNSGFMTEYVATRWYRAPEIMLTFKEYTKAIDVWSVGCILAEMLSGKPLFPGKDYHHQLTLILDVLGTPTMEDYYGIKCRRAREYIRSLPFKKKVPFRTLFPKTSDLALDLLEKLLAFNPVKRITVEEALKHPYLEPYHDPDDEPTAPPIPEEFFDFDKHKDTLSKEQLKQLIYQEIMR

SEQ ID NO: 4045 - protein, 286 aa, Oryza sativa (japonica cultivar-group)
MHTYIYTPRAAELEHSHSASATRSHSLGQAPPSLDRSRAAMDMAGHEVNSSSSSSGAESSSSSSGRQQYKKRPAGRTKFRETRHPVYRGVRRRGGAGRWVCEVRVPGKRGARLWLGTYVTAEAAARAHDAAMIALRGGAGGGGAACLNFQDSAWLLAVPPAAPSDLAGVRRAATEAVAGFLQRNKTTNGASVAEAMDEATSGVSAPPPLANNAGSSETPGPSSIDGTADTAAGAALDMFELDFFGEMDYDTYYASLAEGLLMEPPPAATALWDNGDEGADIALWSY

SEQ ID NO: 4046 - protein, 348 aa, Triticum aestivum
  misc_feature (66)..(66): Xaa can be any naturally occurring amino acid
LCPGLNDVIRQVVFTLATYGVKNIVGIPFGFRGFFEKCLKEMPLSRNLLENINLAGGSFLRVSRGXAKTSEIVHSIQATRIDMLFVLGGNGTHAGANAIHDECRKRKLKVSVVAVPKTIDNDIPLMDKTFGFDTAVEEAQRAINSAYIEARSAYHGIGLVKLMGRSSGFIAMHASLSSGQVDVCLIPEVSFALDGEYGVLQHLEQLIKNKGFCVVCVAEAAGQELLQNSGATDASGNAILSDIGVHMQQKIKTHFKGIGVHADIKYIDPTYMVRACRANASDAILCTVLGQNAVHGAFAGFSGITSCICNTHYVYLPVTQVITAPKRVNHKGRMWHRCLTSTGQPDFR

SEQ ID NO: 4047 - protein, 106 aa, uncultured Rickettsia sp.
MLKEIGSSENIPKYIAKAKDKNDPFRLMGFGHRVYKNYDPRAAVLKETCKEVLKELEQLENNPLLQIAIELEAIALKDEYFIERKLYPNVDFYSGIIYKAMGIPSQ

SEQ ID NO: 4048 - protein, 227 aa, Lactobacillus plantarum WCFS1
MNQDQLKQLVGQKAVEYIQDGMQVGLGTGSTVKFMVDALGERVKNEHLNIVGVSTSDRTAAQAKALGIPMKSVDEVDHLDLTIDGADEIADDFQGVKGGGAALLFEKIVAINSDKVMWIVDESKMVHQLGAFGLPVEVIPYGSQHVFEKMAARGYNPVFRKVNDELVRTDSNNIIIDLHIDPITDPHALAEDLIHMVGVVEHGLFLDMVNTVIVGHANGPEVIEARP

SEQ ID NO: 4049 - protein, 462 aa, Glycine max
MESKPHVLMQRYELGRLLGQGTFGKVYYARSTITNQSVAIKVIDKDKVMRTGQAEQIKREISVMRLARHPNIIQLFEVLANKSKIYFVIEYAKGGELFNKVAKGKLKEDVAHKYFKQLISAVDYCHSRGVYHRDIKPENILLDENGNLKVSDFGLSALVDSKRQDGLLHTPCGTPAYVAPEVIKRKGYDGTKADIWSCGIVLFVLLAGYLPFHDPNLIEMYRKISKAELKCPNWFPPEVCELLGMMLNPNPETRIPISTIRENSWFKKGQNIKNKRPVVENNTVSSSSTVLLDQNDCDGLAAEANGESVVPLSINAFDIISRSVGFDLSRFFDESFKKKEARFSSRLPANVIISKLEDIANQLRMKIKKKAAGLLKLESLNEGRKGVLSIDAEIFEVTPCFHMVEVKKSNGDTLEYQKILKEDIRPALQDIVWVWQSDQQLQSQQSEQQQQTDDQQQQQPQS

SEQ ID NO: 4050 - protein, 205 aa, Triticum aestivum
MGERVKGTVKWFNVTKGFGFISPEDGSEDLFVHQSAIKADGYRSLNENDVVEFEVITGDDGRTKAADVTAPGGGALAGGSRPGDGGGDRGGRGGGGYGGGGYGGGGGGYGGGGGGYGGGGGSYGGGGGYGGGGGGGRYGGGGGGGRECYKCGEEGHISRDCPQGGGGGGGGYGGGGGRGGGGGGGGCFSCGESGHFSRECPNKTN

SEQ ID NO: 4051 - protein, 106 aa, uncultured Rickettsia sp.
MPKEIGSSENIPKYIAKAKDKNDPFRLMGFGHRVYKNYDPRAAVLKETCKEVLKELEQLENNPLLQIAIELEAIALKDEYFIERKLYPNVDFYSGSIYKAMGIPSQ

SEQ ID NO: 4052 - protein, 429 aa, Sinorhizobium meliloti
MTDFYKLVPNAPEGRFDGIERPYSAEDVKRLRGSVEIRYSLAEMGANRLWKLIHEEDFVNALGALSGNQAMQMVRAGLKAIYLSGWQVAADANTASAMYPDQSLYPANAAPELAKRINRTLQRADQIETAEGKGLSVETWFAPIVADAEAGFGGPLNAFEIMKAFIEAGAAGVHYEDQLASEKKCGHLGGKVLIPTAAHIRNLNAARLAADVMGTPTLVIARTDAEAAKLLTSDIDERDRPFVDYDAGRTVEGFYQVKNGIEPCIARAIAYAPHCDLIWCETSKPDLEQARKFAEGVHKAHPGKLLAYNCSPSFNWKKNLDDATIAKFQRELGAMGYKFQFITLAGFHQLNYGMFELARGYRDRQMAAYSELQEAEFAAEANGYTATKHQREVGTGYFDAVSVAITGGQSSTTAMKESTEHDQFRPAAE

SEQ ID NO: 4053 - protein, 369 aa, Arabidopsis thaliana
MIENDDSPQHPSLFFTDFTRANSHVRVLHHKFLGKGVYGSVDLIRYTKTDGSSLQAAVKTSYAEDLEEYDALKREIQILSELKGYPNIVICYGDDLEEDFNEHGHKVYKLLLEYANEGSLSSFMENYPDRKLPDPMIRDFTRMILEGLVSMHSHGYVHCDLKSDNLLIFSRKDSASCELKIFDFGNCRQVGEVPDHWKSDYPYVGTPESFFDGVAKKTLDLWSLGCLVLKIYTGEQPWERVTSVDFVNFLSDGEAPNIPEYVPCDAREFIETCFAREHEKRGTASELLLHPFLCQKQPLLVKLKLRIKQASKITMGIREKPLTLKMFLSKPPQLKKLLSKLLRLKKMIHPKPLELDSSFVSYSSDLCLL

SEQ ID NO: 4054 - protein, 264 aa, Triticum aestivum subsp. compactum
NMQVDPSSQVQWPQQQPVPQPHQPFSQQPQQTFPQPQQTFPHQPQQQFPQPQQPQQQFLQPQQPFPQQPQQPYPQQPQQPFPQTQQPQQLFPQSQQPQQQFSQPQQQFPQPQQPQQSFPQQQPPFIQPSLQQQVNPCKNFLLQQCKPVSLVSSLWSMIWPQSDCQVMRQQCCQQLAQIPQQLQCAAIHTVIHSIIMQQEQQQGMHILLPLYQQQQVGQGTLVQGQGIIQPQQPAQLEAIRSLVLQTLPTMCNVYVPPECSIIKA

SEQ ID NO: 4055 - protein, 106 aa, Zea mays
  misc_feature (47)..(47): Xaa can be any naturally occurring amino acid
MTVSRTHRRSFEHRGGREMKEGTANCIDILIAIILPPLSAFLKFDCXVELWLCLLLMFLAYLPGIIYWIYVISLDYPDIAVYRYKAKELGDQAAKAMYMNVLLRSL

SEQ ID NO: 4056 - protein, 283 aa, Triticum aestivum subsp. compactum
MKTLLILTILAMAITIGTANMQVDPSSQVQWPQQQPVPQPHQPFSQQPQQTFPQPQQTFPHQPQQQFPQPQQPQQQFLQPQQPFPQQPQQPYPQQPQQPFPQTQQPQQLFPQSQQPQQQFSQPQQQFPQPQQPQQSFPQQQPPFIQPSLQQQVNPCKNFLLQQCKPVSLVSSLWSMIWPQSDCQVMRQQCCQQLAQIPQQLQCAAIHTIIHSIIMQQEQQEQQQGMHILLPLYQQQQVGQGTLVQGQGIIQPQQPAQLEAIRSLVLQTLPTMCNVYVPPECSI

SEQ ID NO: 4057 - protein, 464 aa, Lycopersicon esculentum
MATCGIDWKSVLPNCFKGNNVRSEAKVMENSKQMNSDHHRLAFSDISTDSRSVLISLDDLSSNAVIGSNLHVFTYEELKLITSDFSSANFLGKGGFGPVHKGFIDDKIKPGLDAQPVAVKLLDLDGNQGHQEWLTEVVFLGQLRHHHLVKLIGYCWEEEQRLLVYEYMARGNLEDQLFSRYSSCLPWLTRIKIMVGAAKGLAFLHGEEKPVIYRDFKASNILLDSDYRAKLSDFGLAKDGPEGDDTHVSTRVMGTHGYAAPEYIMTGHLTSKSDVYSFGVVLLELITGRRAMDKKRPLKERILVDWARPMLRDPHKLDRIMDPRLEGQYSTQGAKKVAALAYQCLSHHPRSRPTMSNIVKILEPVLDMKDIPMGPFVYVVPSSKPDKGTEIGELKTKVNDENKAGVRENEVDNAGENREDGNAKQRRVGHRYKHRLKTDASVYSDTHLYHKTVKHERTNKLNSY

SEQ ID NO: 4058 - protein, 161 aa, Triticum aestivum
  misc_feature (90)..(90): Xaa can be any naturally occurring amino acid
MSDTDEHHFESKADFGASKTYPQQAGAIRMGGHIVIKARPCKAVEVYTSKTGKHGHAKCHFVAIDIFNGKKLEDIVPSSHNCDVPHVDRXDYQLIDITDDGYVSLLTESANTKDDLKLPTDDALLGQSKIGFADGKDLILSGMAAMGEEQICAEKEIADGT

SEQ ID NO: 4059 - protein, 205 aa, Triticum aestivum
QQSFPQQPEQIIPQQPQQPFPLQPQQPFPQQPEQIISQQSQQPFSLQPQQPFSQPQQPLSQQPGQIIPQQSQQPCPLQPQQPFPQQPEQIIRQQPQQPFLLQSQQPFHQQPEQIISQQPQKPFSLQPQQPFSQPQQPFPQQPGQIIPQQPQQPFSLQPQQPFPQQLQQPFALQPQQSFPQQPQQPFPQPQQAFPEQAEQIIPQQP

SEQ ID NO: 4060 - protein, 367 aa, Rosa hybrid cultivar
MERLNSFRHLNQKWSNGEHSNELLHAQAHIWNHIFSFINSMSLKSAIQLGIPDIINKHGYPMTLSELTSALPIHPTKSHSVYRLMRILVHSGFFAKKKLSKTDEEGYTLTDASQLLLKDHPLSLTPYLTAMLDPVLTNPWNYLSTWFQNDDPTPFDTAHGMTFWDYGNHQPSIAHLFNDAMASDARLVTSVIINDCKGVFEGLESLVDVGGGTGTLAKAIADAFPHIECTVLDLPHVVADLQGSKNLKYTGGDMFEAVPPADTVLLKWILHDWSDEECIKILERSRVAITGKEKKGKVIIIDMMMENQKGDEESIETQLFFDMLMMALVGGKERNEKEWAKLFTDAGFSDYKITPISGLRSLIEVYP

SEQ ID NO: 4061 - protein, 350 aa, Staphylococcus epidermidis ATCC 12228
MKAAVWYGQKDVRVEDREPKAIKDNEVQVKVSWAGICGTDLHEYLEGPIFISTDQPDPLLGQTAPVTLGHEFSGVIENVGKDVSRFKKGDRVVVNPTVSKREKPENVDLYDGYSFIGLGSDGAFAEFTNAPETNVYHLPDNVSAREGALVEPTAVAVQAVKEGELLFGDTVAVFGAGPIGLLTIVAAKAAGASKIFVFDLSEERLAKAKSVGATHVYNSGNVDPVQTVYEHTDNGVDVSFEVAGVGITLQQSIEVTRPRGTAVIVSIFGHPVEFNPLLQMNKGVKLTTTIAYTPTTFQQTIDLIANGSLNVKDVVTDQIELENIVESGFNQLVNDKSQAKILVRLNGDQK

SEQ ID NO: 4062 - protein, 57 aa, Zea mays
MPFTASDICKIILAIILPPVGVFLERGCGADFFINILLTILGYIPGIIHALYIILKY

SEQ ID NO: 4063 - protein, 366 aa, Rosa hybrid cultivar
MERLNSFKHLNQKWSNGEHSNELLHAQAHIWNHIFSFINSMSLKSAIQLGIPDIINKHGPMTLSELTSALPIHPTKSHSVYRLMRILVHSGFFAKKKLSKTDEEGYTLTDASQLLLKDHPLSLTPFLTAMLDPVLTTPWNYLSTWFQNEDPTPFDTAHGMTFWDYGNHQPSIAHLFNDAMASDARLVTSVIIDDCKGVFEGLESLVDVGGGTGTVAKAIADAFPHIECTVLDLPHVVADLQGSKNLKYTGGDMFEAVPPADTVLLKWILHDWNDEECIKILKRSRVAITSKDKKGKVIIIDMMMENQKGDEESIETQLFFDMLMMALVRGQERNEKEWAKLFTDAGFSDYKITPILGLRSLIEVYP

SEQ ID NO: 4064 - protein, 131 aa, Lotus corniculatus var. japonicus
YQWAFAIAAAGITSGSIAERTQFVAYLIYSSFLTGFVYPVVSHWLWSSDGWASPTRTTGSLLFGSGAIDFAGSGVVHMVGGIAGLWGAFIEGPRIGRFDRTGRSVALRGHSASLVVSRFVSTMVRLVRLQS

SEQ ID NO: 4065 - protein, 472 aa, Mycobacterium avium subsp. paratuberculosis str. k10
MPIATINPATGETVKTFTPASDAEVDAAIARAYERFLDYRHSTTFAQRAQWANATADLLEAEADEVAAMMTLEMGKTLKSAKAEALKCAKGFRYYAQNAEQLLADEPADAGKVGAARAYIRYQPLGVVLAVMPWNFPLWQAVRFAAPALMAGNVGILKHASNVPQSALYLADVITRGGFPEGCFQTLLVPSSAVERILRDPRVAAATLTGSEPAGQSVAAIAGDEIKPTVLELGGSDPFIVMPSADLDEAVKTAVTARVQNNGQSCIAAKRFIVHTDIYDAFVDKFVEQMKALKVGDPTDPATDVGPLATESGRDEIAKQVDDAVAAGATLRCGGKPLDGPGWFYPPTVVTDITKDMALYTEEVFGPVASMYRAADIDEAIEIANATTFGLGSNAWTNDAAEQQRFIDDIEAGQVFINGMTVSYPELGFGGVKRSGYGRELAGLGIRAFCNAKTVWIGSSKSGDAGGGSKVE

SEQ ID NO: 4066 - protein, 177 aa, Streptomyces coelicolor A3(2)
MSANNPFARLPEAASFTVTSTTVADGAAWPSAQRSAGVPGGKDVSPQLSWSGAPEGTRSYAVTVYDPDAPTGSGFWHWAVADIPAAVTELPEGAGDDTGPGLPEGAFQLPNDARAARYIGAAPPAGHGPHRYFVVVHALDVESIGIPADATPAVLGFTMAGHILGRAVLTATAETPA

SEQ ID NO: 4067 - protein, 663 aa, Zea mays
MSPSNLPPPGETRVGCSLPSPVTPQAMGGGPARHVAMRALRARFLSRQREGGPAAASTWWWCASGSAKGDMESTLKGIRGSDAPCVLDLDDAATVAGGVEDTYGEDRATEEQLVTPWTVSVASGYNLLRDPRYNKGLAFTERERETHYLRGLLPPAIVSQELQERKIMNNIRQYQLPLQRYMALMDLQEGNERLFYKLLIDNVEELLPIVYTPTVGEACQKYGSIFSRPQGLYISLKEKGKILEVLKNWPERSIQVIVVTDGERILGLGDLGCQGMGIPVGKLSLYTALGGVRPSACLPITLDVGTNNEELLNDEFYIGLRQRRATGQEYTDFLQEFMSAVKQNYGEKVLIQFEDFANHNAFDLLARYGTTHLVFNDDIQGTASVVLAGLIAAQTLLGGSLADHTYLFLGAGEAGTGIAELIALEISRQTKAPIEECRKKIWLVDSKGLIVSTRKESLQHFKKPWAHEHKPLSNLLDAVNAIKPTVLIGTSGKGQTFTKDVVEAISSFNERPIILALSNPTSQSECTAEQAYTWSKGQAVFATGSPFDPVEYNGKIHVPGQANNAYIFPGFGLGVVMSGAIRVHDDMLLAASEALAQQVTEENFEKGLIYPPFSNIRKISAHIAASVAAKAYELGLASRRPRPKDLVKYAESCMYSPIYRNYR

SEQ ID NO: 4068 - protein, 471 aa, Vibrio vulnificus CMCP6
MAMKLVWLRRDLRSVDNTALNHAIATSQEVVACFVATPLQWRDHHMAPMQADLIARRLAVLAEELNALNIPLLYDEVDDYAQSATRVANWAEQLAVSEVVLNREYEVNERVRDEQLVNQLASSEIGVLDVEDKCVQAPGCVLNKQGDYFKVFTPFKKAWLKSFVPPQIIKTSAAQPVVLPEALQSSLWHEQAPFSYPRQSSEEWSVDSQQIRETLRHFCHEEVDRYHEQRDFPATAGTSVLSPYLAIGAISVRQCIARLYWQQSYLSNGREVWLSELIWREFYHHLIHFEPKLVKGQGFVEWEKHLLWPAKPDWFDRWCRGETGYPIVDAAMRQLNQTGWMHNRLRMIVASFLTKDLHVNWRLGEQYFMQKLVDGDFAANNGGWQWCASTGCDGQPYFRIFNPITQGEKFDPNGEFVKHWLPELVEVPSKFVHQPWNWPGHMQLDYPAPMVDHKQEREITLSLYTQAKDCL

SEQ ID NO: 4069 - protein, 180 aa, Nicotiana plumbaginifolia
MASSVLSSAAVATRSNVAQANMVAPFTGLKSAASFPVSRKQNLDITSIASNGGRVQCMQVWPPINKKKYETLSYLPDLSQEQLLSEIEYLLKSGWVPCLEFETERGFVYREHHHSPGYYDGRYWTMWKLPMFGCTDATQVLAEVEEAKKAYPQAWVRIIGFDNVRQVQCISFIAYKPEGY

SEQ ID NO: 4070 - protein, 505 aa, Brucella suis 1330
MNKVEFSRTVKPAFAKRYGNFIGGKWVEPRSGRYFENTSPVNGQVLCEVARSDAADVEAALDAAHAARELWGRTSVAERALILNRIADRIEENLPALAAAETWDNGKPIRETTNADLPLAVDHFRYFAGVIRAQEGGISEIDHDTVAYHFHEPLGVVGQIIPWNFPLLMATWKLAPALAAGNCVVLKPAEQTPASILVLMELIADILPPGVVNIVNGFGLEAGKPLASSPRIAKIAFTGETTTGRLIMQYASQNLIPVTLELGGKSPNIFFKDVAAEDDDFLDKAIEGFVMFALNQGEVCTCPSRALIQESIYDRFMKKALKRVEAIVQGDPLDPATMIGAQASSEQLEKILSYLDIGRQEGAEVLAGGERNMLPGDLAGGYYVKPTVFKGHNKMRIFQEEIFGPVVSVATFKDDAEALSIANDTLYGLGAGIWTRDGTRAYRFGRAIKAGRVWTNCYHAYPAHAAFGGYKQSGIGRENYLKMLDHYQNTKNMLVSYSPKKLGFF

SEQ ID NO: 4071 - protein, 322 aa, Sesbania rostrata
MAEKKIPEVLLNSGHKMPVIGMGTSVESRPSNDVLASIFVDAIQVGYRHFDSASVYGTEEAIGMAVSKAIEQGLIKSRDEVFITSKPWNTDAHHDLIVPALKTTLKKLGMEYVDLYLIHWPVRLRHDLENPVIFSKEDLLPFDIEGTWKAMEECYRLGLAKSIGICNYGTKKLTKLLEIATIPPAVNQVEMNPSWQQGNLREFCKQKGIHVSAWSPLGAYKIFWGSGAVMENQILQDIATAKGKTIAQVALRWVYQQGSSAMAKSFNKERMKQNLEIFDFELSEEELEKIKQIPQRRQYTGDMWLSENGSCKTLEELWDGDV

SEQ ID NO: 4072 - protein, 399 aa, Helicobacter hepaticus ATCC 51449
MDFTHTQALDEEFVLHTYARANVAFVRGENARIFDTQGNDYIDFGAGIGVCSVGHANAKLAQTIYKQAQTLLHTSNLYYIQPQARLAQEIITLYRYNTPYTAPMRAFFCNSGAEANECAIKIARKYGKPRNAYKIITLDSSFHGRTIASLKATAQEKMHQHFGPFPDGFVYAKNLDDVIAKIDDSTCAVLLELVQGEGGVLPMDKEKINTLSTILKQKQILLMVDEVQSGVFRSGEIFASKVYEIDPDVITTAKGLAGGVPIGAVLTKLTDIFEYGDHGSTFGGNFLSCAAGLETLAILNELYNNGTLQRTITLFHAELDALVVDFADIFSHKVGLGLMCGLYTRNPDMQQEIIAQALKHYVIVLKSGKGVVRFLPPLTITQEEIKEGFARVRNALKTL

SEQ ID NO: 4073 - protein, 450 aa, Oryza sativa (japonica cultivar-group)
MSVSGGRTRVGRYELGRTLGEGTFAKVKFARNADSGENVAIKILDKDKVLKHKMIAQIKREISTMKLIRHPNVIRMHEVMASKTKIYIVMELVTGGELFDKIASRGRLKEDDARKYFQQLINAVDYCHSRGVYHRDLKPENLLLDASGTLKVSDFGLSALSQQVREDGLLHTTCGTPNYVAPEVINNKGYDGAKADLWSCGVILFVLMAGYLPFEDSNLMSLYKKIFKADFSCPSWFSTSAKKLIKKILDPNPSTRITIAELINNEWFKKGYQPPRFETADVNLDDINSIFNESGDQTQLVVERREERPSVMNAFELISTSQGLNLGTLFEKQSQGSVKRETRFASRLPANEILSKIEAAAGPMGFNVQKRNYKLKLQGENPGRKGQLAIATEVFEVTPSLYMVELRKSNGDTLEFHKFYHNISNGLKDVMWKPESSIIAGDEIQHRRSP

SEQ ID NO: 4074 - protein, 153 aa, Lilium longiflorum
LKPLKSMDSKFEVDHSLIAKLNQLTEFLANRNQPLRAPFVPDARAMPAAATDIKDMPGAYVFIIDMPGVESEEIKIDVEEGNMLVISGERKREEEEERYLEMQRRMGKMMRKFKLLENANSGAISAVCKNGVLTVTVEKLPSQEPKAIEIKIA

SEQ ID NO: 4075 - protein, 217 aa, Arabidopsis thaliana
RRNGLLKKAKELAILCDAEVGVIIFSSTGRLYDFSSSSMKSVIERYSDAKGETSSENDPASEIQFWQKEAAILKRQLHNLQENHRQMMGEELSGLSVEALQNLENQLELSLRGVRMKKDQMLIEEIQVLNREGNLVHQENLDLHKKVNLMHQQNMELHEKVSEVEGVKIANKNSLLTNGLDMRDTSNEHVHLQLSQPQHDHETHSKAIQLNYFSFIA

SEQ ID NO: 4076 - protein, 357 aa, Saccharomyces cerevisiae
MSQNSNPAVVLEKVGDIAIEQRPIPTIKDPHYVKLAIKATGICGSDIHYYRSGGIGKYILKAPMVLGHESSGQVVEVGDAVTRVKVGDRVAIEPGVPSRYSDETKEGSYNLCPHMAFAATPPIDGTLVKYYLSPEDFLVKLPEGVSYEEGACVEPLSVGVHSNKLAGVRFGTKVVVFGAGPVGLLTGAVARAFGATDVIFVDVFDNKLQRAKDFGATNTFNSSQFSTDKAQDLADGVQKLLGGNHADVVFECSGADVCIDAAVKTTKVGGTMVQVGMGKNYTNFPIAEVSGKEMKLIGCFRYSFGDYRDAVNLVATGKVNVKPLITHKFKFEDAAKAYDYNIAHGGEVVKTIIFGPE

SEQ ID NO: 4077 - protein, 151 aa, Zea mays
MAMAYKMATEGMNVKEECQRWFMEMKWKKVHRFVVYKIDERSRAVLVDKVGGPGEGYEELVAALPGDDCRYAVFDFDFVTVDNCQKSKIFFIACWRLLLSCWSPAASRIRAKILYATSKQGLRRLLDGVHYEVQATDPSEMGFDVIRGRAQ

SEQ ID NO: 4078 - protein, 189 aa, Streptococcus agalactiae
DLFKELEAIKQQTIFDIDNAKTEVEIDNLVHDAFSKMNATVAKFQKGLETNTPETPDTPKIPELPQAPDTPQAPDTPHVPESPKAPEAPRVPESPKTPEAPHVPESPKTPEAPKIPEPPKTPDVPKLPDVPKLPDAPKLPDGLNKVGQAVFTSTDGNTKVTVVFDKPTDADKLHLKEVTTKELADKIAH

SEQ ID NO: 4079 - protein, 468 aa, Glycine max
  misc_feature (61)..(61): Xaa can be any naturally occurring amino acid
CLILCVGVLLQTYPNPLQDNPAYSVVKQYFVHVDDSVPQKVVVHKDGARGVHFRRAGPRQXDEVQAAIVTCGGLCPGLNTVIRELVCGLHHMYGVKKVLGINGGYRGFYARNTITLTPKSVNDIHKRGGTVLGTSRGGHDTKKIVDSIQDRGINQVYIIGGDGTQKGASAIFEEVRKRGLKVSVVGIPKTIDNDIPVIDKSFGFDTAVEEAQRAINAAHVEAESVENGIGVVKLMGRNSGFIAMYATLASRDVDCCLIPESPFYLEGPGGLYEYIEKRLKENGHMVIVIAEGAGQELVSESVQSMSKQDASGNKLFQDVGLWISQKIRDHFAAQKTLPITLKYIDPTYMIRAIPSNASDNVYCTLLAQSAVHGAMAGYTGYTSGLVNGRQTYIPFYRITERQNHVVITDRMWARLLSSTNQPSFLDAKGDNEEKEEEEALNQLPDGHCAKDTSLASKEINSSIYPTAC

SEQ ID NO: 4080 - protein, 405 aa, Candida albicans SC5314
MVEKKNFQFLTINSWHLYHNSTFQLIMSGSGKLPGLASDAVLKQSIPVPEDFQEVKGIDYSQDNAYNMRAKDLIKSMSTMGFQASSLSQACDIIDNMRSWRGKHKDTLEEHEQTGEFDDEGYQKTTIFMGYTSNLISSGLRDTLRYLVQHKMVSAIVASAGGVEEDLIKVLAPTYMGDFTLPGKGLRDQGMNRIGNLLVPNDNYCKFEEWIVPILDKCLEEQEEAMKKLGPKGLIAGSEAIWTPSKLIDRLGKEINDESSVLYWAHKNKIPIFCPALTDGSIGDMLFFHTFKASPQQLRLDIVADIRKINSMSMAASKAGMIILGGGLIKHHICNACLMRNGADYAVYINTGQEFDGSDAGARPDEAISWGKIKAEAKSVKVYADVSLVFPLIVAATFASEKPQN

SEQ ID NO: 4081 - protein, 477 aa, Brucella suis 1330
MTFHQNLIAGEWVGGDDIANINPSDTNDVVGTYARATAEDTKAAIAAAKAAFPAWSRSGILERHAILRKTADEILARKEELGRLLSREEGKTLVEGIGETIRASQIFDFFAGECLRLAGEVLPSARPGIGVEVTREPVGVVGIITPWNFPIAIPAWKIAPALCYGNTIVFKPAELVPGCSWAIADILHRAGLPKGVLNLVMGKGSVVGQTILDSADVNAVTFTGSTGTGKRVAAASIEHNRRFQLEMGGKNPVVVLDDADLNVAVESVVNSAFFSTGQRCTASSRIIVTEGIHDKFVAAAIEKLKTVVVDNALKPGTHIGPVVDETQLQQDMDYIELGRKEGAKLAFGGERLNRETPGFYLQPALFTEATNQMRISREEIFGPVASVIRVKDYEEALATANDTSFGLSSGICTTSLKYATHFKRNSEAGMVMVNLPTAGVDFHVPFGGRKGSSFGPREQGRYAAEFYTTVKTAYTLA

SEQ ID NO: 4082 - protein, 189 aa, Streptococcus agalactiae
DLFKELEAIKQQTIFDIDNAKTEVEIDNLVHDAFSKMNATVAKFQKGLETNTPETPDTPKIPELPQAPDTPQAPDTPHVPESPKTPEAPHVPESPKTPEAPKIPEPPKTPDVPKLPDVPKLPDVPKLPDVPKLPDAPKLPDGLNKVGQAVFTSTDGNTKVTVVFDKPTDADKLHLKEVTTKELADKIAH

SEQ ID NO: 4083 - protein, 506 aa, Bordetella pertussis Tohama I
MDLSDLKKLGLDVAYPFKEQYENYIGGQWVAPAGGEYFDNLSPITGQPFCRVPRSGAADVELALDAAHRACAAWARTSPAERANILLRIADRIEGQLPMLAVAESIDNGKPLRETTAADLPLAIDHFRYFAGCIRAQEGAISEIDANTVAYHFHEPIGVVGQIIPWNFPLLMVAWKLAPALAAGCVVVLKPAEQTPASILVLAELIGDLLPPGVLNVVNGYGKEAGQALATSKRIAKIAFTGSTPVGKHILHAAADNLIPATVELGGKSPNIFFDDVMDHDDEFLDKALEGLAMFALNQGEVCTCPSRILIQESIYERFIEKAIARVQSIKTGHPLDAGTMVGAQVSQVQMDKILSYIDIGRQEGAQCLTGGARNDMLPGGLDQGFYVQPTMLLGKNSMRIFQEEIFGPVAAVATFKDEEEAIAMANDTFYGLGAGVWSRDGARAYRVGRGIEAGRVWTNCYHLYPAHAAFGGYKQSGIGREAALSNYQQTKCLLVSYSAKALGFF

SEQ ID NO: 4084 - protein, 201 aa, Streptococcus agalactiae
DLFKELEAIKQQTIFDIDNAKTEVEIDNLVHDAFSKMNATVAKFQKGLETNTPETPDTPKIPELPQAPDTPQAPDTPHVPESPKAPEAPRVPESPKTPEAPHVPESPKAPEAPRVPESPKTPEAPKIPEPPKTPDVPKLPDVPKLPDAPKLPDGLNKVGQAVFTSTDGNTKVTVVFDKPTDADKLHLKEVTTKELADKIAH

SEQ ID NO: 4085 - protein, 193 aa, Cucumis sativus
  misc_feature (193)..(193): Xaa can be any naturally occurring amino acid
TGDEGNNEYKKGLWTVEEDKILMDYVKAHGKGHWNRIAKKTGLKRCGKSCRLRWMNYLSPNVKRGNFTEQEEDLIIRLHKLPGNRWSLIAKRVPGRTDNQVKNYWNTHLSKKLGIKDQKTKQSNGDIVYQINLPNPTETSEETKISNIVDNNNILGDEIQEDHQGSNYLSSLWVHEDEFELSTLTNMMDFINX

SEQ ID NO: 4086 - protein, 201 aa, Streptococcus agalactiae
DLFKELEAIKQQTIFDIDNAKTEVEIDNLVHDAFSKMNATVAKFQKGLETNTPETPDTPKIPELPQAPDTPQAPDTPRVPESPKTPEAPHVPESPKAPEAPRVPESPKTPEAPHVPESPKTPEAPKIPEPPKTPDVPKLPDVPKLPDAPKLPDGLNKVGQAVFTSTDGNTKVTVVFDKPTDADKLHLKEVTTKELADKIAH

SEQ ID NO: 4087 - protein, 495 aa, Rhodobacter sphaeroides 2.4.1
MLQEIDWHARAKAVALPNRPFIDGQYVDSLSGETFACIYPGDGRPLTDVASCNAADVDVAVRSARKAFEAGVWSRMAPADRRRILLRFSELILANREELALLETLNVGKPIANAYNGDVVSAAACIAWYAEAIDKVYGEVAATAYDMTTLVMREPLGIVAAVVPWNYPMSMAAWKLGPALATGNSVILKPAEQSPFTALKFGELAIEAGMPPGVLNVVPGLGHIAGKALGLHMDVDCVGFTGSTEVGKYFMQYSGQSNIKRIGLELGGKSPQVVLADCDDLDAAAAGIAAGIFANTGQVCNAGSRLIVDEKIHDQLLEKIAAQAKVFAPGDPLDTATRMGSMVSEEQMDRVLGYIDAGRADGARPVIGGGRVKTETGGFYIEPTIFEGVRNDMKIAQEEIFGPVLSAIPVKGFDEAMATANDTVYGLAGAVWTGSVKNAHRAAKSLRAGVVWVNCFDRGSLAVPFGGFKQSGFGRDKSLHAMDKYTDLKAVWFAH

SEQ ID NO: 4088 - protein, 232 aa, Triticum aestivum
MGERVKGTVKWFNVTKGFGFISPDDGGEDLFVHQSSIKSDGYRSLNENDAVEFEIITGDDGRTKANDVTAPGGGALSGGSRPVEGGGDRGGRGGYGGGGGGYGGGGGGYGGGGGGYGGGGGGYGGGGYGGGGGGGRGCYKCGEEGHISRDCPQGGGGGYGGGGYGGGGGGGGGRECYKCGEEGHISRDCPQGGGGGGGYGGGGGRGGGGGGGGCFSCGESGHFSRECPNKAH

SEQ ID NO: 4089 - protein, 360 aa, Triticum aestivum
MCTVSSAWRLRPFHHAPVLFPFPSLAPPLPEPSRLPLRMADAKAEAARQAPQSSQEEEEDWKEAEGDVEVADRSTSNGGGAGEGITDRPIRVYADGIYDLFHFGHARSLEQAKKSFPNAYLLVGCCNDELTHQYKGRTVMTEDERYESLRHCKWVDEVIPDAPWVVTEEFLNKHNIDFVAHDSLPYHDASGASNDVYEFVKKLGKFKETKRTEGISTSDIIMRIVKDYNEYVMRNLARGYSRNDLGVSYVKEKRLRVNMGLKTLRDKVKQHQEKVGEKWSTVAKLQEEWVENADRWVVGFLEKFEEGCHSMGTAIKERIQERLKEAQSRDFSLLQYDSDDFDDFEEEDDEVAKDAKYVKE

SEQ ID NO: 4090 - protein, 338 aa, Anisodus tanguticus
MEVISNHNNGSTTKIILKNGSICNGNVNGNSHSHEKIENKLVECTNSIKPGWFSEFSALWPGEAFSLKIEKLLFQGKSDYQDVMLFESATYGKVLTLDGAIQHTENGGFPYTEMIVHLPLGSIPSPKKVLIIGGGIGFTLFEVSRYPTIETIDIVEIDDVVVDVSRKFFPYLAAGFDDPRVTLIIGDGAAFVKAAQPGYYDAIIVDSSDPIGPAKDLFERPFFEALAKALRPGGVVCTQAESIWLHMHLIKQIIANCRQVFKGSVNYAWTTVPTYPTGVIGYMLCSTEGPEVNFKNPVNSIDKDTSHVKSKGPLKFYNSDIHKAAFILPSFARDLVEF

SEQ ID NO: 4091 - protein, 241 aa, Brassica napus
GDPRVRDIEDVRREVEIMKHMPKHPNIVSLKDAFEDDDAVHIVMELCEGGELFDRIVARGHYTERAAAAVMKTILEVVQVCHKNGVMHRDLKPENFLFANKKETSPLKAIDFGLSVFFRPGEGFNEIVGSPYYMAPEVLRRNYGPEVDIWSAGVILYILLCGVPPFWAETEQGVAQAIIRSVIDFKRDPWPRVSDTAKDLVRKMLEPDPKKRLSAAEVLEHPWIQNAKKAPNVSLRETVKA

SEQ ID NO: 4092 - protein, 271 aa, Triticum aestivum
  misc_feature (115)..(115): Xaa can be any naturally occurring amino acid
MAHAAAAAAVPLRRPLLLFLRPARLLSFVAPRSSSVRAYTRALRPLAPLPSDDEDPDDGDGAPSRNEKKREARRAVKWGMELAKFSPPQIKRIVRAASLEREVVDALMLVKKFGXDVREGRRRQYNYIGSLLRGAQPELMEDLIHSLKNGDESRIQALLSEVADKSMPIEDEEVGELPHEEEDEGNQEYMEIADRWFEGLVCQDIPVTNEVYAIHNVEFDRQELRKLVRIVQEVQKSMGNKDSGEGSDRKLSRAKKPLIMFLRSLAKKTLE

SEQ ID NO: 4093 - protein, 222 aa, Triticum aestivum
  misc_feature (27)..(27): Xaa can be any naturally occurring amino acid
  misc_feature (87)..(87): Xaa can be any naturally occurring amino acid
MKTLLILTIIAVALTTTTANIQVDPSXGQVQWPQQQQPFPQPQQPFSQQPQQIFPQPQQTFPHQPQQAFPQPQQTFLHQPQQQFPQXPKQPQQPFPQQPQQQFPQPQQPQQPFSPSNHNNNFPQPQQPQQPFPQPQQPQLPFPQQQQQQQQQQQQQGIQIMRPLFQLVQGQGIIQPQQPAQLEVIRSLVLGTLPTMCNVFVPPECSTTKAPFASIVADIGGQ

SEQ ID NO: 4094 - protein, 413 aa, Glycine max
MPGHRSKSEKHDVDGGGGEKQLRRDPYEVLGVSRNSTDQEIKTAYRKMALKYHPDKNANDPKAADMFKEVTFSYNILSDPDKRRQYDSAGFEAVESDNQELELDLSSLGAVNTMFAALFSKLGVPIKTTVSATVLEEALNGLVTIRPLPLGHNIAKRVEKQCAHFYSVTITEEEAQAGFVCRVQSPDKSKFKLLYFDQEDNSGLSLALQEDSAKTGKVTSAGMYFLGFPVYRLDQTMNSIAAAKDPDTSFFRKLDAFQPCELTELKAGTHVFAVYGDNFFKSANYTIEALCAAPFSEEKENLRNIEAQILSKRAEISKFEAEYREVLAQFSDMTNRYAHEMQAIDELLKNRNEIQASYTSAPLKRTTSRSRSKNSSKEAKEDGQAKEKRSTRERPKKKKWYNLHLRVDKRKAC

SEQ ID NO: 4095 - protein, 178 aa, Trifolium repens
MALISSAAVTTINRAPVQANLATPFTGLKSSAGFPVTKKNNDITSITSNGSRVNCMQVWPPVGKKKFETLSYLPPLTDEQLLKEVEYLLRKGWVPCVEFELEKGFVHRQYNSSPGYYDGRYWTMWRLPLFGTTDAAQVLKEVAECKAEYPEAFIRIIGFDNVRQVQCISFIASTPKVY

SEQ ID NO: 4096 - protein, 505 aa, Pseudomonas syringae pv. tomato str. DC3000
MSTATILELMRPYWGDRSVIASYVGGAFIEGHGAPVEVRNAHNDSLLLSFPDADESLVEVADKAAKAAQQQWWAMTAQARGRAMYQVGNLIREEQENLAQIESLTANKPIRDARVEVLKVAEMFEYYAGWADKLHGEVIPVPTTHLNYVTYEPLGTVLQITPWNAPIFTCGWQIAPAIAAGNAVILKPSELTPLSSLVVGVLIERAGVPKGLVNVIAGFGHSIGQAFIAKADIRKVVFVGSPATGRHIAVAAAQRCIPAVLELGGKSANIVFDDADLEVALRGAQAAIFSGAGQSCVSGSRLLVQQSIFEKFTNALAVAATQFKVGDPGDPETQIGPINNAKQYNHVKSMVERALKDGAKLVGEQADPIPDRPGYYINPTVLAGTNELHCAQEEIFGPVVVAIAFKDEEDAIRIANDSRFGLAGGVWTRDVGRAHRVAKQVRAGTFWVNGYKTIHVSSPFGGYGESGYGRSSGLDALREYSEVKSVWVETAAKPAASFGYGASLE

SEQ ID NO: 4097 - protein, 160 aa, Synechococcus elongatus PCC 7942
MAPQVTDIAVTTIDGAAKSLSDYAGQVLLIVNVASYCGYTSQYSGLEALYRQYRDRGLQVLAFPCNDFGAQEPGSNEEIKTFCSTRFDVSFELFDKVHAKGADQHPLYAALTQTDPAGDVAWNFEKFLVGKDGTVLARFKSGVAPNDASLIQAIEAALAA

SEQ ID NO: 4098 - protein, 1647 aa, Ustilago maydis 521
MSQPGARRAYHHGSQRGGSTINQKAALASAYQELGKELSSSKLKIVGNYTLQRPIGEGTFGKVRLGLHRLTNTRVAIKQIPKAHSASLTREIHHHRRLHHPNVMQLYEVIATEQYIWMVSELCAGGELYDYLVENQVLAEPEARRIFGQLCLAVAYVHSKGIVHRDLKLENILLDERCNVKLGDFGFTREFERNRLMDTFCGTTGYASPEMLAGKKYTGEQVDIWSLGVILYALLCGALPFDDDDEAVMKQKILQGDFEIPDCLSEEAHDLVVSILQHDPAKRPSIQSILAHPWFTKMMVNSPMSTLEEDQIATDYFASKPSASTSQSKQHDRFPPTLHKALAELDTATELDTADATSAAPPTNPADAFDFEDHDSSNSCHRHHLSASSEQSYHSARSDSESSGRRSTNTDLTDPTTADSLSGTDEVEGLDQAIVQLNASSRPSALANATAAASHPDKNAIGLHRNERLGSNGSDASLSGVPRPSTKTNTASLPTHHELPPVPDGTGQDDHLSIYQSVPLTKRGSQSSSRGHHRTPSRTKRRSLSSGGLSDHHPPMLGRKPVDYVSQLADLQPATFSTSIEQNLLHQLSALGLDVGQMVHSVVTDACDASGATWWMLLRKSKDRHSEQPDITSPIVQVIPAPGDHPAPINASAFSKAGQTVTPSSPAQFSPPPVPVKDPARRSEDKFRTQERPTTLEASSSENAGLAEQSIRRLQTVVSHEELDVSAAPALHTSTSELMMATKPATDRQSSVPASGPMPLAGLPASTVSLPNDRSLTSTPDSVSSRPKSQHRHTTAVASPAKLQHVALTTLEGSPTSEGSKARGNSQNDRPRSNSLSVRQFAQSVLGTKDRGSATSSPVRPPPEQVVVAGEALPLERAKSPTLFGRRNTVSNVKDSMVGRLSGPSTPKKTPVDMLDKPRKSTGKKSCETDLDRVKALERSADSASSSPSRSTTGQAVGVVSNAKVDSSVPSASQDSFSTMSVTPQGSEKSGHRGKAGSFFMSTVRTWLGGNEKPTRKSKTGKQASASHRGLGIDDGPMAAKSPTNSLSTSGSVSTLTYGTPSRSASVRRRSAHYQQTSATRRGGPRSPHLGTSSRRSSNGSSYQAHLELPPNSFQQSMNRPANMRRMSAGSITPTATLHGDYLNDVGGVSGASRHSRPSSSHSLAHSGAASRPGLHGKAGSTGSTSSAYRPGQASSVYSTGSGRRHPRPSQDGGTTVRRHRTYASSSGSPSRRNSFRHDSRPSSIKSRASSPGRAMSGLGELWAADAEADGDGGGTGARRSTRSTPRHSLEMRKTGEAFDSAAPHHQHHQHVVAQSIFVAHKSRSPYRPPSANPNLHGSLVRGSSQLSGRSNVSANSEDAGYVAPNSTLGLPATGTGAWRHSWGRPPPCWAGPVDPPPTSSYSKRSGAAGVEDDGRPKLRDVFANRDDDDWTDEEEEQTYSGGLGQMGTLSSAMSSSVGRVGSGIGASSSPYATRNLAALGSSGYSTQRAVNLDTANAPEIGLREAPFSSRYAGVRNMFQTATAGTPAFGSRSHHSVSLSLGNEFAPRLLSTTIHSPTVSAASLGGGLGCIGESADAHSVTVSSKPKPESSGTQTQAQQQQSSASASASASASQQQQSGGGSSGSGSRITASFHKPVQIIEEEEEDE

SEQ ID NO: 4099 - protein, 120 aa, Oryza sativa (japonica cultivar-group)
MKGAAAVAMVVVAGCLLAAAAVSVVDGAVTCGDVDASLLPCVAYLTGKAAAPSGDCCAGVRHLRTLPVGTAERRFACDCVKKAAARFKGLNGDAIRDLPAKCAAPLPFPLSLDFDCNTIP

SEQ ID NO: 4100 - protein, 322 aa, Ralstonia solanacearum
MAVDPQILQFHQRLAERFGALPLPADALARRARFAAVAEVLARPDPEGIEASDLTLPLPGRTLDAVMFRPRSVQRPRLLVWFHGEGWMVGAARTTHRLMCALLAADTGCAVISVDYRLAPEHPFPAPTDDARDALAYLAEQRLHLSLDPDFLAVGGDSAGGHLAAQAAQAVHDRVRQGLVTAQLLVCPATMPAFGSESYSAFAQGPGLTRDEMRWYWAQFIGEAALDRPLAEQDARLFLMADPPAHLPPDTVVIVAAHDVLRDDGLAYADHLVQHGAQVVTIEASGMTHGFARLQPEAERAREWMRRAAHAFVGMIGGDAAG

SEQ ID NO: 4101 - protein, 201 aa, Streptococcus agalactiae
DLFKELEAIKQQTIFDIDNAKTEVEIDNLVHDAFSKMNATVAKFQKGLETNTPETPDTPKIPELPQAPDTPQAPDTPHVPESPKAPEAPRVPESPKTPEAPHVPESPKTPEAPKIPEPPKTPDVPKLPDVPKLPDVPKLPDVPKLPDAPKLPDGLNKVGQAVFTSTDGNTKVTVVFDKPTDADKLHLKEVTTKELADKIAH

SEQ ID NO: 4102 - protein, 377 aa, Arabidopsis thaliana
MVQRLEFESSRNIYDFAENVTRSLLSHKAPVLESLHLKVGDQFDGVYVGVWATIAFTRHVREFVLDLSSYHGPRVRFPTSLFCFDTLETLKLDYVYIYVPCPVSMKSLRTLHLLSVVYKGDESGHNLFASCPNLEHLVLRRGFFFDAVVNFIIDAPSLKTLLLSDPFSARESSRGYVIKAPSLKYLGIESVEGFEYFLIENVTELVEANIRNVSKIVNENILGSLKSAKRLSLDLSPLKLVYLEMHTHKVEWWNLLTHMLDSSPKLQVLKLIDRETRHENLEFDKKYKDQGKWNQPKYVPECLETFMWRNCNWGREEEKEVATYILRNARQLKKATFSTDPIEAKRLCKLAKRRKMREELDGVVMTSNSCHLVFEFE

SEQ ID NO: 4103 - protein, 172 aa, Triticum aestivum
  misc_feature (127)..(127): Xaa can be any naturally occurring amino acid
  misc_feature (161)..(161): Xaa can be any naturally occurring amino acid
MAAASSATSVHDFTVKDASGKDVDLSVYKGKVLLIVNVASQCGLTNSNYTELSQLYPKYKDQGFEILAFPCNQFGGQEPGTNDEIVQFACTRFKAEYPIFDKVDVNGSNVSPLYKFLKSSKGGLFGXDSIKWNFSKFLVMTRRVTLLDRYAPNPLPPVSIXEKDIKKLLGSS

SEQ ID NO: 4104 - protein, 296 aa, Arabidopsis thaliana
MGYLLEETLSSNSKTPIVIDDDNELGLMAVRLANAAAFPMVLKAALELGVFDTLYAEASRSDSFLSPSEIASKLPTTPRNPEAPVLLDRMLRLLASYSVVKCGKVSEGKGERVYRAEPICRFFLKDNIQDIGSLASQVIVNFDSVFLNTWAQLKDVVLEGGDAFGRAHGGMKLFDYMGTDERFSKLFNQTGFTIAVVKKALEVYQGFKGVNVLVDVGGGVGNTLGVVASKYPNIKGINFDLTCALAQAPSYPGVEHVAGDMFVDVPTGDAMILKVSSIELITYMFWKFIHGTRTLY

SEQ ID NO: 4105 - protein, 207 aa, Streptococcus agalactiae
DLFKELEAIKQQTIFDIDNAKTEVEIDNLVHDAFSKMNATVAKFQKGLETNTPETPDTPKIPELPQAPDTPQAPDTPHVPESPKAPEAPRVPESPKTPEAPHVPESPNVPESPKTPEAPKIPEPPKTPDVPKLPDVPKLPDVPKLPDVPKLPDAPKLPDGLNKVGQAVFTSTDGNTKVTVVFDKPTDADKLHLKEVTTKELADKIAH

SEQ ID NO: 4106 - protein, 490 aa, Bacillus halodurans C-125
MKRDHYRMVINGERVDSDETFETFNPAKGEILATVAKASREHAEKAVQAARHAFDHGKWRKYPVGKRARVLNQIAAIMRERFQELVEIEVLNSGKAISAAQAQINQAIEDFEFYAGAIVGHRGTVNNVPNGFLNYTQKEPVGVCAQIIPWNYPLMMAAWKVAPALAAGCSVVVKPASLTPITAILLNEICHEAGVPEGVVNTVAGAGSVVGDYLVGHEDVNKVAFTGSTPIGKDIMEKASHTLKRVTLELGGKSPNLVFADADMEAAVAGSLFGIYFNTGQSCEARSRLFVHEEIYDEFIEEFITRAKKLQLGDPFDKGTHVGSIISRDQLEIIDSYVRSAEEEGATIALGGKERRVEGFENGHWYEPTVITNVTPDMKAVQEEIFGPVVVVETFQDEREVIKRANDTKFGLGSAIWTKDQGRATRVAHQLEAGIVMVNCPFSAFPGTPFGGYKESGFGRELCVETLDLYMEDKSILSYYGPKPINPFGV

SEQ ID NO: 4107 - protein, 439 aa, Desulfovibrio desulfuricans G20
MALFTKEEALKYHEAPRPGKLEVVPAKPCRNQKDLSMAYSPGVAEACKAIREDPAKAALYTGRSNLVGVVSDGSAVLGLGNIGPLAGKPVMEGKGVLFKTFADIDVFDINLDVRSADQLIEVVKTLEPTFGGINLEDIKAPECFYIEETLKREMNIPVFHDDQHGTAVISGAGLLNALDITNRRAEDMKVVIVGAGAAGIACATFYVALGVDPANIYMFDSRGLIHAGRSDLNSYKKRFAQKKDAGSLEDVMKGADMFLGLSTKDLVSKDMVRAMAKDPVLFAMANPDPEIAYPDAKEACPGCIMGTGRSDFPNQVNNVSGFPYIFRGALDVGATEINEAMKIAAARSLAALAREPVPAEICALYGVDSLEFGVDYVIPKPLDPRVLEWETPAVAQAAMDSGVATVPVADMKAYAASLRVRVDAAARRAAAVVDSYSGV

SEQ ID NO: 4108 - protein, 448 aa, Pseudomonas aeruginosa PAO1
MNQPLNVAPPVSSELNLRAHWMPFSANRNFQKDPRIIVAAEGSWLTDDKGRKVYDSLSGLWTCGAGHSRKEIQEAVARQLGTLDYSPGFQYGHPLSFQLAEKIAGLLPGELNHVFFTGSGSECADTSIKMARAYWRLKGQPQKTKLIGRARGYHGVNVAGTSLGGIGGNRKMFGQLMDVDHLPHTLQPGMAFTRGMAQTGGVELANELLKLIELHDASNIAAVIVEPMSGSAGVLVPPVGYLQRLREICDQHNILLIFDEVITAFGRLGTYSGAEYFGVTPDLMNVAKQVTNGAVPMGAVIASSEIYDTFMNQALPEHAVEFSHGYTYSAHPVACAAGLAALDILARDNLVQQSAELAPHFEKGLHGLQGAKNVIDIRNCGLAGAIQIAPRDGDPTVRPFEAGMKLWQQGFYVRFGGDTLQFGPTFNARPEELDRLFDAVGEALNGIA

SEQ ID NO: 4109 - protein, 184 aa, Pseudomonas syringae pv. syringae B728a
MMKLRFFSIPLLLLAMSGAAMAADCPPLLQGELPKLRAKENIDLCKRFAGKPLVVVNTASFCGFAPQFKGLEALSQRYKGQGLEVLGVPSNDFKQEAKDGEETAKVCYVNYGVTFTMTEPQAVRGDDATHLFKVLAEQSSAPRWNFYKYVVDRQGKVIANFSSMTKPDDPELIAAIEKAIASKP

SEQ ID NO: 4110 - protein, 291 aa, Triticum aestivum
MAISTDSRSEEKPSQHSQVEKRWVLSDFDVGKALGRGKFGHVYLAREKRSSQIVALKVLFKSQLKQSQVEHQLRREVEIQSHLRHPNILRLYGYFYDQTRVYLILEHAAKGELYKELQRCKHFSERRSATYIASLARALIYLHGKHVIHRDIKPENLLVGVQGELKIADFGWSVHTFNRRRTMCGTLDYLPPEMVEKTEHDYHVDIWSLGILCYEFLYGLPPFEAKEHSETYRRIVKVDLKFPLKPFVSPAAKVLISQMLVKNSAHRLPLHKVLEHPWIVQNADPSGVYRG

SEQ ID NO: 4111 - protein, 219 aa, Streptococcus agalactiae
DLFKELEAIKQQTIFDIDNAKTEVEIDNLVHDAFSKMNATVAKFQKGLETNTPETPDTPKIPELPQAPDTPQAPDTPHVPESPKAPEAPRVPESPKTPEAPHVPESPKAPEAPRVPESPKTPEAPHVPESPKTPEAPKIPEPPKTPDVPKTPDVPKLPDVPKLPDAPKLPDGLNKVGQAVFTSTDGNTKVTVVFDKPTDADKLHLKEVTTKELADKIAH

SEQ ID NO: 4112 - protein, 288 aa, Zea mays
  misc_feature (127)..(127): Xaa can be any naturally occurring amino acid
  misc_feature (161)..(161): Xaa can be any naturally occurring amino acid
  misc_feature (192)..(192): Xaa can be any naturally occurring amino acid
  misc_feature (228)..(228): Xaa can be any naturally occurring amino acid
MATANGSSKGSFEVPKVEVRFTKLFIDGKFVDAVSGKTFETRDPRTGEVIASIAEGGKADVDLAVKAAREAFDNGPWPRMTGYERGRILHRFADLIDEHVEELAALDTVDAGKLFAVGKARGHPGAXAHLLRYYAGAADKVHGATLKMAQRMHGYTLKEPXVGAWVGHIVPWNYPTTMFLLQGRGPRLAAGXPVVVKPAEQTPLSALFYAHLARGGPASPPGVLNVVXPGFGPTAGAAVAAHMDVDKVSFTGSTEVGRLVMRAAAESNLKPVLLELGSYGGGGGGWRD

SEQ ID NO: 4113 - protein, 494 aa, Rhodobacter sphaeroides 2.4.1
MTDLFHALGIADAATGGSLSVLSPIDGAEIGRVRPTDPAAMPGLIARAQEAFRHWREVPAPRRGELVRLFGEELRAAKAELGALVTLEAGKITSEGLGEVQEMIDICDFAVGLSRQLYGLTIASERPGHRMMETWHPMGPCAVISAFNFPVAVWSWNAALALVCGNPVIWKPSEKTPLTALASMAIFGRALARFGDAPEGLAQLVMGGPEIGEALVLSPEVPIVSATGSTRMGRIVGPKVAARFGRPILELGGNNAMIVAPSADLDMAVRAIVFSAVGTAGQRCTSLRRLIVHHSVREELVGRLVKAYASLKIGDPRADGTLVGPLIDAASRDRMVAALDRARAKGGTVHGGKPVEGVPGGAYIQPALVEMPAQTGVVCEETFAPILYVMGYETLDEAIALQNAVPQGLSSCIFTLNLREAEAFVSAAGSDCGIANVNIGPSGAEIGGAFGGEKDTGGGRESGSDAWRGYMRRQTNTINWSAALPLAQGVRFDI

SEQ ID NO: 4114 - protein, 249 aa, Streptococcus agalactiae
DLFKELEAIKQQTIFDIDNAKTEVEIDNLVHDAFSKMNATVAKFQKGLETNTPETPDTPKIPELPQAPDTPQAPDTPHVPESPKAPEAPRVPESPKAPEAPRVPESPKAPEAPRVPESPKAPEAPRVPESPKTPEAPHVPESPKAPEAPRVPESPKTPEAPHVPESPKTPEAPKIPEPPKTPDVPKLPDVPKLPDAPKLPDGLNKVGQAVFTSTDGNTKVTVVFDKPTDADKLHLKEVTTKELADKIAH

SEQ ID NO: 4115 - protein, 367 aa, Archaeoglobus fulgidus DSM 4304
MDIIEELRAYREKDIPYSRVLSSMCTVPHPVAVEAHRMFIETNLGDPGIFRGTVELEAKLMRLIGDILHCETPAGYICSGGTEANIQGIRAARNVQKKENPNIVIPKTAHFSFEKIGDILGVKIKRAGVDEEYKVDVGQVEDLMDENTVAIVGIAGTTELGQIDPIVELSKLAEERQVELHVDAAFGGLVIPFMDNPYPFDFQNRGVSSITIDPHKMGMATIPAGGIIFRNESYLRALEVETPYLTSKTQFTLTGTRPGTGVASAYAVLKSLGFEGMREVVKNCLKNTRILVEEMRDLGFEPVIEPVMNVVSFRTDEAERIKEELYRMRWVISTIREPKAIRFVVMPHVTEEVIKNFISDFRKVLRR

SEQ ID NO: 4116 - protein, 255 aa, Streptococcus agalactiae
DLFKELEAIKQQTIFDIDNAKTEVEIDNLVHDAFSKMNATVAKFQKGLETNTPETPDTPKIPELPQAPDTPQAPDTPHVPESPKAPEAPRVPESPKAPEAPRVPESPKAPEAPRVPESPKAPEAPRVPESPKTPEAPHVPESPKAPEAPRVPESPKTPEAPHVPESPKTPEAPKIPEPPKTPDVPKLPDVPKLPDVPKLPDAPKLPDGLNKVGQAVFTSTDGNTKVTVVFDKPTDADKLHLKEVTTKELADKIAH

SEQ ID NO: 4117 - protein, 323 aa, Salmonella typhimurium LT2
MKPENKIPVLTRLSDEMTAVVNFQQPGLPPWPADGDIETQRQYYLLERRFWNADAPSMTTRTCAVPTPYGDVTTRLYSPQPTSQATLYYLHGGGFILGNLDTHDRIMRLLARYTGCTVIGIDYSLSPQARYPQAIEETVAVCSYFSQHADEYSLNVEKIGFAGDSAGAMLALASALWLRDKHIRCGNVIAILLWYGLYGLQDSVSRRLFGGAWDGLTREDLDMYEKAYLRNDEDRESPWYCLFNNDLTRDVPPCFIASAEFDPLIDDSRLLHQTLQAHQQPCEYKMYPGTLHAFLHYSRMMTIADDALQDGARFFMARMKTPR

SEQ ID NO: 4118 - protein, 250 aa, Brassica napus
MTKNYPAVSEEYQKAIEKCKRKLRGLIAEKNCAPIMVRLAWHSAGTFDCASRTGVPFGTMRFDGELAHGANSGLHIALRLLEPIREQFPTISHADFHQLAGVVAVEVTGGPEIPFHPGREDKPQPPPEGRLPDATKACDHLRQVFLKQMVLTDQDIVALSGAHTLGRCHKDRSGFEGAWTSNPLIFDNSYFKELLSGEKEGLLQLPSDKALLDEPVFRPLVEKYAADEEAFFADYAEAHLKLSELGFADA

SEQ ID NO: 4119 - protein, 377 aa, Vibrio cholerae O1 biovar eltor str. N16961
MSAAKELGGAGLRGQSAGSTALCTVGKTGTGLTYRGYDITDLAHHAQFEEVAHLLLVGYLPTQAELDQYKTRLIGLRGLPEKLKQALELIPAEAHPMDVMRTGCSILGNLEPEHTFAEQQAATERMLALFPAIICYWYRFSHEGVRIDTADQSEDSIGGYFLKMLTGQAPSELFKKVMHCSLTLYAEHEFNASTFAARVCASTLSDIHSCVTGAIGTLRGPLHGGANEAAMAMIEQWHSADEAEAGIMRMLASKEKIMGFGHAIYRESDPRNALIKEWSKALSEAVGDSHLYAVSERVEAVMKREKDLFCNADFFHASAYHFMGIPTKLFTPIFVMSRLTGWAAHVYEQRANNRIIRPSADYVGPEHQTWLPIEQRG

SEQ ID NO: 4120 - protein, 274 aa, Haloarcula marismortui ATCC 43049
MDDIQIQGTSVPALGLGTWQLTGQSCRETVETALGMGYRHIDTAQAYGNERQVGLGMDAAAVDREDVFLTTKLDGSNRDERSVRRSTRESLNKLGTDYLDLLLIHWPNTPWMASLSETLGAMNDVVEEGLVRHIGVSNFSPSLLDRARDISSAPIFTDQVQYHPYWDQRKLLDYCRIHDVLLTAYSPLARGGVLDDPALVQIGNKYGKSPAQVALRWLVQQDGVAAIPKASSREHLEANLAVFDFELTDAEMERIRDPSKVKTGVQFVRSQLPF

SEQ ID NO: 4121 - protein, 331 aa, Neurospora crassa
MTGFTAANTTYTLNNGVRIPAVGFGTFANEGAKGETYAAVKKALEVGYRHLDCAWFYQNEDEVGQALAEFLENHKDVKREDIFICTKVWNHLHEPEDVKWSLQNSLDKLKVDYVDLFLIHWPIAAEKDEATNMPKIGPDGKYIIKKELTENPEPTWRAMEDLVDAGKTRSIGVSNWTIPGLQKLLKFARIKPTVNQIEIHPFLPNTELVEFCFKNQIIPTAYSPLGSQNQVPSTGERVRDDPTLKAVAERSGHNLAQVLLAWGLRRGYVVLPKSSTPSRIESNFQIPVLRDEDFKAIQEVAKGRHCRFVNMKDTFGYDVWPEESDGQLKQE

SEQ ID NO: 4122 - protein, 122 aa, Streptococcus mutans UA159
MALNIENIIAEIKEASILELNDLVKAIEEEFGVTAAAPVAAAGAAGGEEAAAKDSFDIELTAGGDKKVAVIKVVREITGEGLKEAKGLVDNAPSVLKEGVAAAEAEELKAKLEEAGATVTLK

SEQ ID NO: 4123 - protein, 496 aa, Pseudomonas syringae pv. tomato str. DC3000
MVAELLARLGVANSAHTQGDYPVYTPIDGSQIASVTLENEAQVVARIDSAHSAFLKWRTVPAPRRGELVRIFGEVLREHKADLGELVSVEAGKITQEGLGEVQEMIDICDFAVGLSRQLYGLTIASERPGHHMRETWHPLGVVGVISAFNFPVAVWAWNTTLALVCGNPVIWKPSEKTPLTALACQALFDKALTIFGDAPAALAQLVIGDRDAGEALVDDPRVPLISATGSTRMGREVGPRVAARFGRTILELGGNNAMILAPSADLDLAVRGILFSAVGTAGQRCTTLRRLIVHRSIKDEVVACVKAAYAKVRVGDPREGNLIGPLIDQQAFSAMQNALTKARDEGGQVFGGERQLQDKYPNGYYVTPAIAEMPGQTEVVRHETFAPILYVLAYDDFEEALRLNNEVPQGLSSCIFTTDLREAEAFQSAAGSDCGIANVNIGTSGAEIGGAFGGEKETGGGRESGSDSWRAYMRRQTNTVNYSRELPLAQGIVFD

SEQ ID NO: 4124 - protein, 410 aa, Aspergillus nidulans FGSC A4
MSLSPEQIQLIKATVPVLQEHGTTITKVFYDNMLTAHPELKTVFNVSNKVHGHQPQALAGALFAYASYIDNLGVLSPAVERICHKHASLAIQPDGYQIVGKFLLEAMGQVLGDALTPPLLEAWAAAYWQLANIMIGKEAELYKSADGWTDFRDFRVARKEPESDVITSFYLEPVDGKPLPSFLPGQYVSIQVQVPQLNHAQCRQYSLSDQPKPTYYRISVRKDLGLDASDPSAPAHPGYVSNILHDNINVGDIVKLTHPYGDFHLTDAAASSPLVLISAGVGLTPMTSMVNTLRTAESNTRPVHFIHGAHTSASRAFQAHLQSLPNLKTTYFLTAPTESDKQGENYTYKGRVDLSKIADEDLFLGDKQTEYYICGPTAFMLDTQKALVARGVDQSRVHMELFGTGGVPAA

SEQ ID NO: 4125 - protein, 122 aa, Anabaena variabilis ATCC 29413
MIQPQTYLNVADNSGARKLMCIRVLGAGNSRYGFIGDKIIAVVKDATPNMAVKKSDVVEAVIVRTRHHIRRDSGMTIRFDDNAAVIINKDGNPRGTRVFGPVARELRDKNFTKIVSLAPEVL

SEQ ID NO: 4126 - protein, 177 aa, Glycine max
  misc_feature (145)..(145): Xaa can be any naturally occurring amino acid
ALSMISSSAVTTVYRACAGMVAPFTVLKSMAGFPTRKTNNDITSIANNGGRVHCMHVWPPSVKKKFDTLFFLPHLADAQLANGSEYLPMMGWISCLQFKLEHGSVYREHNRSPGYYYGLYCTMSKLPIFACTDASHASKDLLEAXTVFPDGFLRIIRFHNVRQEHCIIFISYNRSCF

SEQ ID NO: 4127 - protein, 486 aa, Chloroflexus aurantiacus
MTATAEDVLSTLPLRLLINGEWRDANNGATFAVINPANGTVLGYVPNAGVEETRTAIAAAVAAQPGWAATPAGERAALLRRVAQMMLDRQQELATIMTLEQGKPLAEARGEIAYAASFLSWFAGEAERIYGMTIPASTNAKRILVLRQPVGVVAMITPWNFPSAMITRKLGPALAAGCTVICKPAEQTPLSALALGQLFSEAGAPPGVINILTCQDPRPFADTIFADTRVRKISFTGSTEVGKELMRRSADTLKRVSLELGGNAPFIVFADADLDAAVRGAVASKFRNAGQTCVCANRIFVQRPIYAAFAERFAAEVNRLTVGDGLQPGVNIGPLIDDQARQKVERHVHDAIAAGARVLVGGGPAPLGGNFWLPTVLLDARSDMLVAREETFGPVAPLIPFDDEAEVIRMANDTPYGLAAYAFTRDVGRVWRLAEGLEYGIIGINDPIPSTAQAPFGGVKQSGIGREGGPTGIDEYLDIKYVSIGI

SEQ ID NO: 4128 - protein, 289 aa, Mycoplasma gallisepticum R
MYLTTKKIKVMKYNLLANNYKMPSIGFGTYKLEDGKQTVEAVKTALEVGYRHLDCAEIYENQLSVSQGIKLSGVNRKEIFITSKIWNDDKGYESTKKAFHKILKDLDLEYLDLLLIHWPIGKGFKDNWQEVNAQTWKAMEEFYLEGKIKAIGLSNFLVHHIEALKKSAKILPMVNQLEFHPGYLQPEIVEYCQKNNIVVQAWSPFSQSKVLENKTLVQLAKKYEVTVAQLILNWIIQKDIVPLPKSKTPERIRSNFDVFNFGINQADLKVIDQLNDCGGLGLHPDQVDF

SEQ ID NO: 4129 - protein, 255 aa, Streptococcus agalactiae
DLFKELEAIKQQTIFDIDNAKTEVEIDNLVHDAFSKMNATVAKFQKGLETNTPETPDTPKIPELPQAPDTPQAPDTPHVPESPKAPEAPRVPESPKTPEAPHVPESPKAPEAPRVPESPKAPEAPRVPESPKTPEAPHVPESPKAPEAPRVPESPKTPEAPHVPESPKTPEAPKIPEPPKTPDVPKLPDVPKLPDVPKLPDAPKLPDGLNKVGQAVFTSTDGNTKVTVVFDKPTDADKLHLKEVTTKELADKIAH

SEQ ID NO: 4130 - protein, 219 aa, Streptococcus agalactiae
DLFKELEAIKQQTIFDIDNAKTEVEIDNLVHDAFSKMNATVAKFQKGLETNTPETPDTPKIPELPQAPDTPQAPDTPHVPESPKAPEAPRVPESPKTPEAPQAPDTPHVPESPKAPEAPRVPESPKTPEAPHVPESPKTPEAPKIPEPPKTPDVPKLPDVPKLPDAPKLPDGLNKVGQAVFTSTDGNTKVTVVFDKPTDADKLHLKEVTTKELADKIAH

SEQ ID NO: 4131 - protein, 372 aa, Archaeoglobus fulgidus DSM 4304
MKDGLEDVIACKTTISRIALENGRAILEYRGYDIRDLARKASYEEVAYLLLYGELPKKYELQDFKIELAERRELPPQIIGLLTHLPPYTHPMVVLRTATSYLGSLDKKIAVRTREETFNKAKDLIAKFPTIVAYYHRIRTGRNIIPPALEFSHAANFLYMLHGEEPTKTAERALDMDLILHAEHELNASTFAARIAASTLADIYACVVAATGTLMGPLHGGAAQEVMRMLREVASPRRAEEYVKRKIEAGERIMGFGHRVYRGVMDPRAELLRYLAKRLAAEGSTKWFEISEAIAKAAYKYKKLLPNVDFYSASVYANLGIPDDLFVNIFAMGRISGWTAHIIEQYENNRLIRPRAEYVGEKEKKFIPLSKR

SEQ ID NO: 4132 - protein, 358 aa, Ammi majus
MASHDQEAFLAAMQIVNSSTVDGVLNALIELNVFDIIMKKVGLDGYLHPDEIALNLPAKNLEASDMLDRMLRLLATHSIIKCKLVKRSGGTHRLTRSYGLTSISQYFVQAKDGPCLAPYIRLIHHKEMQRSWSKVKDATIEGGVPFNKAHGGKNIFEYLEKDKDLAELLSQAMDKSIATSMNILLQMYKGLEGVQEVVDVGGAHGATLSCIVSMNPHLKGINFDLPHVVKNAPSLPGIVHVGGDMFESVPRGDVILLQRLLHDWTDEESVKILKTCHEALPDHGKVVIIEMMPAELPENDVQAKNISQVDIRMLIYTHGGRERTAEEFQMLGKEAGFASSKFICGADLYGVVELYKKM

SEQ ID NO: 4133 - protein, 166 aa, Triticum aestivum
  misc_feature (53)..(53): Xaa can be any naturally occurring amino acid
  misc_feature (69)..(69): Xaa can be any naturally occurring amino acid
  misc_feature (101)..(101): Xaa can be any naturally occurring amino acid
  misc_feature (107)..(107): Xaa can be any naturally occurring amino acid
  misc_feature (125)..(125): Xaa can be any naturally occurring amino acid
  misc_feature (136)..(136): Xaa can be any naturally occurring amino acid
  misc_feature (153)..(153): Xaa can be any naturally occurring amino acid
MSDSEEHHFESKADAGASKTYPQQAGTVRKNGFIVIKNRPCKVVEVSTSKTGXSMGHAKCHFVAIDIFXMGKKLEDIVPSSHNCDIPHVNRTEYQLIDISXEDGFVXSLLTSDGNTKDDLRLPTXDETLVAQIKEXFESGKDLVVTVQSAMGXEEQICALNGFGPK

SEQ ID NO: 4134 - protein, 146 aa, Gibberella zeae PH-1
MPARSKEEQPQAEDTNMEDAPASAQPETNDEEVEDEEEEEEIEAQRVRILPGSTDTAASFEFTDEGHTLGNALRYIIMKNPDVEFCAYSIPHPSEPKMNIRIQTYSGTAVDALKKGLVDIQEVCDVVADEFWTKREAYNAEQGIDR

SEQ ID NO: 4135 - protein, 484 aa, Brucella melitensis 16M
MKSTIHSEGAAVSASVANHTPKPPLLSVDDAKALDLPRMTELFTAHLNPGQLHFMKLLGFHKVKVERAEGMYYYDQNGRRILDFFGGFGSLAFGHNHPRIIAARRKFQEELRHEIAIAFMSQYAAALAYDLAACSPGDLDMVFLGSSGSEAMEAAIKVAERAAGPKKPKIVYAENSFHGKTKGVLSITDGGLYRGEFKLVDNTVRVPFGDITAIENAFRSDPEIGTIVLETVQGGCGIIQADAEFWQKLRQLCDRYGVIWVADEVQCGFGRTGKFYAFEHYGVIPDVTALAKSLGGGKAAMAAMIARRDIYMKAYGTPKTAMIHAMATFGGIGEACITAIEAVNILYDEQLIDNSAEVGDYLLERLKELQVRYPGLLKDVRGKGMMVGLEFHDFSQAMPMVLRPMLAMLDDKLKGSLPGFIGSHLLRDHGVLVAFTEYNRNVIRLEPPLICQRAHVDEFIKALDEVLSRGIVKIVKDFIKAQIK

SEQ ID NO: 4136 - protein, 177 aa, Nostoc punctiforme PCC 73102
MRQQEPGVTVWFTGLSGAGKTTICQFVEKELRIQGYRVEVLDGDAVRQNLCKGLSFSKEDREENIRRIGFVAHLLARNNVIVLVSTISPYRKVREEVRQNIPSFIEVYVNASLEVCEQRDVKGLYKKARMGEIKNFTGIDDPYEIPLRPEVECKTNQETLYQSATKVLEKLEELGYI

SEQ ID NO: 4137 - protein, 490 aa, Gloeobacter violaceus PCC 7421
MIRSLVWFRKGLRLHDNPALLDAARDAARLYPLFIVDPWFVNPERVGVNRMRFLLESLGEIDGNLRRLGSRLIVLQGRPQEVLERVLSRWQIGRLCFERDTEPYARRRDEAIRSMAERVGVRVISPTAHTLYDPDELIELGRGKVPTTYGAFGRLAAKLGEPDAPVASPSHLPPPGELDADYGIPTLAELGYPDPECPSRGIIPPGGEGEGLRRLHVYLSDRQRSAGFAKPDTDPTAFDPPSTTALGAHLKFGCLSARTFYAEVQKVYREVGEHTEPPMSLIGQILWREFFYTVGYATPNYDRIEGNPVCRQIPWDDNPEYLAAWSEARTGFPWIDAAMTQLRTEGWLHHLSRHAVACFLTRGDLWVSWEKGQAVFERLLLDQDWSLNASNWMWLSASAFFNAYYRVYSPISFAKKYDPEGRYVRRYLPKLARVPAEFIYEPWRAPLLVQKQAGCVVGRDYPDPIVDHEQAKACNLERMRLAYEQNAKGG

SEQ ID NO: 4138 - protein, 170 aa, Zea mays
MAPTVMMASSATAVAPFQGLKSTASLPIARRSSRSLGNVSNGGRIRCMQVWPAYGNKKFETLSYLPPLSTDDLLKQVDYLLRNGWIPCLEFSKVGFVYRENSTSPCYYDGRYWTMWKLPMFGCNDATQVYKELQEAIKSYPDAFHRVIGFDNIKQTQCVSFIAYKPPGSD

SEQ ID NO: 4139 - protein, 312 aa, Triticum aestivum
MDPMDIVGKSKEDVSLPKSTMTKIIKEMLPPDVRVARDTQDLLVECCVEFINLLSSESNDVCSRDDKKTIAPEHVIRALQDLGFKEYVEEVYAAYEQHKLETLDSPKATKFTGIEMTEEEAVAEQQRMFAEARARMNNGAAKPKEPALEPQNQPQQPPQPHLQLHPQAQQPPQPQPQLHYPQSQQPLQPFTQAPPQQPLHPQLQQYTQAPPQQPLQPPLQLYPQAQPEQPLQPQSSGSTTGTCVISAAAPSATGTLLLQPPPQQSPQSQLQLHQQPQPTLVPPPQPQPQPLELQQPQPLTQLQAEHGLDWDS

SEQ ID NO: 4140 - protein, 110 aa, Lactobacillus delbrueckii subsp. lactis
  misc_feature (101)..(101): Xaa can be any naturally occurring amino acid
LQPDTKIRTFAIGMDQNPIDLKYAREVADYLGTDHTEFIMTREDVLGVLREVIYTLETWDITTIRASIGMYILCKKIHETTDLKVILTGECSDELFGYKYXDFAPSPEEF

SEQ ID NO: 4141 - protein, 497 aa, Ammi majus
MDVIIIVLSVMLAYVLVKHLLLSRDRGKNLPPGPFQLPIIGNLTNLGKLPHRSLAKLSQNYGPIMHLQLGRVTTIVISSSAIAQQVFQKKGRAFSRRFIPDSLCACDHSLYSFVWLPIGPQWRNLRKISNSNLFSANKLDANQHLRGRKVNELIAYVQKCSQTGDAVDIGRAAFRTSFNLLSNTVFSKDMVDPYQDSAQEFKDLAWNIMVEAGSPNLVDYFPVLKKMDPQGVKRRMTGYFQKVIKMLDGLINERLALKGSGTTVDKTDMLDELINISQVNPNEMDKILMEHLFVDIFVAGTDTTSNTVEWGMAEILRSTETMMKVKAELRHLVGKGVILEEGDIYRLPFLQCIVRETLRLHPPFPLLLPRQTEEETELNGYTIPKNSQVLVNAWAIGRDPVSWKNPSSFRPERFLDSEVDVKGQDFELIPFGAGIRICPGLPLVMRMVPVMLGSLINCFDWELEGGIPLNELDMEEKCGLSVAKLHPLRVLATSQVV

SEQ ID NO: 4142 - protein, 197 aa, Zea mays
  misc_feature (169)..(169): Xaa can be any naturally occurring amino acid
MATSFQGTATKCTACDKTVYLVDKLTADNRVYHKACFRCHHCKGTLKLANYNSFDGVLYCRPHFDQLFKRTGSLDKSFQGTPKVVKPERNVGNENATKVSSAFAGTREKCVGCSKTVYPIERVTVNNTMYHKCCFKCCHGGCTISPSNYIAHEGKLYCKHHHVQLIKEXGTSASSRMTTRRHRRLGRWRTTKKKSIN

SEQ ID NO: 4143 - protein, 601 aa, Glycine max
  misc_feature (51)..(51): Xaa can be any naturally occurring amino acid
  misc_feature (98)..(98): Xaa can be any naturally occurring amino acid
  misc_feature (427)..(427): Xaa can be any naturally occurring amino acid
MWKVVRYAAARSRRFSTAIPGPCKVHKRGTDILHDPWFNKDTGFPLTEREXLGLRCLIPPRVISFEQQYDRFMNSYRSLENNTQGQSDRVVSLSKWRXILNRLHDRNETLYYRVLIDNIKEFAPIIYTPTVGLVCQNYSGLFRRPRGMYFSAKDKGEMMSMIYNWPAHEVDMIVLTDGSRILGLGDLGVQGIGIPIGKLDVYVAAAGINPQRILPVMLDVGTNNQKLLEDRLYLGLRQPRLEGEEYLSIVDEFMEAVHARWPKAIVQFEDFQMKWAFETLKRYRKRFCMFNDDIQGTAGVALAGLLGTVRSQGQPLTDFVKQKIVVVGAGSAGLGVLSMAVQAVSRMSGGSGTDANSQFFLIDKDGLVTTERSNLDPAAVPFAKNPRDLEGLSEGASIIEVVKKVKPHVLLGLSGVGGVFNTEVLKXLYPSVDSIRAVTAKVGAAMLRAAVAIEAFSHAGENIVFASGSPFENVDLGNGEVGHVNQANNMYLFPGIGLGTLLSVFCHTSDRIVSAAADCLASYMTDADVRRGILYPSIDCIRDVTAEVGAAVVCAAVAEKQAEGHGDVGFKELENMSKEETVEYVRGNMWYPEYCPLVHEK

SEQ ID NO: 4144 - protein, 299 aa, Neurospora crassa
MPVRVVPREDEQVDDERQGVDFATAVSNCPPTAERPQAIDIDVDIYKPSIARANVAPSTEQPEGSAEYVDALDLKDYTVLQQHCMFWDRDRDGVIWPQDTFIGFYELGFNLFFCFLATLVINLNFSYPTRLGVSYIPDPYFRLYLPSMHKAKHGSDSGTYDKEGRFVPQAFEDMFSKWDRGDKGALSAGELWNMIAANRLAADPFGWAAGIFEFGVTWLLVQQDGMVDKEDLRRIYDGSMFFKIREAYRTEKGWNKGFGLCEFFNLGREQWAKNKGRIPPLNGIVSKVERSVTQKLHRA

SEQ ID NO: 4145 - protein, 365 aa, Ammi majus
MNTTTELIPPTFQVNDDEEEACMFAMQLASASVLPMVLKSAIELNLLESIAKAGPGAYVSPSQLAAALPSSQPDTPVMLDRILRLLASYSVLNCKLRDLPDARVERLYGLAPVCKFLTKNSDGVSMAPLLLMNQDKILMESWYHLKDAVLDGGIPFNKAYGMTAFEYHGKDPRFNKVFNQGMSNHSTITMKKILQTYDGFGGLKTVVDVGGGTGATLNMIISKYPNLKGINFDLPHVVEDAPSYAGVEHVGGDMFVSVPKGDAIFMKWICHDWSDAHCLAFLKNCYKALPKDGKVILAECILPEAPDSKLTTKNVILIDVIMLAHNPGGKERTEKEFEAFGKQAGFKSFNKACCAYNTWVIEYYK

SEQ ID NO: 4146 - protein, 437 aa, Vibrio vulnificus CMCP6
MTNLTRRQQIEALEKDWATNPRWKNVKRTYTAEEVVALRGSMVPANTIAQRGADKLWSLVNGSSKKGYVNCLGALTGGQAVQQAKAGIEAIYLSGWQVAADNNTASTMYPDQSLYPVDSVPSVVKRINNSFRRADQIQWSNGKSPEEGGIDYFLPIVADAEAGFGGVLNAYELMKSMIEAGAAGVHFEDQLASVKKCGHMGGKVLVPTQEAVQKLVAARLAADVAGTTTLVIARTDANAADLLTSDCDPYDADFIVGERTQEGFYRVRAGIDQAISRGLAYAPYADLIWCETATPCLEEARKFAEAIHAEYPDQLLAYNCSPSFNWEKNLDAETIAKFQQELADMGYKYQFITLAGIHNMWFNMFELAHAYAQGEGMRHYVEKVQRPEFEAAEKGYTFVAHQQEVGTGYFDKMTNTIQGGNSSVTALTGSTEEDQFH

SEQ ID NO: 4147 - protein, 433 aa, Mesorhizobium loti MAFF303099
MGGANQEATATLQFAGKTHEFKVRSGSVGPDVIDIASLYSTTGAFTYDPGFTSTASCESEITFIDGDAGILLHRGYPIDQLAEHGDFLEVCYLLLYGELPTKAQKDDFDYRVTRHTMVHEQMSRFFTGFRRDAHPMAVMCGVVGALSAFYHDSTDISDPYQRMVASMRLIAKMPTIAAMAYKYHIGQPFIYPKNDLGFAANFLHMCFAVPCEEYKINPVLARAMERIFILHADHEQNASTSTVRLAGSSGANPFACIAAGIACLWGPAHGGANEAALNMLGEIGHVDHIPEFIARAKDKNDPFRLMGFGHRVYKNYDPRAKIMQKTAHEVLGELGIKDDPLLDIAMELEKIALTDPYFIEKKLYPNVDFYSGITLKALGFPTTMFTVLFAVARTVGWIAQWKEMIEDPRQKIGRPRQLYTGAPERDYVPIAKR

SEQ ID NO: 4148 - protein, 361 aa, Streptomyces ambofaciens
MPELPPPHVVREAEKARAELQRQSRELAPPPFALLEMIMGVMVSRAVHVVAELKVAEALAEGPLSAEELAGRVGADADALGRVLRLLASNGVFATRADGTFELTPMADALRADHPMSMRPIALLMGHPIHWEDWSGFPETVVTGEPALPKLRGMHAFEFLTKNAEYGQVFFEGMGSMSASETGPIVAAYDFTRFGTVVDFCGGQGGLLAGILASSPATRGVLYDPRVEENGAAEFLAAQGVADRTERVAGDLFEVPPGGADAYVLKHIVHDWPEEQALQILRNVRAAIKPGGRLLIAEMVIPEQGDEPHSGKLVDLWLMLLVGGRERTPGQYADLLARAGFRLERVVETAAAISLVEAVPV

SEQ ID NO: 4149 - protein, 495 aa, Alternaria alternata
MTSVKLSTPQTGEFEQPTGLFINNEFVKAVDGKTFDVINPSTEEVICSVQEATEKDVDIAVAAARKAFNGPWAKETPENRGKLLNKLADLFEKNADLIAAVEALDNGKAFSMAKNVDVPAAAGCLRYYGGWADKIEGKVVDTAPDSFNYIRKSLLVFAVRSSMELPILMWSWKIGPAIATGNTVVLKTAEQTPLSAYIACKLIQEAGFPPGVINVITGFGKIAGAAMSAHMDIDKIAFTGSTVVGRQIMKSAAGSNLKKVTLELGGKSPNIVFADADLDEAIHWVNFGIYFNHGQACCAGSRIYVQEEIYDKFIQRFKERAAQNAVGDPFAATLQGPQVSQLQFDRIMGYIEEGKKSGATIETGGNRKGDKGYFIEPTIFSNVTEDMKIQQEEIFGPVCTISKFKTKADVIKIGNNTTYGLSAAVHTSNLTTAIEVANALRAGTVWVNSYNTLHWQLPFGGYKESGIGRELGEAALDNYIQTKTVSIRLGDVLFG

SEQ ID NO: 4150 - protein, 487 aa, Adiantum capillus-veneris
MTTSTTIVWLRRDLRLDDNPALKEASKIGNAVVPVFVWVPEEEGQFQQGRMSRWWLKQSLKQLAQSLDSLGSPLIIRRSSSSLQALMDLVIHTQASQVFFNHLYDPISLVRDQRVKEGLLQTGIHVRTFNADLLYEPWQVNDPSGKAFTTFNEFWDKCLNMPEEPHAPLLPPTRSLLAFAGHLPGCTVEDLELENNSEKDSNALLARSWTPGWINAEKALEAFVERHLLQYAANQHMVDGSTTSFLSPHLHFGELSVRKVFYNVRIKAVQWTKEGKPDGEQSVNLFLRSIGLRDYSRYICFNFPFTHERLILQNRRPFPWRVDEGLFKAWRQGRTGYPLVDAGMRQIWATGWLHNRIRVIVSSFFVKVLQLPWTWGMKYFWDALLDADLENDILGWQYISGGLPDGHELERMDDLQIEGYKYDPRGEYVRKWLPELSRLPTEWIHHPWDAPPRALRAAGVELGSNYPRPLVEFAAAWSRLQTALREA

SEQ ID NO: 4151 - protein, 331 aa, Methanothermobacter thermautotrophicus str. Delta H
MYRITVIPGDGIGVEVMEAALHVLQALEIEFEFTHAEAGNECFRRCGDTLPEETLKLVRKADATLFGAVTTVPGQKSAIITLRRELDLFANLRPVKSLPGVPCLYPDLDFVIVRENTEDLYVGDEEYTPEGAVAKRIITRTASRRISQFAFQYAQKEGMQKVTAVHKANVLKKTDGIFRDEFYKVASEYPQMEANDYYVDATAMYLITQPQEFQTIVTTNLFGDILSDEAAGLIGGLGLAPSANIGEKNALFEPVHGSAPQIAGKNIANPTAMILTTTLMLKHLNKKQEAQKIEKALQKTLMRGIMTPDLGGTASTMEMAEAIKEEIVKGE

SEQ ID NO: 4152 - protein, 474 aa, Prochlorococcus marinus subsp. marinus str. CCMP1375
MVHYEKLSPPTTGEKIKFNNGLPIVPANPIIPYIRGDGTGVDIWPATQKVIDQAIEKAYGIDRKIEWFKIYAGDEACDLYGTYQYLPKDTIEAIREYGVAIKGPLTTPIGGGIRSLNVALRQKFDLYSCVRPCRYYQGTPSPHKHPENLDVIVYRENTEDIYIGIEWESNDPIGIKLIEHLNNDVIPASPSLKNRIIPQGSGIGIKPVSKDGSQRHIRRAIQHALKLNGNKRHVTLVHKGNIMKFTEGSFRDWGYELATNEFRNECITERESWILSNLEQNPRLSIENNAKLIDPGYESLTKEKKDIICNEVQLVINNIHKTHGNNKWKKMVLVDDRIADSIFQQIQTRPQEYSILATLNLNGDYISDAAAAIVGGLGMAPGANIGDRAAIFEATHGTAPKHAGLDRINPGSVILSGVMMLEYIGWQEAADLITKGLSQSIYDKQVTYDLARLMEPPQSPLSCSEFANAVIERF

SEQ ID NO: 4153 - protein, 280 aa, Bacillus subtilis subsp. subtilis str. 168
MTTHLQAKATLHNGVEMPWFGLGVFQVEEGSELVNAVKTAIVHGYRSIDTAAIYGNEAGVGEGIREGIEEAGISREDLFITSKVWNADLGYEETLAAFETSLSKLGLDYLDLYLIHWPVEGKYKEAWRALETLYKEGRIKAIGVSNFQIHHLEDLMTAAEIKPMINQVEFHPRLTQKELIRYCQNQGIQMEAWSPLMQGQLLDHPVLADIAQTYNKSVAQIILRWDLQHGIITIPKSTKEHRIKENASVFDFELTQDDMNRIDALNENLRVGPDPDNFDF

SEQ ID NO: 4154 - protein, 326 aa, Escherichia coli O157:H7
MWKEPGTSCIHLEKTHLIIKLLRSIIDDIAPGTVIITETNVPHKDNIAYFGEGDDEAHMVYQFSLPPLVLHAVQKQNVEALCQWAQSLSLPSGKTTWFNFLASHDGIGLNPLRGLLPESEILALVEALQQEGALVNWKNNPDGTRSPYEINVTYMDALSRRESSDEERCARFILAHAILLSFPGVPAIYIQSILGSRNDYAGVEKLGYNRAINRKKYHSEEITRELNDEATLRHAVYHELSRLITLRRSHNEFHPDNNFTIDTVNSSVMRIQRSNAEGNCLTGLFNVSKNIQHVNITGLHGRDLISEVDILGNKITLRPWQVMWIK

SEQ ID NO: 4155 - protein, 216 aa, Desulfitobacterium hafniense DCB-2
MTTALNEAAAAVVRATVPALAAHGHAVTTAMYRRLFRDERIAALFNHANQGGDNAQAHALAGAILAYAQHIDDLPALSGALERIAQKHVGYHILPEHYPFVAGALLGAIEETLGEAATPQVLAAWGEAYWFLADLLQRREAELRGELAQVVGGWSGWREFVVAAKRAENASSDAAIVSFELRPADGGAVIAHRPGQYLTLRYPVPGQARQAQYSIS

SEQ ID NO: 4156 - protein, 317 aa, Burkholderia fungorum LB400
MTTALDQLKQYTTVVADTGDFQQLAQYKPQDATTNPSLILKAVQKDDYKPLLEKTVKAHASKPVGAIIDQLLIAFGTEILKIIPGRVSTEVDARLSFDTEGSIAKGRELIALYKEHGIGRERVLIKLASTWEGIRAAEVLQKEGIHCNMTLLFSLAQAAACAEAGAQLISPFVGRIYDWYKKNAGSAWDEAKDGGANDPGVKSVRRIYAYYKKFGYKTEVMGASFRTPGQILELAGCDLLTISPDLLQKLHESTEKVERKLSPDIAKESDIERVPVDESSFRFLVNDEAMATEKLAEGIRAFAADAIKLEKLIDALR

SEQ ID NO: 4157 - protein, 278 aa, Arabidopsis thaliana
MIKSEADLSDVIVIRDVWAYNLESEFDLIRGIVEDYPFISMDTEFPGVIYKADLDVLRRGNPNYLYNLLKSNVDALSLIQVGLTLSDADGNLPDLGGQKNRRYIWEFNFRDFDVERDPHAPDSIELLRRHGIDFERNRREGVESERFAELMMSSGLICNESVSWVTFHSAYDFGYLVKILTRRQLPVALREFLGLLRAFFGDRVYDVKHIMRFCEQRLYGGLDRVARSLEVNRAVGKCHQAGSDSLLTWQAFQRMRDLYFVEDGAEKHAGVLYGLEVF

SEQ ID NO: 4158 - protein, 164 aa, Glycine max
MEHFVRRVLPLLTILISLVVFFYLQDSYRAHLHPLVKFPRNKCSLLPHRHFWITSKRIVTPQGIISGSVEINEGKIISVIEGYSKQGKSKQEKIIDYGDAVVMPGLIDVHVHLDEPGRTAWEGFDTGTRAASAGGVTTVVDMPLINHPTTVSKETLKPKLELQR

SEQ ID NO: 4159 - protein, 102 aa, Triticum aestivum
  misc_feature (28)..(28): Xaa can be any naturally occurring amino acid
  misc_feature (65)..(65): Xaa can be any naturally occurring amino acid
  misc_feature (82)..(82): Xaa can be any naturally occurring amino acid
  misc_feature (93)..(94): Xaa can be any naturally occurring amino acid
  misc_feature (96)..(96): Xaa can be any naturally occurring amino acid
MAPTVMASSATSVAPFQGLKSTAGLPVXSRRSNGASLGSVSNGGRIRCMQVWPIEGIKKFETLSXLPPAQHGGLLKQVDYLXIRSKWVPCLRXXAXLGFNFR

SEQ ID NO: 4160 - protein, 167 aa, Oryza sativa (japonica cultivar-group)
GRWSATRPGGGGGGGGGVREQDRFLPIANISRIMKKAIPANGKIAKDAKETVQECVSEFISFITSEASDKCQREKRKTINGDDLLWAMATLGFEDYIEPLKVYLQKYREMEGDSKLTAKAGDGSVKKDVLGSHGGSSSSAQGMGQQAAYNQGMGYMQPQYHNGDVSN

SEQ ID NO: 4161 - protein, 359 aa, Capsicum annuum
MDSTNQNLTQTEDEAFLFAMQLASASVLPMVLKSALELDLLEIMAKAGPGAAISPSELAAQLPTKNPEAPIMLDRMLRLLATYSVLNCTLRTLPDGRVERLYSLAPVCKLLTKNADGVSVAPLLLMNQDKVLMESWYHLTDAVLDGGVPFNKAYGMTAFEYHGTDPRFNKVFNRGMSDHSTMTMKKILEDYKGFEGLNSIVDVGGGTGATVNMIVSKYPSIKGINFDLSHVIEDAPAYPGVEHVGGDMFVSVPKADAIFMKWICHDWSDEHCLKFLKNCYEALPANGKVLVAECILPETPDTSAATKNAVHVDIVMLAHNPGGKERTEKEFEALAKGAGFTGFRRACCAYQTWVMEFHK

SEQ ID NO: 4162 - protein, 368 aa, Prunus cerasus
MGKGGMSSQGGALEPMDGEQENMAAWLVGVNTLKIQPFKLPTVGPNDVRVKIKAVGICGSDVHYLKTMKCADFIVQEPMVIGHECAGIVDEVGSMVKNLLPGDRVALEPGISCWRCEQCKGGRYNLCPDMKFFATPPVHGSLANQIVHPADLCFKLPENVSLEEGAMCEPLSVGVHACRRANIGPETNVLVIGAGPIGLVSVLSARAFGAARIVIVDVDDERLSIAKSLGADDSVKVSTNPQDLENEVSKISKAMRGGVDVSFDCVGFNKTMSTALSATRPGGKVCLVGMGHGVMTVPLTPAAAREVDVVGIFRYKNTWPLCLEFLRTGKIDVKPLITHRFGFTQKEIEEAFETSARGGNAIKVMFNL

SEQ ID NO: 4163 - protein, 143 aa, Oryza sativa (japonica cultivar-group); identical to SEQ ID NO: 278

SEQ ID NO: 4164 - protein, 506 aa, Vibrio vulnificus CMCP6
MIYAQPGSDNAVVNFKSHYDNYIGGEWVKPVSGEYFDNISPVNGQAYCKVARSSAADINLALDAAHSVRYQWAKTSVTERANILLKIADRIEAHLEELAVAETWENGKPVRETLAADLPLVVDHFRYFAGCIRAQEGSAAELDANTASYHFPEPIGVVGQIIPWNFPMLMAAWKLAPALAAGCCVVLKPAEQTPTSILVLMEKIGDLIPAGVVNVVNGFGAEAGQALATSDRIAKLAFTGSTEVGNHILKCAAESLIPSTVELGGKSPNIYFPDVFDHEDAYLDKCIEGTLLAFFNQGEVCTCPSRVLVHESIYDQFIAKVAERAKSIKQGNPLDTDTQVGAQASQEQFDKILSYLEIGRQEGAKVVFGGEIAKQEDDLASGYYIQPTLLQGHNKMRVFQEEIFGPVIAVTTFKDEAEALAIANDTEYGLGAGVWTRDQNLAYRMGRNIEAGRIWINCYHAYPAHAAFGGYKKSGIGRETHKMMLNHYQNTKNLLISYDVNPLGFF

SEQ ID NO: 4165 - protein, 502 aa, Arabidopsis thaliana
MVLSHAVSESDVSVHSTFASRYVRTSLPRFKMPENSIPKEAAYQIINDELMLDGNPRLNLASFVTTWMEPECDKLIMSSINKNYVDMDEYPVTTELQNRCVNMIAHLFNAPLEEAETAVGVGTVGSSEAIMLAGLAFKRKWQNKRKAEGKPVDKPNIVTGANVQVCWEKFARYFEVELKEVKLSEGYYVMDPQQAVDMVDENTICVAAILGSTLNGEFEDVKLLNDLLVEKNKETGWDTPIHVDAASGGFIAPFLYPELEWDFRLPLVKSINVSGHKYGLVYAGIGWVIWRNKEDLPEELIFHINYLGADQPTFTLNFSKGSSQVIAQYYQLIRLGHEGYRNVMENCRENMIVLREGLEKTERFNIVSKDEGVPLVAFSLKDSSCHTEFEISDMLRRYGWIVPAYTMPPNAQHITVLRVVIREDFSRTLAERLVIDIEKVMRELDELPSRVIHKISLGQEKSESNSDNLMVTVKKSDIDKQRDIITGWKKFVADRKKTSGIC

SEQ ID NO: 4166 - protein, 463 aa, Nostoc punctiforme PCC 73102
MADLTPNSSFSLTLRLQIPNRVGMLASVTQAIATTGGNLGQIDLIEQTRKESTRDITVDAASTEHAETIVQAVKALPDIKLLSVYDRTFNLHRGGKISITSRIPLKSVSDLAMAYTPGVGRICTAIAQDPEEVYKLTIKQNTVAIVTDGSAVLGLGNLGPAAALPVMEGKAMLFKEFAGLDAFPICLATQDTEEIIQTVKNIAPVFGGVNLEDIAAPRCFEIEKRLREELDIPVFHDDQHGTAIVTLAALFNSLKLVHKPMAEIRIVINGAGAAGVAIARLLRKAGAEKIWMCDSKGIISTSRADLTEEKLEFAVKAQGTLAGAMQGADVFIGVSAPGVLTPEMVHSMAKDPIVFAMANPIPEIQPELISKDVAVIATGRSDYPNQINNVLAFPGVFRGALDCRAKTITTTMYLEAANAIASLVKPSDLDREHIIPSVFDERVVNAVAAAVQQAARQEGIAQN

SEQ ID NO: 4167 - protein, 259 aa, Vigna angularis
MAAAPTPREENVYMAKLAEQAERYEEMVEFMEKVSAAADNEELNVEERNLLSVAYKNVIGARRASWRIISSIEQKEESRGNEDHVTVIRDYRSKIESELSNICDGILKLLDSRLIPSASSGDSKVFYLKMKGDYHRYLAEFKTGAERKEAAESTLAAYKSAQDIANAELPPTHPIRLGLALNFSVFYYEILNSPDRACNLAKQAFDEAIAELDTLGEESYKDSTLIMQLLRDNLTLWTSDMQDDGADEIKEAAPKQDDQ

SEQ ID NO: 4168 - protein, 59 aa, Glycine max
  misc_feature (33)..(34): Xaa can be any naturally occurring amino acid
MSEGTANCVDILIAIILPPLGVFLKYGCGHEFXXICLLLTFLGYIPGIIYAIYAITKNN

SEQ ID NO: 4169 - protein, 252 aa, Prunus caroliniana
AHYKSEADVGNAIAEAIRSGLVKREELFITSKASNHGHVVEACKNSLKKLQLDYLDLYLVHYPLATKHSGVGTTASLLDENKVLDIDVTVSLETTWHDMEKTVSLGLVRSIGLSNYELFLTRDCLSYAKIKPQVSQFETYPYFQRESLVKFCKKHGVTPMAHTPLGGATANVKSFGSISPLEDPVLLGLAKKYKKSVAQIALRWNIERDTPVIPKSSKVERLKENLEVLNFKLEKEDIELINTIDKKSRTTL

SEQ ID NO: 4170 - protein, 253 aa, Triticum aestivum
PVKMVLSREGSDELFGGCLYFRKAPNKKELHEETCRKIKALHLYDCLRANKATSAWGLEARVPFLDKSFINVAMDLDPESKMIRRDLGRIEKWVLRNAFDDDEKPYLPKHILYRQKEQFSDGVGYSWIDGLKDHANAHVSDSMITNASFVYPENTPTTKEAYYYRTVFEKFYPKNAARLTVPGGPSVACSTAKAVEWDAAWSKLLDPSGRAALGVHDAAYEEEKAPALADHVFRPPAHGESILVETGVPAAAV

SEQ ID NO: 4171 - protein, 418 aa, Emericella nidulans
MSDLQVQGRKVFKVFNQDFIVDDRYTVTKELGQGAYGIVCAATNVQTGEGVAIKKVTNVFSKKILAKRALREIKLLQHFRGHRNITCLYDMDIPRPDNFNETYLYEELMECDLAAIIRSGQPLTDAHYQSFIYQILCGLKYIHSANVLHRDLKPGNLLVNADCELKICDFGLARGFSIDPEENAGYMTEYVATRWYRAPEIMLSFQSYTKAIDVWSVGCILAELLGGRPFFKGRDYVDQLNQILHYLGTPNEETLSRIGSPRAQEYVRNLPFMPKVPFQRLFPNANPDALDLLDRMLAFDPSSRISVEEALEHPYLAIWHDASDEPSCPTTFDFHFEVVDDVQEMRRMIYEEVVRFRQSVRMPPQAQSLAQQQQIGNIPIPEHQQGVWRQEEPRPQEAGAVGGNHNDLESSLQRGMDA

SEQ ID NO: 4172 - protein, 489 aa, Agrobacterium tumefaciens str. C58
MRERSMIKLKNAALLRDACLVNGRWLKAADGKTIAVENPANSMIIGHVPSLSADEVKAAVESAGKAFSEWSRRSAKDRAAILRRWFDLMVANADDLGALMTAEQGKPFAEAKGEALYAASFVEWFAEEAKRVYGDTIPSPTTDKRITILKQPIGVCAAITPWNFPAAMITRKAAPALAAGCAMIVKPAEQTPLTALALGVLAEEAGVPAGVFQVVTGAARDIGKVFTESDTVRKISFTGSTEVGRLLMAQSAPTIKKLSLELGGNAPFIVFDDADLDAAVEGAIVSKYRNAGQTCVCSNRIYVQDGVYDAFAEKLVKRVESLSVGEGTEPGVLIGPLIDQEAVAKVEDHVADALGKGAKIVIGGKRHALGGTFYEPTVLTGATQAMKVAREETFGPVAPLFRFGTEDEAVAMANDTEFGLAAYFYTENVRRTWRVAEALEYGMVGHNTGLISNEVAPFGGVKQSGLGREGSHYGIDEYLEIKYLCSAIG

SEQ ID NO: 4173 - protein, 181 aa, Malus x domestica
LENFIDPDIPATWRAMETLYDSGKARAIGVCNFSTKKLSDLLDIARVPPAVDQVECHPSWQQNKLRSFCKSKGVHLSGYSPLGSPGTTWIKSEVLTNPILATVAEKLGKTPAQVALRWGLQKGHSVLPKSTNEARIKENIDVFGWSIPDDLFAKFSEIEQARLIRWLSPVHHTSGPYRSLE

SEQ ID NO: 4174 - protein, 247 aa, Glycine max
MMEGDENIQASSKGKYVESFNCSEAPRKKSKKIENKRRFSDEQIRSLECIFESESKLEPRKKMQLARDLGLQPRQVAIWFQNRRARWKSKRIEQEYRKLKDEYDNLASRFESLKKEKDSLQLELQKLSDLLEACQDDGREDKAGKENSIEDGGSGSGYSSWKPEAKKPRFSNDEGLEERIGVYSDDQNENSIIRGGEKSEDKGHQLLRMDDHAEMPLASLEKWYSGVDPSGILDQSCSSSQWLDFWT

SEQ ID NO: 4175 - protein, 334 aa, Aspergillus nidulans FGSC A4
MSLGKKVTLNTGAQIPQLGFGTWQSAPGQVGEAVYQALKVGYRHLDLATIYQNQREVAEGIKRAYKDIPGLKREDIFITSKLWNTQHDPAVVEKALDDCLAELELDYLDLYLVHWPVAFKTGDNYFPLDESSDHPDGDVLIDDSISIVDTWKAMTKLPKEKARAIGVSNHTVEHLEAIINATGVVPAANQIERHPVLQSNDLIEYAAKKNIHITAYSAFGNNMFNIPLLVAHPEVKAVAEEASKRLGKTVTPAQVILNWSQEGGHSVIPKSVTASRIAENFQEVELTKEELAKVSKLGEERRRYNTPYVANKPRWNINIFGEEDEKPAKHKVIV

SEQ ID NO: 4176 - protein, 463 aa, Mycobacterium avium subsp. paratuberculosis str. k10
MPQHPSLPAHAIAPAYTGRLFTAPVPALRMPDESMDPDAAYRFIHDELMLDGSSRLNLATFVTTWMDPEAGRLMAETFDKNMIDKDEYPATAAIEQRCVCMVADLFHAEGLNDADPYSACGVSTIGSSEAVMLGGLAMKWRWRAKTKDWKKRTPNLVMGSNVQVVWEKFCRYFDVEPRYLPMEEGRYVITPEQVVDAVDEDTIGVVAILGTTYTGELEPVADICGALDKLALKPASAGGVDVPVHVDAASGGFVVPFLHPELKWDFRLPRVVSINVSGHKYGLTYPGVGFVVWRSKEYLPDELVFRVNYLGGDMPTFTLNFSRPGNQVVGQYYNFLRLGREGYTKVMQTLSGTARWLGEQLRVSEHCELISDGSAIPVVAFRLAKNRGYTEFDVSHELRTYGWQVPAYTMPDNATDVSVLRIVVREGLSADLARALHDDAVSALTSLDKVKPGGHYDAQHFAH

SEQ ID NO: 4177 - protein, 229 aa, Pyrococcus furiosus DSM 3638
MNVEEMKKAVARAALEFIEDDMVVGLGTGSTTAYFIRYLGEMIEKGKVEDIYGVPPPIKQKFLRMESGVPVLSLDQVDAIDIAVDGADEVDPNLNLIKGRGAALTMEKIIEYRAGTFIVLVDESKLVDYLCQKMPVPIEVIPAAWKAILEELSIFNAKAELRMGVKKDGPVVTENGNFIIDAKFPRIDDPLDMEIELNTIPGVVENGIFADIADIVLVGTKEGVKRLER

SEQ ID NO: 4178 - protein, 189 aa, Methanosarcina mazei Go1
MSPKNCYRNNLEELKMATGPRYKVPFRRRREGRTNYHLRLKLLLSGQDRVVVRKSARNVQIQLLAPTPEGDITYSSAVSSELAKYGYTGATGNTTAAYLTGLLFGLKSLQKGYEGGILDIGLQASSAGSRVYAALKGIVDSGFEIPCSSDVFPSDERIRGEHIAEYREESSDLPEQFEATKEKIFAEFS

SEQ ID NO: 4179 - protein, 320 aa, Bordetella pertussis Tohama I
MPSQLEALRRHTVVVADTGDFEAMRALRPTDATTNPSLILKAVQQEAYRPLLVQTARAHQGASPAEITDRLLVAFGRQILDIVPGRVSTEVDARLSFDTRATVERARGLIALYQAAGVPRERVLIKIASTWEGIQAARVLQAEGIRCNLTLLFCLPQAAACADAGVQLISPFVGRIYDWHKKNAGAEWVEDARRGANDPGVQSVSRIYRYYKRFGIETEIMGASFRNVDQILALAGCDLLTISPELLTRLAQTEGEVPAALSPQAGHDDADAVRLDGGEVAFRTQLNEDAMASEKLSEGIRLFVADARKLDALIESHGAA

SEQ ID NO: 4180 - protein, 496 aa, Davidiella tassiana
MTSVQLETPHSGKYEQPTGLFINNEFVKGQEGKTFDVINPSDESVITQVHEATEKDVDIAVAAARQAFEGSWRLETPENRGKLLNNLANLFEKNTDLLAAVESLDNGKATSMARVTSACASGCLRYYGGWADKITGKVIDTTPDTFNYVKKEPIGVCRSDHSLELPLLMWAWKIGPAIACGNTVVLKTAEQTPLGGLVAASLVKEAGFPPGVINVISGFGKVAGAALSSHMDVDKVAFTGSTVVGRTILKAAASSNLKKVTLELGGKSPNIVFEDADIDNAISWVNFGIFFNHGQCCCAGSRVYVQESIYDKFVQKFKERAQKNVVGDPFAADTFQGPQVSKVQFDRIMEYIQAGKDAGATVETGGSRKGDKGYFIEPTIFSNVTEDMKIVKEEIFGPVCSIAKFKTKEDAIKLGNASTYGLAAAVHTKNLNTAIEVSNALKAGTVWVNTYNTLHHQMPFGGYKESGIGRELGEDALANYTQTKTVSIRLGDALFG

SEQ ID NO: 4181 - protein, 481 aa, Vibrio parahaemolyticus RIMD 2210633
MSKGMTMQQIQNQSLVSFMVANPQQGIAVTNPATGELLGYAPVSTENDILNSIERAHVAQKEWSALPAKTRAGMLNRWFQLLLENKADLGRLMTLEQGKPLAEAQGEVLYGASFIEWFAEEAKRTYGETIPAPSADKRLVTIKQPIGVACAITPWNFPIAMITRKAAPALAAGCSFVVKPSESTPLSAFAVAELAYQAGIPRDVLQVVLGENSRQVGAIFTSHPLIRKLSFTGSTQVGRVLMQQSAADIKRTSMELGGNAPFIVFDDADIDAAVAGAMASKFRNAGQTCVCANRFYVHSKVYDEFVAKFDAAVQQLKVGNGLEEGVNIGPVISESAKQGIQALIDGAIEQGAKPVSALKELDGLFMQPVVLKGVTHDMKIVSEEIFGPVAPVIRFDSDEQLIEMANDTIYGLASYFYSQNIHRVWKIAEALEYGMVGINEGMISTEVAPFGGVKQSGIGREGAKQGIDEYMDVKYLCFGGN

SEQ ID NO: 4182 - protein, 138 aa, Pyrococcus furiosus DSM 3638
MGDKTKVQVSKLKPGRYIIIDDEPCRIVNITVSSPGKHGSAKARIEAVGIFDGKVRSIVKPTSAEVDVPIIDKRTAQVIAVTPDTVQIMDMETYEMFEVPLDTGVEEEIKDKIKEGINVEYWETLGRIKIMRIKGEEE

SEQ ID NO: 4183 - protein, 487 aa, Mycobacterium tuberculosis H37Rv
MSDSATEYDKLFIGGKWTKPSTSDVIEVRCPATGEYVGKVPMAAAADVDAAVAAARAAFDNGPWPSTPPHERAAVIAAAVKMLAERKDLFTKLLAAETGQPPTIIETMHWMGSMGAMNYFAGAADKVTWTETRTGSYGQSIVSREPVGVVGAIVAWNVPLFLAVNKIAPALLAGCTIVLKPAAETPLTANALAEVFAEVGLPEGVLSVVPGGIETGQALTSNPDIDMFTFTGSSAVGREVGRRAAEMLKPCTLELGGKSAAIILEDVDLAAAIPMMVFSGVMNAGQGCVNQTRILAPRSRYDEIVAAVTNFVTALPVGPPSDPAAQIGPLISEKQRTRVEGYIAKGIEEGARLVCGGGRPEGLDNGFFIQPTVFADVDNKMTIAQEEIFGPVLAIIPYDTEEDAIAIANDSVYGLAGSVWTTDVPKGIKISQQIRTGTYGINWYAFDPGSPFGGYKNSGIGRENGPEGVEHFTQQKSVLLPMGYTVA

SEQ ID NO: 4184 - protein, 152 aa, Oryza sativa (japonica cultivar-group)
MATEEDVKQRQIIESRARNISHNVRCTECGSQSIEDSQADIAILLRKLIRDEIKSGKSDKEIYKKLQADYGETILYTPKFDLQTAAIWLSPVIVGGVAAGVWAYQKHRQRTNVHIMALNLVRGVPLTPREKETMLDVLTPPPPANKWWWPGK

SEQ ID NO: 4185 - protein, 372 aa, Bacillus subtilis subsp. subtilis str. 168
MTATRGLEGVVATTSSVSSIIDDTLTYVGYDIDDLTENASFEEIIYLLWHLRLPNKKELEELKQQLAKEAAVPQEIIEHFKSYSLENVHPMAALRTAISLLGLLDSEADTMNPEANYRKAIRLQAKVPGLVAAFSRIRKGLEPVEPREDYGIAENFLYTLNGEEPSPIEVEAFNKALILHADHELNASTFTARVCVATLSDIYSGITAAIGALKGPLHGGANEGVMKMLTEIGEVENAEPYIRAKLEKKEKIMGFGHRVYKHGDPRAKHLKEMSKRLTNLTGESKWYEMSIRIEDIVTSEKKLPPNVDFYSASVYHSLGIDHDLFTPIFAVSRMSGWLAHILEQYDNNRLIRPRADYTGPDKQKFVPIEERA

SEQ ID NO: 4186 - protein, 444 aa, Zea mays
MDEFELEDNLEFILQSIQELMEDPGDNNAFGDANQNELFASIVNYDQENMLPDVSAADVAAGKDIQGIPWEKMLFGRDKYREMKMKNYRNYQNLSYAREDALQECKQVKKDSPYYDFHYNTRRARPSIVHFQLRNLVWATTKHDVYTMHDQSVTHWSSLEQTSTELINADDCIVPKQRGHGSQSVAMVQVTTMAVDSNLLVVGGFQGEIICKRLDDEGVVYSTRVTDDENAITNSLEMYQDPSGSRRLVAANNDCSIRIFDTEYFDLLKHYVFPWSVNSVSVSPNGKLFAVLGDHEDGCVVDPKCGKAIGSLRGHLDYSFASAWHPDGNIVATGSQDTTCRLWDIRNLSQSVAVLGGRMGSIRCVKFSSDGRFLATAEPVDFVHMYDAYADYSRSHEIDLFGEIGGLAFSPDTEAFYVGLADQTYGGMIEFSKRHQHHYLNSLW

SEQ ID NO: 4187 - protein, 223 aa, Vibrio cholerae O1 biovar eltor str. N16961
MNTPMFTRTSSLERTLETNKVLKNTYFLLSMTLVTSAIAAMATMAIGISPIVALVMQLAAIGILFFVMPKAINSSSGLVWTFVFTGLMGGALGPMLNFYAAMPNGPIVIAQALGLTGMVFLGLSAYTITSKKDFSFMRNFLFAGLIIVIVAALINIFVGSTVAHLAISSVSALVFSGFILFDTSRIVRGEETNYISATISMYLNILNLFTSLLSILGIMNNND

SEQ ID NO: 4188 - protein, 479 aa, Staphylococcus epidermidis ATCC 12228
MEVFNMTNQLFINNEFIESQSKETMDVINPATGEAFDTITLATEEEVNDAIEKSQQAQLEWERVPQPTRAEHVKLLIPLLEKNRDEIAQLYVKEQGKTLTQAYGEIDKSISFIDYMTSLSMSDKGRVLQNSIANETIQIINKPIGVTAGIVPWNAPILVLMRKVIPAIVTGCSVVIKPSEETTLLTLRLAELFRASTIPAGLIQIVPGTGETVGTQLASHKDIQLISLTGSMRAGKSVYENAAQTVKKVNLELGGNAPVIVTSNADLDKAVNYIVTARINNAGQVCTCPERIFVHEDVHDDFLNKVTSKMKSLTVGDPFDENTDYGAIINQKQLDSIHEKVQDAIKNGATLMTGGHQLKRHGFFYAPTVLDNVRKDDNVFKDEIFGPVLAITTYRDFEQVIEDANDTNAGLSSYIFSENLTEVMTATERLKFGEVYANCEAEEVVNGYHAGWRESGLGGADGIHGFEEYYNTTVSYIRY

SEQ ID NO: 4189 - protein, 374 aa, Glycine max
  misc_feature (107)..(107): Xaa can be any naturally occurring amino acid
  misc_feature (310)..(310): Xaa can be any naturally occurring amino acid
  misc_feature (345)..(345): Xaa can be any naturally occurring amino acid
SYCWSRFEEGEESLARQLPKGLSKEEEDSLLGQVEIWRYMTCFTDSVALKAVIELRIADILDRYGKPLSLSQIVENIEDAPSPDASLLQRVLRVMVRRKIFSAQENXRDRGETLFGLTRASKWILRDTKMTLAPMLLLENHPIHLNPAHYISEIIREGTKNGTAFFKCHGHEQFEMTGLDPEYNRLFNEGMVCTARVVSKAVITGYKDGFNQIKSLVDVGGGIGGSLSEIVRAYPHINAINFDLPHVVATAPKFDGITHVGGDMFVSIPSADAIYMKWILHDWSDEHCIKILKNCRKAIPEKTGKVIIRXDTFFDPKGNELFTDVGIAFDMMLLAHNAGGGERTXQNLKWLSKETRFARFNIININALTYVIEA

SEQ ID NO: 4190 - protein, 75 aa, Glycine max
  misc_feature (10)..(10): Xaa can be any naturally occurring amino acid
  misc_feature (39)..(39): Xaa can be any naturally occurring amino acid
  misc_feature (54)..(54): Xaa can be any naturally occurring amino acid
ASSMISSPAXTTVNRAGAGMVAPFTGLKSMACFPTQKTXHDITFIASNRGRMQXLQVLQPICKKNFETFSYFQTL

SEQ ID NO: 4191 - protein, 487 aa, Sinorhizobium meliloti 1021
MTLSFDPDTLPLPVGHFIDGRLVPAEGIIDMHRPSDGKPYAGCPLADEVLVDRAVETAKKALKATNWSGVRPRERTVVLQRWADLIESEAETLAKLEALSSTRPVGHLVAGDIAVSAEQIRFFAEFADKEGSDLVPTDDSNLGMIMTEPYGVVGAITPWNFPVSMAAWKLGPALAAGNAVVLKPSEMTPFSTVYLAELAIRAGLPAGLINIVLGDGPVTGTAMTGHPDIAKVSFTGSTGAGTAIMTNVACTGIKPMTLELGGKSPQLVFADADLDKAAAAIAQSMLSNAGQACVAGSRLIVEECIAAPLAEAIVTRMEAAKPGPTWDETSEYSPIISKRQLNRIHGIVEAAVEAGGECLFGGAQMDAPGYFYQPTLMAVRDSSSPAITEEIFGPVLTMQTFADEEEALALADHPTYGLAAGLFTRDLSRALGLTRRLQAGTVWVNRYSRSRDHILPTGGYKRSGIGKDLGREAYHANRKSKSVLISL

SEQ ID NO: 4192 - protein, 347 aa, Sinorhizobium meliloti 1021
MKSYSIALIPGDGIGQDVTDAAWQVLSTVARHSGFTLTGTSFPWSCAFYKETGAMMPADGIEALRPFDAILLGSVGWPAEVPDSISLHGLLLPIRKAFVQYANIRPHRLLSGVEGPLKASDFDILCVRENTEGEYSGAGGRVHQGTADEVAVETSIFTRAGVERILRFAFEQARQRRGKLASVTKSNAQKHSMVFWDEVTRQLADEYPDVEVTSYHIDAMAARVVMAPESLDVVVASNLFGDILTDLGAAIQGGLGFAASANINPDRSAPSMFEPVHGSAPDIAHLGIANPIAAIWSGAMMLEHLGEREAAGMIMAALERTTIRGIGTVPGKDRTRSITAAVLAALD

SEQ ID NO: 4193 - protein, 159 aa, Triticum aestivum
  misc_feature (5)..(5): Xaa can be any naturally occurring amino acid
MKTFXIFVLLAMAMKIATAARELNPSNKELQSPQQSFSHQQQPFPQQPYPQQPYPSQQPYPSQQPFPTPQQQFPQQSQQSFPQPQPQQPQQPSILQPQQPLPQQPQQPFQQPQQQLSQQPEQTISQQPQQPFPQQPHQPQQPYPQQQPYGSSLTSIGGQ

SEQ ID NO: 4194 - protein, 497 aa, Staphylococcus epidermidis ATCC 12228
MTNINVRNYIDESYGLFINNEFQASDSGETLTVSNPANGEDLAKVARAGKKDVDKAVQAAHDAFDSWSKISKEERADYLLEISRRIHEKTEHLATVESLQNGKPYRETSTIDVPQAANQFKYFASVLTTDEGSVNEIDQNTMSLVVNEPVGVVGAVVAWNFPILLASWKLGPALAAGNTVVIQPSSSTPLSLIELAKIFQEVLPKGVVNVLTGKGSESGDAIFHHEGVDKLSFTGSTDVGYGVAQAGAERIVPTTLELGGKSANIIFDDANLEQVIEGVQLGILFNQGEVCSAGSRLLVQSSIYDELLPKLKEAFENIKVGDPFDEDTKMSAQTGPEQLDKIESYIKIAEEDDKANILTGGHRITDNGLDKGYFFEPTIIEINDNKHQLAQEEIFGPVVVVEKFDDEQEAIEIANDSEYGLAGGIFTTDIHRALNVAKAMRTGRIWINTYNQIPAGAPFGGYKKSGIGREVYKDAIKNYQQVKNIFIDTSNQTKGLY

SEQ ID NO: 4195 - protein, 303 aa, Pisum sativum
MDLDQWISKVKDGQHLLEDELQLLCEYVKEILIEESNVQPVNSPVTVCGDIHGQFHDLMKLFQTGGHVPETNYIFMGDFVDRGYNSLEVFTILLLLKARYPANITLLRGNHESRQLTQVYGFYDECQRKYGNANAWRYCTDVFDYLTLSAIIDGTVLCVHGGLSPDIRTIDQIRVIERNCEIPHEGPFCDLMWSDPEDIETWAVSPRGAGWLFGSRVTSEFNHINNLDLVCRAHQLVQEGLKYMFQDKGLVTVWSAPNYCYRCGNVASILSFNENMEREVKFFTETEENNQMRGPRTGVPYFL

SEQ ID NO: 4196 - protein, 447 aa, Bacillus subtilis subsp. subtilis str. 168
MGSTQLTGRVIFKGDPGYTEAIKNWNPYVDVYPLVFVFAQNSYDVSNAIKWARENKVPLRVRSGRHALDKNLSVVSGGIVIDVSDMNKVFLDEENAIATVQTGIPVGPLVKGLARDGFMAPFGDSPTVGIGGITMGGGFGVLSRSIGLISDNLLALKTVDAKGRIIHADQSHNEDLLWASRGGGGGNFGYNTQYTFKVHRAPKTATVFNIIWPWEQLETVFKAWQKWAPFVDERLGCYLEIYSKINGLCHAEGIFLGSKTELIRLLKPLLHAGTPTEADIKTLYYPDAIDFLDPDEPIPGRNDQSVKFSSAWGHDFWSDEPISIMRKFLEDATGTEANFFFINWGGAISRVPKDETAFFWRHPLFYTEWTASWKNKSQEDSNLASVERVRQLMQPYVAGSYVNVPDQNIENFGKEYYGANFARLREIKAKYDPENVFRFPQSIPPSR

SEQ ID NO: 4197 - protein, 372 aa, Glycine max
  misc_feature (23)..(23): Xaa can be any naturally occurring amino acid
  misc_feature (55)..(55): Xaa can be any naturally occurring amino acid
  misc_feature (67)..(67): Xaa can be any naturally occurring amino acid
  misc_feature (106)..(106): Xaa can be any naturally occurring amino acid
  misc_feature (114)..(114): Xaa can be any naturally occurring amino acid
  misc_feature (123)..(123): Xaa can be any naturally occurring amino acid
  misc_feature (162)..(162): Xaa can be any naturally occurring amino acid
  misc_feature (176)..(176): Xaa can be any naturally occurring amino acid
  misc_feature (185)..(185): Xaa can be any naturally occurring amino acid
  misc_feature (228)..(228): Xaa can be any naturally occurring amino acid
  misc_feature (253)..(253): Xaa can be any naturally occurring amino acid
MGSTGETQNTPTHVADEEANLFXAMQLASASVLPMILKSALELDLLEIIAKAGPXGVHLSPCDIASXLPTHNPDAPVMLDRILRLLACYNILSFSLRTLPHGKVEXLYGLAAVXKYLVRNEDXGVSIAALNLMNQDKILMESWYYLKDAVLEGGLPFNKAYXGMTACEYHGTDPRXFNKVFNKGXMADHSTITMKKILETYTGFEGLKSLVDVGGGTGAVVNMIVSKXYPTIKGINFDLPHVIEDAPSYPGVXHVGEDMFVSVPKADAIFMKWICHDWSDEHCLKFLKNCYEALPDNGKVIVAECILPVAPDSSLATKGVVHIDVIMLAHNPGGKERTEKEFEALAKGSGFQGFQVLCCAFNTYVMEFLKKV

SEQ ID NO: 4198 - protein, 426 aa, Listeria innocua Clip11262
MYVLKNGQVLNESGELENKDVLIQNGKVNLIADSIEVTSGEEFDATGKLIAPGFIDVHVHLREPGGEHKETILTGTKAAARGGYTTICSMPNTKPVPDSKEVMNSLQAKIKETAEVRVLPYASITTSLGTDELVDFEALKEAGAFAFTDDGVGVQLAGTMYEAMKRAAALDMAIVAHCEDNSLIYGGVVHDGIFAEKEGLKGIPNIAESVQIARDVLLAEAAGCHYHVCHISTKESVRVVRDAKRAGIRVTAEVSPHHLILDEEDIPGNDGNWKMNPPLRSKEDRAALLEGLLDGTIDFIATDHAPHAAEEKNVPMEQAAFGIVGLETAFPLLYTHFVKTNEWTLKQLIDWMTVKPAECFKLPYGKLEEGAVADIVVLDLEKEATIDPATFYSKGKNTPFVGETCIGWPVATFAEGELVYNEGENK

SEQ ID NO: 4199 - protein, 103 aa, Glycine max
  misc_feature (68)..(68): Xaa can be any naturally occurring amino acid
  misc_feature (81)..(81): Xaa can be any naturally occurring amino acid
MASSMISWPGVTTVKRADAGMVASFTGLKSMAGFPTSNTNNDITFIAINGGRRRCTQASPPIGNKKFXTLSYLTDLDNAQXAKEVLFLLTKGLIPCFKFELEH

SEQ ID NO: 4200 - protein, 154 aa, Zea mays
MASDRVLGTVKWFNGTKGFGFITPDDGSEDLFVHQSSIKSDGYRSLNDGDAVEYTVGSGNDGRAKALDVTAPGGGPLAGGERPDGGNGGGRGGYGGGDRGYGGGGDRGYGGGGDRGYGGGDRGYGGGGDRGYGGDRGYGGGGGYGGGYGGGGGG

SEQ ID NO: 4201 - protein, 332 aa, Glycine max
  misc_feature (300)..(300): Xaa can be any naturally occurring amino acid
MSPIKLGLVAREPTGEVNVRGNPNNNNLFDGCQGESDHWSELDTDLYHWTKALRPVQWFPGHIAKAEKELKEQLKLMDVVIEVRDGRIPMSTSHPQMELWLGNRKRILVLNREDMISTADRNAWADYFTRNGTKVVFSNGQLGMGTMKLGRLAKELAADVNVRRRTKGLLPRAVQAGIVGYPNVGKSSLVNRLLKRRMCPAAPRPGVTRELRWVRFGKDLELLDSPGILPMRINDQSAAIKLAICDDIGERSYDVADVAAILVQMLTKLPTVGRDALCKRYKIDVDCRDGRTFIEKLAVXVFNGDVHQAAFRVLADFRKGKFGWTALERPPK

SEQ ID NO: 4202 - protein, 700 aa, Zea mays
MSVSPSSLCGGDPAMRIVVWFRRDLRVEDNPALAAAARAGGEVVPAYVWSPEEEGPYYPGRVSRWWISQSLNHLDASLRRLGAGKLVTRRSADAAVALLQLVRDTGATHVYFNHLYDPISLVRDRRLKEMLAAEGIVVQSFNSDLLYEPWEVVDDEGQPFTMFDPFWNRCLSMPYDPPAPLLPPKRINSGDLSMCPSEDLIFEDESERGSNALLARAWTPGWQNADKALTAFLNGPLADYSVNRKKADSASTSLLSPHLHFGELSVRKVFHLVRMKQLVWSNEGNHAAEESCTLFLRSIGLREYSRYLSFNHPSSHERPLLAHLRFFPWVVDESYFKIWRQGRTGYPLVDAGMRELWATGWLHDRIRVVVASFFVKVLQLPWRWGMKYFWDTLLDADLESDALGWQYITGSLPDGRELDRIDNPQFEGYKFDPHGEYVRRWIPELARLPTEWIHHPWDAPVSVLQAAGIELGSNYPLPIVELDAAKGRLQAALSEMWQLEAASRATMNNGTEEGLGDSSEVLFPQELQMEVDRQPAPAEAAANVHVPVPMPARRRGDQMVPTMTTSSLNRAGTEVSADLVVANSEEEDTRAQVPFHAHLHPRAEAPPAARRTNNGARQHDVFQQPRNHRREALLAPSASEASSSWTGREGAVVPVWSPPAASGHSDAFAADEADVSSRSYLGRHPQSHRLMNWSQLSQSS

SEQ ID NO: 4203 - protein, 139 aa, Triticum aestivum
  misc_feature (31)..(31): Xaa can be any naturally occurring amino acid
DGGVLREITMHDLLETIHICETDHLAIDVSXDSLPPLYVGYKDPGDRLHVGDARQLLRNSPEGKYDAINCDSSDPIGPAQELVEKPFFQTIAWASKPGRVLHNIAESMMVYTHVIQDMLSICREGFMAGLPYAWASVTT

SEQ ID NO: 4204 - protein, 218 aa, Bdellovibrio bacteriovorus HD100
MIKSKVRTASKGFPRAFSCDLPPPPLEYAHQGETMRIFTLIALILCTSFAWAKDTPSSFFDLSANSLSGKKVNFSTYRGKVVLVVNTASQCGFTPQLKELEEMYKKYADRGFVVLGFPSNDFKQEKGTNDEVQTFAAKEFGVTFPLFDKAPVSGKDIQPVYQFLTTQKPGLIFKDVAWNFEKFLINRKGQVVERWSSITKPSSDSITKSVEKALNEPL

SEQ ID NO: 4205 - protein, 146 aa, Triticum aestivum
  misc_feature (102)..(102): Xaa can be any naturally occurring amino acid
  misc_feature (114)..(114): Xaa can be any naturally occurring amino acid
  misc_feature (127)..(127): Xaa can be any naturally occurring amino acid
  misc_feature (135)..(135): Xaa can be any naturally occurring amino acid
MAQESLRLVCPPVSAHEGRLPRQYTLEGQGAKKDISPPLEWYGVPDGTRSLAVVVQDVDADERVPWTHWVVVNISPEEKGLPEGFSGAGGNANAGGGDGGVXQEGVNDWSQPGXGRGPVPDSHGHRXIQFRLYAXLDDVLSLGQQG

SEQ ID NO: 4206 - protein, 164 aa, Neurospora crassa
MTALFNFQSLLLVIILLVCTSTYIHQMFPAILDRNKDGLMGIFWKCARIGERLSPYVSICCIFMASIGESDSPGDIRIDSFLDAGQQGRQIQRKYFKVKQADGNQAMEDSTGDDDLACSGTPTLCDYRRPELSTPGQSLSVKRDRQGLCGTWKQRTPYRQCWTP

SEQ ID NO: 4207 - protein, 459 aa, Zea mays
  misc_feature (24)..(24): Xaa can be any naturally occurring amino acid
  misc_feature (110)..(110): Xaa can be any naturally occurring amino acid
  misc_feature (137)..(137): Xaa can be any naturally occurring amino acid
MAYAAGRKKRVGRYEVGRTIAPGXTCAKVKFAVDTDTGAPVPMKVLDKGTMFGHRMLHQIKREISIMKILRRRNIVRLNEVLAGKTKLYIILDTPPGQRRDRYNGPIKEXIRIVLHGKLLENEARKYFKLLIDAIDXLHHKGVYHRDLKPQNLLLDSRGNLKLSDFGLSTLSQNGVGLVHTTCGTPNYVAPEVLSSNGYDGSAADIWSCGVILYVLMAGYLPFEENDLPHLYEKITAAKYSCPYWFSPGAKSLIQRILDPNPRTRITIEEIREDPWFKKNYVTIRCGEDENVSLDDVQAIFDNIEDKYVSDEVTHKDGGPLMMNAFEMIALSQGLDLSALFDRQQEFVKRQTRFVSRKPAKTVVATIEVVAESMGLKVHSRNYKVRLEGPASNRASQFAVVLEVFEVAPSLFMVDVRKVAGDTPEYHRFYENLCSKLCSIIWRPTEVSAKSTPLRTTTC

SEQ ID NO: 4208 - protein, 398 aa, Streptomyces coelicolor A3(2)
MLSEQSVPVVRATLPAVGAAIGDIAALFYRKLFDAHPELLRDLFNRGNQANGEQQRALAGSVAAFAGLLLENPDERADVLLSRISHKHASLGITPDQYTIVHRHLMAAVVDVLGDAVTPEVARAWDEVYWLMANALIALEARLYTEKGVAEGDVWRTMEIVDRVEESADAVSLVLGSADGRPVVPFRPGQYVSVQVELADGARQIRQYSLSAAPGRSDWRITVKRVRGDGQPDGEVSSWLYANARKGDALNVSLPAGDLALAEHDGPLLLVSAGIGVTPMLSMLDHLAAAGATRPVTVVHADRTPDHHAHRQEQLDLIRTLPGARLHLWYEEPGDRAPEASTGRADLTGLDLPADLTVYLCGPVPFMRAVRGDLLRRGVPAEAIHYEVFGPDLWLGQQ

SEQ ID NO: 4209 - protein, 449 aa, Porphyromonas gingivalis W83
MKILLRNALITNEGKTFPGSVMIDGAFISRIIEGELPADDNLSADEVIECSGLRLFPGCIDDQVHFREPGLTHKATIASESRAAVAGGVTSFMDMPNTNPPTTMWERLLEKRQIGADTAWANYGFFFGGTNDNIDEIKRVDKHLVPGLKLFLGSSTGNMLVDNKETLEKIFGECDLLIATHCEKEEIIRANKEHYKAKYGNDLDIHFHPLIRSEEACYRSSAEAVELAERMNARLHILHLSTEKELSLFRNDIPTAQKRITSEVCVHHLWFSDTDYGRLGNRIKWNPAIKKESDREALRAAVRNGRIDIIATDHAPHLLREKEGSCLQAASGGPLVQHSLLALLELCNQGIFSIEEIVSKTAHIPATLFAIEKRGYIRPGYYADLVLVDPSSPHTVSADNILSLCGWSPFEGFTFSHSVAYTFVNGCLAYAKGRLAESRPTVHPLFFNR

SEQ ID NO: 4210 - protein, 283 aa, Streptococcus mutans UA159
MSKIQWFPGHMSKARRQVQENLKFVDFVTILVDARLPLSSQNPMLTKIIGDKPKLIILNKVDLADSTCTAEWCNFFEKQGIKALAVNSKEQSAVKKVTEAAKGLMTDKLVKLRERGIQKENLRTMIVGIPNVGKSTLMNRLAGKKIAIVGNKPGVTKGQQWLKSNKNLEILDTPGILWPKFEEEAVGLKLAMTGAIKDNLLPMDEITIFGLDFFKRYYPERLLERYKGIDLEEEAPEIIMSMTQKLGFRDDYDRFYQVFIKDVRDGRLGCYTLDRLAELDGND

SEQ ID NO: 4211 - protein, 371 aa, Helianthus annuus
MAGVVKEFDSSHDMFKVREEPKVVFNNKDLSEEMMKIKEEPMLVFDEHEDFVGGEEAPKPIEGLRDGGPPPFLKKTFEMVDDPTTDSIISWSSSKNSFILWDPHKFSTDLLPQRFKHNNFSSFVRQLNTYRFKKIDPDRWEFANEFFQKGKKHLLRDIKRRTNQPQNTQKQEEIRKQEQQQCCGHQTNSTMETELKNLRKERITLKQEILKMKQQQENTEKHLEMVEERMLRMEFKQQQLLVFMSKAFRNPIFVKLLQHLVQKQKTGSVEMCKKRKLEQMLNTDDLDRFQEMWNMIEPDAYTVLSSDGSVSPPEDQNTSDKSGSNGSDYNSESFILWEKLMEDELIFGGEQSGKDQTETYLQEWEELIPKA

SEQ ID NO: 4212 - protein, 369 aa, Vibrio parahaemolyticus RIMD 2210633
MKTQKQWIELKNNLNIENRAYINGEYSAALTGQTIPVVNPATDEIFTEIARCQSEDVDLAVSCARQAFQSGQWSESSPAHRKAVLKQFADLIDQHQEELALLETLDTGKPISHSFSTDIPGAANSLRWYAEAIDKVYGEVAPTEKDVHAFVSHQPIGVVAAVVPWNFPLWLACWKLGPALAAGNSVLLKPSEKSSLTAIFLGQLASQVGLPTGVFQVVTGFGHEAGDALAKHQDVDCIAFTGSTRIAGQLMVSSGESNLKRVFAEAGGKNANIVFEDCDDLDRAAAETAAGCFYNQGEVCVAATRLLVHESIKDQFIEKVIQASKAFTPKDPMNPSSSMGALIDQDHKSKVLEYISLGESEGAIRALWR

SEQ ID NO: 4213 - protein, 316 aa, Bifidobacterium longum DJO10A
AVGYGAKEAGTSCFMTPKTFKLISRLREEGVKRGLEILIEVHSYYKKQVEIASKVDRVYDFALPPLLLHSLFTGHVEPVAHWTEIRPNNAVTVLDTHDGIGVIDIGSDQLDRSLKGLVPDEDVDNLVNTIHANTHGESQAATGAAASNLDLYQVNSTYYSALGCNDQHYLAARAVQFFLPGVPQVYYVGALAGRNDMELLRRTNNGRDINRHYYSTAEIDENLERPVVKALNALAKFRNELPAFDGEFSYEVDGDTSITFRWTAADGTSTAALTFEPGRGLGTDNATPVASLAWSDAAGDHETRDLLANPPIADID

SEQ ID NO: 4214 - protein, 371 aa, Cryptococcus neoformans var. grubii
MPLESCMLILDNSEYMRNGDYPPTRFQAQAEAVQTVFTAKTDANPESAVGMMTMAGNSPSLLVTPTNDLGRLMHALSKVLISNTAQLSTAISIAQLALKHRENKNQRQRIVIFVGSPLGESAESLVKLGKRLRKNNVFVDIVTFGDEGRDNDEKLRGLVEAVGDESNLVSVPPGERFLSDVIASSPILFDGENPMAAAGGFEGDIDPNMDPELAMAIRMSLQEAQAQQSQSADAGPSSGAGVALPDSLTQPLSTTHPSSSSGDVLMAPGDKGNLPGTPNAQAHAEAADKAGAIAESGTGSTFISGNPLTGNRAPDVAQQEEEDEELKRALAMSRGEGGDIEMEEEEDEEAAIARAIAMSLEGQEEGKDKNH

SEQ ID NO: 4215 - protein, 434 aa, Beta vulgaris
MDRYKLLKELGDGTCGTVYKAVNRESYEIVAVKKMKRKFYFWEECVNLREVKSLPSIESSHIIKLKEVVRENNDLFFIFEYMQYNLYQIMKDRHRPFTEEEIRNFLTQVLQGLAHMHRNGYFHRDLKPENLLVTNDVIKIADFGLAREVSSIPPYTEYVSTRWYRAPEVLLKSSLYTPAIDMWAVGAVLAELFTSCPIFPGESETDQLYKICCVLGAPDWAVFPEAKNISQLTSISYSQMLPANLSEIIPNANWEAIDLISQLCSWDPLKRPTAEQALHHPFFHVALRVPRPIHDPFHSKPDYTKTKPNLELNLWDFDSKADDCFLGLTLAVNPGVSSLEMGPRVSGSTRQDVYFCSSFQDHPEQSVFWSLFSPCRNGATPPVDPSLSLSFSSITHPRIAVPHSGGFGLAALQPGILDGPLLVVSSPHQPSHYL

SEQ ID NO: 4216 - protein, 470 aa, Thermobifida fusca
MASLPSVSYSITVRLEIDGRASAVSSLTNAVERVGGAVTALDVNSSGRERLRIDVTCAARDTNHAQAIVEALDAVEGVTVHKVSDRTFLMHLGGKIEMRSKVPLRNRDELSMAYTPGVARVSAAIAANPEDARRLTVKRNSVAVVTDGSAVLGLGNIGPEAALPVMEGKAALFKRFADIDAWPIALDTQDTDEIVRAVQLIAPGFGGINLEDISAPRCFEVEARLRELLDIPVFHDDQHGTAIVVLAALKNALRVVGKELGSVRIAMSGAGAAGTAILKLLLHAGAKDVVVCDVHGAVHQGRGDLDANLRWIAEHTNPDGYAGDLAGAVRGADVFIGVSAPNLLSGEEIAEMNEDAIIFALANPEPEVDPEIAALHAAVVATGRSDYPNQINNVLVFPGFFRGLLDAQSHRVTPDMMLAAASALAAVVTEEELSPHYIIPSVFHPGLAQRVAEAVREVALREGGVERHEN

SEQ ID NO: 4217 - protein, 430 aa, Haemophilus influenzae R2846
MMDEQSLLAFDTQHIWHPYSSVSSDMPLYAVERADGVMITLKDGRRLIDGMSSWWAALHGYNHPRLNAAAQNQLAKMSHIMFGGFTHDPAVELAQLLVQILPNGLDKIFFADSGSVAVEVAMKMAIQYQHAKGEVQRQKFATIRSGYHGDTWNAMSVCDPTTGMHHLFHHSLPVQYFLPQPNIPFNESWNDCAIEPLADLLKKKGSEIAALILEPVVQGAGGMYFYSPTYLVKAQALCKQYGVLLIFDEIATGFGRTGKLFAAEHAGISPDIMCIGKALTGGYLTLSATITTTEIAQIICRGEAKCFMHGPTFMANPLACAIAAESIRLLLESPWQQNIQRIEHSLTQQLSPLAEKDYVKEVRALGAIGVVEMKSAVNMKTLVPRFVEQGVWIRPFGKLVYVMPPFVIKNDELQKLTEGMILALTQEYEH

SEQ ID NO: 4218 - protein, 484 aa, Sinorhizobium meliloti 1021
MRLKDRELFRQLGLIGGEWIAGASGVVVDVIDPANQAVLGTVPDMGTAETRAAIEAANAAFGPWKKKTHAERAAVLERWHALMIENLEDLAVLVTMEQGKPLEEARGEIRYGAAFVKWFAEESRRIGGHTIPSPTSDRRIVVLKEAVGVCAIVTPWNFPNAMITRKVAPALAAGCTVVIKPSEFTPFSALALGVLAERAGIPAGVVNIVTGMPTAIGNEFMTNETVRKISFTGSTRVGSLLMRGAADSVKRLSLELGGNAPFIVFDDANLDLAVEGAIASKFRNGGQTCVCANRILVQAGVYDAFAEKLGARVNAMKVGPGTEPGIAIGPMINEAAIDKIDRHVEDAIAKGAKLAARGRSVPEGRQYTAPIVLTGATTDMLLASEETFGPVAPLFRFETEDEAIAIANGTPFGLAAYFYTEGLKRSWRVAEALEFGMIGLNTGAISTEVAPFGGVKQSGLGREGAQVGIEEYLEMKSFHIGGLD

SEQ ID NO: 4219 - protein, 468 aa, Bradyrhizobium japonicum USDA 110
MEAARVFDSKPNSAEARDIAFHLHSQTNPQRHAEIGPLIMARGEGVHVYDASGKRYLEAMAGLWCTSLGFSETRLKAAAATAYDKFGFYHSFNHKTPDNTIELAEKLVEISPIPDAQAYFATSGSEATETMVKLAWVYHAVRGKPGKRKIIARDRGFHGSTIVAASMCGLPRMHREFGLPLDGFLHTHCPDAYRGTRPGESEAAFVDRLAADLEALIMAEGPDTIAAFIGEPINAGGGIVVPPKGYFAAIEAVLRRHDILVLGDEVVCGFGRTGNWFGCETVGMKPDMVALAKGITSSYFPMSAVLLGRPIRDALSEMNKGGELFGHGFTNSGHPVGAAIALETLNIYHEMDVVPHVRRMGSRLRAGLEQIARDSRIVGQVRGEGLMIGVELVAAPATRQAFDPALKVGAMFDALAIENGLIIRAMGDTIGFCPPLIIDEAGVDEALDLFGRTLFSAEAKLAEKRPSA

SEQ ID NO: 4220 - protein, 319 aa, Bacillus subtilis subsp. subtilis str. 168
MKRIGVLTSGGDSPGMNAAVRAVVRKAIYHDVEVYGIYNGYAGLISGKIEKLELGSVGDIIHRGGTKLYTARCPEFKTVEGREKGIANLKKLGIEGLVVIGGDGSYMGAKKLTEHGFPCVGVPGTIDNDIPGTDFTIGFDTALNTVIDAIDKIRDTATSHERTYVIEVMGRHAGDIALWAGLAGGAESILIPEADYDMHEIIARLKRGHERGKKHSIIIVAEGVGSGVEFGKRIEEETNLETRVSVLGHIQRGGSPSAADRVLASRLGAYAVELLLEGKGGRCVGIQNNKLVDHDIIEILETKHTVEQNMYQLSKELSI

SEQ ID NO: 4221 - protein, 410 aa, Bacillus subtilis subsp. subtilis str. 168
MSLREEALHLHKVNQGKLESKSKVEVRNAKDLSLAYSPGVAEPCKDIHEDINKVYDYTMKGNMVAVVTDGTAVLGLGNIGPEAALPVMEGKAVLFKSFAGVDAFPIALNTNDVDKIVETVKLLEPTFGGVNLEDIAAPNCFIIEERLKKETNIPVFHDDQHGTAIVTVAGLVNALKLSGKSMSSIKVVANGAGAAGIAIIKLLHHYGVRDIVMCDSKGAIYEGRPNGMNDVKNEVAKFTNQDRKDGSLKDVIVDADVFIGVSVAGALTKEMVQSMAKDPIIFAMANPNPEIMPEDAREAGASVVGTGRSDFPNQVNNVLAFPGIFRGALDVRATHINEEMKIAAVEAIASLVSEDELSADYVIPAPFDKRVAPAVAKAVAKAAMETGVARITVDPEEVAEKTRKLTIIGE

SEQ ID NO: 4222 - protein, 458 aa, Sinorhizobium meliloti 1021
MYSNSLIELDRAHLIHPVASYRGHEKLGVRVLASAKGATVTDASGRQLIDGFAGLWCVNAGYGQETIVEAAAKQMRELSYATAYFGLGSEPAIRLASELAERAPGNLNHVYFTLGGSDAVDSTIRFIRYYWTARGEPQRDQFISVEQGYHGSSTVGAGLTALPAFHTGFGIPFDWQHKIPSHYAYRNPVGDDPQAIIAASLTALRRKVEEIGPERVAAFYAEPIQGSGGVLVPPRGWMKAMRELCRDLGILFVADEVITGFGRTGPLFASTENEIVPDFITTAKGLTSGYVPMGAVFMADHIYQTIADGAGASAVGHGYTYSAHPVSAAVGLEVLRLYENGLLENGVKAGARLMEGLGSLRDHPLVGDVRGRGMLAAIELVVDKAQKTPLPAAAEPARRIFDRAWENGLVIRAFANGVLGYAPPLCCSETEIDAIIERTRQSLDETLEDPDVRRALKT

SEQ ID NO: 4223 - protein, 80 aa, Brassica napus
  misc_feature (10)..(12): Xaa can be any naturally occurring amino acid
  misc_feature (16)..(16): Xaa can be any naturally occurring amino acid
  misc_feature (18)..(18): Xaa can be any naturally occurring amino acid
  misc_feature (27)..(27): Xaa can be any naturally occurring amino acid
  misc_feature (49)..(49): Xaa can be any naturally occurring amino acid
  misc_feature (51)..(52): Xaa can be any naturally occurring amino acid
  misc_feature (59)..(59): Xaa can be any naturally occurring amino acid
  misc_feature (61)..(61): Xaa can be any naturally occurring amino acid
  misc_feature (64)..(64): Xaa can be any naturally occurring amino acid
MAYSMLSSAXXXTSPXQXTMDAPFTGXLKPSSAFPVTRKVNNDITSIAXSXXGRVSCMXVXPPXGKNKFETLSYLPDLTE

SEQ ID NO: 4224 - protein, 217 aa, Brucella melitensis 16M
MKFFVDTADVKEIRELNDLGLVDGVTTNPSLILKSGRDIIEVTKEICNIVKGPVSAEVAATEYEQMMKEAAVIARIADNICIKLPVTLDGLKACKALTSEGHKVNMTLCFSANQALLAAKAGATFISPFIGRLDDTGINGMELIAEIRTIYDNYDFRTEILAASVRTVNHVKEAALIGADVVTAPPATLKALVKHPLTYKGLETFLADWAKTGQKIA

SEQ ID NO: 4225 - protein, 181 aa, Apium graveolens var. dulce
GNSIAYKNVIGARRASWRIISSIEQKEESRGNDAHVATIREYRSKIENELSSICDGILKLLDSKLIGAASNGDSKVFYLKMKGDYYRYLAEFKIAAERKEAAENTLNAYKAAQDIANAELAPTHPIRLGLALNFSVFYYEILSSPDRACNLAKQAFDEAIAELDTLGEESYKDSTLIKSLV

SEQ ID NO: 4226 - protein, 126 aa, Helicobacter hepaticus ATCC 51449
MAISKEEVLDYIGNLSVLELSELVKAFEEKFGVSAAPTVVAGAVAGGAGGGAAAEEKTDFNVVLVDAGANKINVIKAVREITGLGLKEAKDATEQTPSTLKEGVSKEDAENFKKKLEEAGAKVEIK

SEQ ID NO: 4227 - protein, 90 aa, Zea mays
MDEEEHEVYGQEIPEDGDMDGADVDMDACGDDATKLQELDEMKRKLKEMDEEAAALRDMHAKVAKEMHGCDPSASTTEANEQVDARSLYV

SEQ ID NO: 4228 - protein, 180 aa, Mycoplasma agalactiae
MTPTRIIPLGGVQEIGKSTLIIEHGKHIVIIDAGIKFADTATTGIKGIVPDYKYLKERKDNIEGLFITHGHEDHIGGVVYLVKQVHLKRIYAPRIAIQYLKLKFEEHKITHKVEFIEIEKSAVHEFGNGQVKVDFWTAQHSIPDAFGIRVTTPNGSVMCTGDFRFDYNPIGEIYTDFTKL

SEQ ID NO: 4229 - protein, 159 aa, Glycine max
MDFRVMGLEPPLFHTLQHMMDMSEDAAGENKTYSAPTRSYVRDAKAMAATPADVKEYPNSYVFEIDMPGLKSGDIKVQVEDDNVLLISGERKRDEEKEGVKYLRMERRVGKFMRKFVLPENANTDAISAVCQDGVLSVTVQKLPPPEPKKPRTIEVKVF

SEQ ID NO: 4230 - protein, 307 aa, Petunia x hybrida
MDQYEKVEKIGEGTYGVVYKARDRVTNETIALKKIRLEQEDEGVPSTAIREISLLKEMQHANIVRLQDVVHTVKSDCILSFEYLDLDLKKHMDSSPEFSKDPRLVKMFLYQILRGIAYCHSHRVLHRVLHRDLKPQNLLIGRRTNALKLADFGLARAFGIPVRTFTHEVVTLWYRAPEILLGSRHYSTPVDVWSVGCIFAEMVTQRPLFPGDSEIDELFKIFRVMGTPNEDTWPGVTTLPDFKSALPKWPSKDLATIVPNLDGAGLDLLDKTVRLDPSKRITARNALEHEYFKDIGYVFRSKGSSRV

SEQ ID NO: 4231 - protein, 175 aa, Zea mays
  misc_feature (157)..(157): Xaa can be any naturally occurring amino acid
VGREAGREGAMEQGEEDGDWMMEPAAGKKGGAMIDRKKRFSEEQIKSLESMFATQTKLEPRQKLQLARELGLQPRQVAIWFQNKRARWKSKQLERQYAALRDDYDALLSSYDQLKKDKQALLNQLEKLAESLREPGGAKCGDNAGAARRDDVRLAVXGMNMKDEFVDAGGASKLY

SEQ ID NO: 4232 - protein, 471 aa, Bacillus megaterium
TIKEMPQPKTFGELKNLPLLNTDKPVQALMKIADELGEIFKFEAPGRVTRYLSSQRLIKEACDESRFDKNLSQALKFVRDFAGDGLFTSWTHEKNWKKAHNILLPSFSQQAMKGYHAMMVDIAVQLVQKWERLNADEHIEVPEDMTRLTLDTIGLCGFNYRFNSFYRDQPHPFITSMVRALDEAMNKLQRANPDDPAYDENKRQFQEDIKVMNDLVDKIIADRKASGEQSDDLLTHMLNGKDPETGEPLDDENIRYQIITFLIEGHETTSGLLSFALYFLVKNPHVLQKAAEEAARVLVDPVPSYKQVKQLKYVGMVLNEALRLWPTAPAFSLYAKEDTVLGGEYPLEKGDELMVLIPQLHRDKTIWGDDVEEFRPERFENPSAIPQHAFKPFGNGQRACIGQQFALHEATLVLGMMLKHFDFEDHTNYELDIKETLTLKPEGFVVKAKSKKIPLGGIPSPSTEQSAKKVR

SEQ ID NO: 4233 - protein, 498 aa, Triticum aestivum
  misc_feature (41)..(41): Xaa can be any naturally occurring amino acid
MANNNSSYGENVSRKSHTPSAIVIGGGFAGIVSAMARCSRXAFIDGGLLESRDRIGGRVHTDYSFGFPVDPSAFGFPVDLGASWLHGVCEENPLAPIIGRLGLPLYRTSGDDSVLFDHDLESYALYDTNGYQVPQEFVAIMGKMEGFEAIRKEAGKLCEEMKEDISIAKAIAIVLERNPHFRQVVIAHDVLQWYLVLMEGCFSTDADAISLQCWSHQEVLLPGGHGLMVRGYRPVINTLAKGLDIRLGHRVVEIVRHWNRVEVTVSNGKTFVADAAVITVPLGVLKSNTIKFEPRLPEWKEEAIRELSVGVENKIVLHFSEVFWPNVEFLGVVSSTTYGCSYFLNLHKATGHAVLVYMPAGRLACDIEKMSDEAAAQFAFSQLKKILPNAAEPLNYLVSHWGSDENTLGSYTFDGVGKPRDLYEKLRIPVDNLFFAGEATSVQYTGTVHGAFSTGEMAAEECRMRVLEKFRELDMLEMCHPMAEQTATVSVPLLISRL

SEQ ID NO: 4234 - protein, 417 aa, Erwinia carotovora subsp. atroseptica SCRI1043
MESKVVVPTEGQKITVDAQGKLVVPNNPVIPFIEGDGIGIDVTPAMINVVDAAVKKAYQGKRAISWMEIYTGEKSTQVYGKDVWLPDETLDLIREYRVAIKGPLTTPVGGGIRSLNVALRQQLDLYVCLRPVRYYEGTPSPVKQPELTDMVIFRENAEDIYAGIEWKAGSVEADKVIKFLREEMGVSKIRFPEQCGIGVKPCSEEGTKRLVRAAIEYAITNDRDSLTLVHKGNIMKFTEGAFKDWGYQLAREEFGGELIDGGPWVKIKNPNTGKEIVVKDVIADAFLQQILLRPAEYDVIACMNLNGDYISDALAAQVGGIGIAPGANIGDECALFEATHGTAPKYAGQDKVNPGSVILSAEMMLRHLQWFEAADLIVKGVEGAIKNKTVTYDFERLMEGAKLRKCSEFAQDIIDNM

SEQ ID NO: 4235 - protein, 270 aa, Helicobacter hepaticus ATCC 51449
MQTLTLNNGVKMPILGLGTYSLTGKAGQKAMSEAIEVGYRLFDSAQMYNNEAELGAAINAAVKGGIKREEFFIQTKLLESSSEDLAKKSIEKSLKTLGLDYIDSLLIHMPYSQSKAMYRAMESFYKQGILRVIGISNFGAKAYSEFVKSCEVIPAINQCETHLLLQQKPLREAMKSKKTLLQSWSPFIAGKGSILENPTLKSIAQKYNKTPAQVVLRFLIEQGISVIPKTSKRARMQENLNVFDFSLSAQDTQILKELDTNKSAFSWTNY

SEQ ID NO: 4236 - protein, 309 aa, Candida albicans SC5314
MTSHTHPVKLSRTFKTKSGDELSIGTGTGTKWKKDSKLDEINQELVDQILLAIKLGYRHIDTAEVYNTQAEVGEAIKQSGIPREQLWITTKYNPGWNDIKASSASPQESIDKALKQLGTDYIDLYLIHQPFFTEENTHGYSLIDTWKVLIEAKKQGKIREIGVSNFAIKHLEALKEVSEPEFYPVVNQIESHPFLQDQSKNITKYSQENNILVEAFSPLTPASRLDANPLTEYLEELSKKYNKSLGQLLLRYTLQRGILPITTSAKESRIKESLDVFDFELTKEEFDKITEIGSANPHRVFFHEAFKDL

SEQ ID NO: 4237 - protein, 572 aa, Zea mays; identical to SEQ ID NO: 297

SEQ ID NO: 4238 - protein, 364 aa, Gibberella zeae PH-1
MGFAKTLIFLSQQQPTMSFVRAFSFLTAVSLVTYTILSIATSFGPAEMPEFNKNETVRDIPAFGLGTWLAGKGVVVPAVEYALKGGYRHIDTALIWRNEDEVGKGIKASGVSRDEIWVTGKLWNTDHRPELVRKAIETSIANLGVEYLDLYLIHYPVAWVPETRDVDNNTSLIDTWKAMEELVRAGLTRNIGFSNFAPKDINKILKIASIQPYAHEFETHPYLQQQSFVDFHKKENIKVIAASPLANTNPTYGDKYPSILHDEFWVKLAEDKNATVAQTILAWGQQRGTIVISKSTHSNHIAENLCSQGIEFTKSELEEVAKQDKKLRLLNPIHWGMDLFEGLDAGAAEKEEPKKEEDERNLDL

SEQ ID NO: 4239 - protein, 263 aa, Aeropyrum pernix K1
MQLASWRLLARTIKNVDVVVEVVDIRDPMVTRSRRAERMAEALDKRLLIVLNKSDLVPLRVAEKWARIIEGMGFDVIYVSARHRLSTRRLRGFIKHLADVKPFSAGVIGFPKTGKSSVINALRGRKGAPTSPIPGSPGYTKGLQLLKIEPGFYMVDTPGVIPVEGGWPESIIRGRSPEDLPDPVPPAAALIEKILRYNRRAFQAAYGITAQDPYEIMERLAVKRGWFYKTTKEPLIEEAARTIIRDYHKAKIPFYVPPEEFTR

SEQ ID NO: 4240 - protein, 241 aa, Oryza sativa (japonica cultivar-group)
MSEGFDGTENGGGGGGGGVGKEQDRFLPIANIGRIMRRAVPENGKIAKDSKESVQECVSEFISFITSEASDKCLKEKRKTINGDDLIWSMGTLGFEDYVEPLKLYLRLYREGDTKGSRASELPVKKDVVLNGDPGSSLVNYGAQRADANANHLDLFFLLRKNPESTTANCMREDEAKPVTVKIIETVYVEADTADDFKSVVQRLTGKDAVAGDAPELNSAQRFGSGREASRHGDHKVRIYE

SEQ ID NO: 4241 - protein, 166 aa, Triticum aestivum
ARGTSLGADATVKVSTRAEDLESEVERIQAAMGSEIDVSLDCAGFSKTMSTALEATRPGGKVCLVGMGHNEMTLPMTSAAAREVDVVGVFRYKDTWPLCIDFLRTGKVDVKPLITHRFGFSQRDVEEAFEVSARGRDAIKVMFNLLGGWLELDHRRRLDLSVQPAG

SEQ ID NO: 4242 - protein, 239 aa, Triticum aestivum
  misc_feature (203)..(203): Xaa can be any naturally occurring amino acid
MLLGDKAVLKQQGGGEEEEMGGDGMSASELVSKEMEGVRAIVLKPSESLDESRFMKIAGADFNDAGLGLDGLLGSLASTGFQASNLADAIDVVNQMLDWSLSHEKPSEDCDEAELDPKYRESVRCKIFLGFTSNLVSSGIRDVIRFLAQHHMVDVIVTTAGGIEEDLIKCLAPTYRGEFSLPGALLRSKGLNRIGNLLVPNDXYCKFENWIMPLFDQMLQEQSAENVWTPSKVIARLGK

SEQ ID NO: 4243 - protein, 461 aa, Mycobacterium tuberculosis H37Rv
MATATTQRPLKGPAKRMSTWTMTREAITIGFDAGDGFLGRLRGSDITRFRCAGRRFVSISHPDYVDHVLHEARLKYVKSDEYGPIRATAGLNLLTDEGDSWARHRGALNSTFARRHLRGLVGLMIDPIADVTAARVPGAQFDMHQSMVETTLRVVANALFSQDFGPLVQSMHDLATRGLRRAEKLERLGLWGLMPRTVYDTLIWCIYSGVHLPPPLREMQEITLTLDRAINSVIDRRLAEPTNSADLLNVLLSADGGIWPRQRVRDEALTFMLAGHETTANAMSWFWYLMALNPQARDHMLTELDDVLGMRRPTADDLGKLAWTTACLQESQRYFSSVWIIAREAVDDDIIDGHRIRRGTTVVIPIHHIHHDPRWWPDPDRFDPGRFLRCPTDRPRCAYLPFGGGRRICIGQSFALMEMVLMAAIMSQHFTFDLAPGYHVELEATLTLRPKHGVHVIGRRR

SEQ ID NO: 4244 - protein, 272 aa, Gibberella zeae PH-1
MGHEDAVYLAKLAEQAERYEEMVENMKIVAGEDRDLTVEERNLLSVAYKNVIGARRASWRIVTSIEQKEESKGNSSQVTLIKEYRQKIEAELAKICEDILEVLDQHLIPSAKSGESKVFYHKMKGDYHRYLAEFAIGDRRKDSADKSLEAYKAATEVAQTELPPTHPIRLGLALNFSVFYYEILNAPDQACHLAKQAFDDAIAELDTLSEESYKDSTLIMQLLRDNLTLWTSSEAETSAAGQAEAPKEDAPAAATAEDAPAAPAAAEEPKAE

SEQ ID NO: 4245 - protein, 492 aa, Arabidopsis thaliana
MSDFSSSVKLKYVKLGYQYLINNFLTLLLIPVIATVAIELLRMGPEEILSVLNSLHFELLHILCSSFLIIFVSTVYFMSKPRTVYLVDYSCYKPPVTCRVPFSSFMEHSRLILKDNPKSVEFQMRILERSGLGEETCLPPAIHYIPPTPTMESARNEAQMVIFTAMEDLFKNTGLKPKDIDILIVNCSLFSPTPSLSAMIINKYKLRSNIKSYNLSGMGCSASLISVDVARDLLQVHPNSNAIIISTEIITPNYYKGNERAMLLPNCLFRMGGAAILLSNRRSDRWRAKYKLCHLVRTHRGADDKSYNCVMEQEDKNGNVGINLSKDLMTIAGEALKANITTIGPLVLPASEQLLFLSSLIGRKIFNPKWKPYIPDFKQAFEHFCIHAGGRAVIDELQKNLQLSGEHVEASRMTLHRFGNTSSSSLWYELSYIEAQGRMKRNDRVWQIAFGSGFKCNSAVWKCNRTIKTPTDGAWSDCIERYPVFIPEVVKL

SEQ ID NO: 4246 - protein, 522 aa, Triticum aestivum
LENNRSCEPSVSPRKEFQPNILDLPSDRTTYCHGRKSTEIVFPTRMPSSPPSSRGKHCPTSPVHSRAFGQCPGSPTAWQDDARNSSSPHPLPLPPGSPCTSSRSLHSQWKKGKLLGSGTFGQVYLGFNSEGGQMCAIKEVKVIADDSNSKECLRQLNQEMLLLNQLSHPNIVQYYGSELSSETLSVYLEFVSGGSIHKLLQEYGPFGETVLRNYTAQILSGLAYLHGRNTVHRDIKGANILVDPNGDIKLADFGMAKHISAYTSIKSFKGSPYWMAPEVIMNTNGYSLSVDIWSLGCTILEMATARPPWSQYEGVAAIFKIGNSKDIPDIPDHLSSEAKSFLKLCLQRDPAARPTAAQLIEHPWVKDQASVRSSRSGSGITRDMFSTSTDGSKATVKTSIELSSYRSLSPLRDTNLRLRNLVVPASSIPSISTRKASAISSSNVRMNMSLPVSPCTSPLRQYRQSNRSCLPSPPHPAYSAGAANYSPINNMLYPTRPSNYLTDPWLETPRQKTQTFDSPRRL

SEQ ID NO: 4247 - protein, 329 aa, Oryza sativa (japonica cultivar-group)
MPSEFVAARKKPPPELLFAAGRKKQQPPPPGMAFVPSEFAAAGVGRKRQPAPPVEIRRVWAHNVEEEFRIIRNAIDHFPYVSMDTEFPGVIHRPTKHPALLTAGDRYDLLRRNVDALHLIQVGITLAASPTAAPALAFEINLSDFDQRVHRHAAESVQLLAEHGVDLAAHRRHGVRASALAPLLMSSGLVCSHGAVKWVTFHSAYDFAYLVKLLMGRKLPRSMAEFLNLVRVFFGDEVYDVKHMMRHCGGELYGGLERVAAALQVKRAAGRCHQAASDSLLTWDVFRRMRELYFLKHGVEAYQGVLFGLELDMDMPSNKTPSLPLVAAR

SEQ ID NO: 4248 - protein, 167 aa, Triticum aestivum
HEVSPDGKLLAVLGDSSDCLIADSGSGKEIASLRGHADYSFASAWHPDGRVLATGNQDRTCRLWDVRNPSEAFAVLEGRIGAVRGLRFSPDGRFLAAAEPADFVRVYDVAAGYARAQEIDLFGEIAGVSFSPDDGAEALFVGVADRTYGSLLEFRRRHRHAYLDCYL

SEQ ID NO: 4249 - protein, 139 aa, Pisum sativum
NTDITSITSNGGRVKCMQVWPPIGKKKFETLSYLPPLTRDQLLKEVEYLLRKPWVPCLEFELEKGFVYREHNKSPGYYDGRYWTMWKLPMFGTTDASQVLKELDEVVAAYPQAFVRIIGFDNVRQVQCISFIAHTPESY

SEQ ID NO: 4250 - protein, 226 aa, Glycine max
VTARQDLHHRNRPSDHYRLLKSNVDALNLIQVGLTLTDAAGNLPDLAGNRSIWEFNFRDFDVARDAYAPDSIDLLRRQGIDFARNTADGVDSTCFAELMMSSGLVCNDAVSWVTFHSAYDFGYLVKILTRRNLPTRLEEFLKTVKVFFGDNVYDVKHMMRFCDTLYGGLDRVARTLNVDRAVGKCHQAGSDSLLTWHAFQKIVDIYFVKEEHRKHAGVLFGLEVFC

SEQ ID NO: 4251 - protein, 134 aa, Brassica napus
  misc_feature (122)..(122): Xaa can be any naturally occurring amino acid
  misc_feature (130)..(130): Xaa can be any naturally occurring amino acid
MVLSHAASDSDVSVHSTFASRYVRTSLPRFKMPENSIPKEAAYQIINDELMLDGNPRLNLASFVTTWMEPECDKLIMSSINKNYVDMDEYPVTTELQNRCVNMIAHLFNAPLGETETAVGVXGTVGSSEXIMLA

SEQ ID NO: 4252 - protein, 357 aa, Helicobacter hepaticus ATCC 51449
MQEHKELLERREFLKTSAKFGAAVSLASLSGFALSACDSKEDLKTDSTQNLQSTEKAGKSQIQNHLQGDTMEFITLNNGVKMPILGYGVYQIDPKETQRCVEDAISVGYRSIDTAQAYFNEAEVGAAIKTALQGGLKREELFITTKLWIDNYPEEKALKACEESLRKLGLEYVDLMLLHQPYNDTYGAWRALSRFYKEGRFKAIGVSNFYPDRIMDFYLNNEIKPMINQIELHPFYQKQAEQKVNTELDIVTQSWASFAEGKNGLFTNEILRNIGEKYNKSAAQVVLRWLIQRQIVVIPKTTRKERMIENFNVFDFSLSGEDMQKIATIDTGKTLFLDHHDPQSAKFLFDYTKIHKA

SEQ ID NO: 4253 - protein, 165 aa, Actinobacillus pleuropneumoniae serovar 1 str. 4074
MKVTSSAIKNGAFEDKYGKRGSQFSPNGMPSYSIPFEISEVPEGTKSFAVVLEDKDAITASGFVWIHWLIADLERTKIAENESLTATDFVQGANSWASKLGNFSIEEASNYGGMAPPNCKHRYELIVYALDTKLNLISGFRFNDLHFAMQDHILATATVMGTYDV

SEQ ID NO: 4254 - protein, 388 aa, Streptomyces avermitilis MA-4680
MPINRAASTSVDVPRGLAGVVVTDTSLGDVRGLEGFYHYRQYSAVELAQTRGFEDVWHLMVHGELPDAEQRAVFTARTAALRWLPDGVRATLPAVAAAAGRSGPLAGLRTALSLLGAAKGFRPVYDIDREQRRADTVMASAAVPTLLTALYRLGQGLDPVEPREDLSYAANYLYMLTGSEPDAARTRAIEQYLISTIDHGFNASTFTARVITSTGADVAAALVGAVGALSGPLHGGAPSRALDTLDAIGTPERIDSWIRERVLAGDRIMGFGHPVYRTEDPRSRMLRGVAEQFGGPLVDFAVEVERHVEAILAELKPGRELHTNVEFYAGVVMELCGLPREMFTPTFAAARVVGWSANILEQAEDPKIIRPAARYVGPVPPVAVPLMV

SEQ ID NO: 4255 - protein, 144 aa, Zea mays
  misc_feature (49)..(49): Xaa can be any naturally occurring amino acid
MQWACACSQPNGPATPVDMVVDYYKFDYEFAEPPRVTSLQNTVPLATFXDFGDDVYFVADQRGYEAVVYYLAGQYLKTDDRSGKIVDPRLQLNKVVREIKYSPGGVTVKTEDNSVYSADYVMVSASLGVLQSDLIQFKPKLPVS

SEQ ID NO: 4256 - protein, 418 aa, Streptomyces avermitilis MA-4680
MTDHEAAPTHPDRRLSTKEAAELLGVKPETVYAYVSRGQLSSRREPGGRGSTFDAKEVAALARRNRREPSGSSAIGGELSVRTRITLIDKDRYFFRGVDATELAARHSYEEIAEWLWTGRLRPGVTFAAPDASVAVARRAVDALPEHSGPTDRLRVATIAAATADPLRFDLSEDAVLGTARTLIPTLVAALPPLRRDHRDEGPLARHLWGRLTGRAPDAASVRVLDTALGLLIDHDLAASTLAVRVAASARAHPYAAVSAGLGVLEGPLHGAASGLAHRLLLDVLDQGSAAPVVADELRAGRRIPGLGHRLYPGEDPRARALFALLEEVPDAAPALAAAHDVVATTARHAPLHANVDLALAVLTVSSGMPASAGETVFAVARTAGWIAHALEEYEERPLRMRPSGRYVGARPPQPLPR

SEQ ID NO: 4257 - protein, 190 aa, Arabidopsis thaliana
MGDSDRDSGGGQNGNNQNGQSSLSPREQDRFLPIANVSRIMKKALPANAKISKDAKETMQECVSEFISFVTGEASDKCQKEKRKTINGDDLLWAMTTLGFEDYVEPLKVYLQRFREIEGERTGLGRPQTGGEVGEHQRDAVGDGGGFYGGGGGMQYHQHHQFLHQQNHMYGATGGGSDSGGGAASGRTRT

SEQ ID NO: 4258 - protein, 472 aa, Blumeria graminis f. sp. hordei
MPTFGFLKKRKKVSLGHRDLDSPASTLSQPASPITPSTSRGLGEPIDTTSSKITSPGQKLGSNITKDHRGTRTTVEDLPSMTDVSHLQQAYRNLSQGSTASKSNLLTIHNLINPPQHDGAGQSKVMPEKHMNNKTERPVQGKAAVAQVRQTKGKYSLSDFEILRTLGTGSFGRVHLVQSKHNQRFYAVKVLKKQQVVKMKQVEHTNDERSMLQEVKHPFLITLWGTFQDSKNLYMVMDFVEGGELFSLLRKSQRFPNPVAKFYAAEVTLALEYLHKKDIIYRDLKPENLLLDRHGHLKITDFGFAKKVTDITWTLCGTPDYLAPEVVSSKGYNKSVDWRWSLGILIFEMLCGYTPFWDNGSPMKIYENILKGRVKYPPYIHPDAQDLIQRLITADLTKRLGNLHGGAEGIKSHQWFAEVTWERLAKKDIDAPYVPPVKAGSGDASQFDKYPEETERYGQTGPDEHGSLFENF

SEQ ID NO: 4259 - protein, 205 aa, Arabidopsis thaliana
MAEGSMRPPEFNQPNKTSNGGEEECTVREQDRFMPIANVIRIMRRILPAHAKISDDSKETIQECVSEYISFITGEANERCQREQRKTITAEDVLWAMSKLGFDDYIEPLTLYLHRYRELEGERGVSCSAGSVSMTNGLVVKRPNGTMTEYGAYGPVPGIHMAQYHYRHQNGFVFSGNEPNSKMSGSSSGASGARVEVFPTQQHKY

SEQ ID NO: 4260 - protein, 355 aa, Secale cereale
MPSSQAQADLWRHTLYYLTSMGLRCAVKLGIPTAIHNLGGVSSLPDLAAALSIPASKQPFLGRLMRALVTSGVFANGKERLLGGLFRLNPLSRILVEGVVAEEHHSQTSFVLAGTSRHYMEAALGMADWFKKDATGPVPTVFEDVHSASLFDESTAALDPELDALVTEGLAAHDNLGIGTIIREFHDLFKGLVSLTDFCCGDGTTSRAITKAHPHVKFTVLDLPKVIDKTPSDGIVNYFAGDLFHTVPKAQAVMLKLVLHHLSYEDCFKILTQCKDAIPSREEGGKVIVIDIVVAPSLGQVMFKEQTLMDILMLVFTRGRQRSENNWHELFTKAGFSDYKIVKKLGARGVIEVYK

SEQ ID NO: 4261 - protein, 321 aa, Mycobacterium smegmatis
MNDRAGAGHGLRPLMALLSNRVVADALARTFAATVNPAPKPGVRFSDITCRTSDAAIPTRHGTVFARIYHPPAAGATSAVYVNVHGGGFVVGHPEQDDPWCRYLATHAEVVVVNPDYVLAPRHRFPAAPQQIYDVVCWAAAPDRDWDGSRICVGGQSAGGNLSAAAARLALRHGTPRISLQVLHYAPLDLVTPTRDKPSTIGRRAVMKPWMGEVFDTAYIPDPAQRRDPLASPAWDQATDDLSGIAPAVVVTAEFDRLRNEARTYAERLRSFGALREYIEVPDVDHGYNIMTNATDVTRGVYDRVAHHVRRATDDGGQGRS

SEQ ID NO: 4262 - protein, 174 aa, Hordeum vulgare subsp. vulgare
MAPTVMASSATSVAPFQGLKSTAGLPVSRRSNASSASVSNGGRIRCMQVWPIEGIKKFETLSYLPPLSTEALLKQVDYLIRSKWVPCLEFSKVGFIFREHNASPGYYDGRYWTMWKLPMFGCTDATQVLNEVEEVKKEYPDAYVRIIGFDNMRQVQCVSFIAFKPPGCQESGKA

SEQ ID NO: 4263 - protein, 400 aa, Ralstonia eutropha JMP134
MDNWKTGTDAMFILLGAIMVLAMHAGFAFLELGTVRKKNQVNALVKILVDFAVSTIAYFFIGYTVAYGVQFMSGADTLAQKSGYELVKFFFLATFAAAIPAIISGGIAERSRFNPQLCATFVLVGFVYPFFEGIAWNQRFGIQDWITHLTGAPFHDFAGSVVVHAVGGWIALPAVLLLGARRGRYQKDGRISAHPPSNIPFLALGAWVLAVGWFGFNVMSAQTVDKISGLVAINSLMAMAGGTLAAWWAGRNDPGFAYNGPLAGLVAVCAGSDLMHPVGALVTGAVAGVLFVHLFTLAQNKWHIDDVLGVWPLHGLCGAWGGIAAGIFGSHALGGIGGVSLGAQLIGTLLGIVIAVAGGTIVYGTLKKLVGIRLDAEAEFNGADLTLHRISATPERETNW

SEQ ID NO: 4264 - protein, 1164 aa, Streptococcus agalactiae
MFKSNYERKMRYSIRKFSVGVASVAVASLFMGSVAHASELVKDDSVKTTEVAAKPYPSMAQTDQGNNSSSSELETTKMEIPTTDIKKAVEPVEKTAGETSATDTGKREKQLQQWKNNLKNDVDNTILSHEQKNEFKTKIDETNDSDALLELENQFNETNRLLHIKQHEEVEKDKKAKQQKTLKQSDTKVDLSNIDKELNHQKSQVEKMAEQKGITNEDKDSMLKKIEDIRKQAQQADKKEDAEVKVREELGKLFSSTKAGLDQEIQEHVKKETSSEENTQKVDEHYANSLQNLAQKSLEELDKATTNEQATQVKNQFLENAQKLKEIQPLIKETNVKLYKAMSESLEQVEKELKHNSEANLEDLVAKSKEIVREYEGKLNQSKNLPELKQLEEEAHSKLKQVVEDFRKKFKTSEQVTPKKRVKRDLAANENNQQKIELTVSPENITVYEGEDVKFTVTAKSDSKTTLDFSDLLTKYNPSVSDRISTNYKTNTDNHKIAEITIKNLKLNESQTVTLKAKDDSGNVVEKTFTITVQKKEEKQVPKTPEQKDSKTEEKVPQEPKSNDKNQLQELIKSAQQELEKLEKAIKELMEQPEIPSNPEYGIQKSIWESQKEPIQEAITSFKKIIGDSSSKYYTEHYFNKYKSDFMNYQLHAQMEMLTRKVVQYMNKYPDNAEIKKIFESDMKRTKEDNYGSLENDALKGYFEKYFLTPFNKIKQIVDDLDKKVEQDQPAPIPENSEMDQAKEKAKIAVSKYMSKVLDGVHQHLQKKNNSKIVDLFKELEAIKQQTIFDIDNAKTEVEIDNLVHDAFSKMNATVAKFQKGLETNTPETPDTPKIPELPQAPDTPQAPDTPHVPESPKAPEAPRVPESPKTPEAPHVPESPKAPEAPRVPESPKTPEAPHVPESPKTPEAPKIPEPPKTPDVPKLPDVPKLPDVPKLPDAPKLPDGLNKVGQAVFTSTDGNTKVTVVFDKPTDADKLHLKEVTTKELADKIAHKTGGGTVRVFDLSLSKGGKETHVNGERTVRLALGQTGSDVHVYHVKENGDLERIPSKVENGQVVFKTNHFSLFAIKTLSKDQNVTPPKQTKPSTQGSQVEIAESQTGKFQSKAANHKALATGNETVAKGNPTSTTEKKLPYTGVASNLVLEIMGLLGLIGTSFIAMKRRKS

SEQ ID NO: 4265 - protein, 95 aa, Triticum aestivum
MAALLRSRCSSVGRAMMGSLGNNLYGGATSSIETVARPSRSDAVRQQIRTFIQMRTNLKVVDNSGAKRVMCIQSLRGKKGARLGDMIIGSVKEAQ

SEQ ID NO: 4266 - protein, 81 aa, Triticum aestivum
FSTTLELLKDVKHSGAKVTIETCPHYLAFSAEEVPDGDTRFKCSPPIRDAANKDNLWEALLDGHIDMLSSDHSPSTPDLKL

SEQ ID NO: 4267 - protein, 64 aa, Glycine max
  misc_feature (31)..(31): Xaa can be any naturally occurring amino acid
MVLDETIICDDKSEWIRNGDYSPSRFQTQAXAVNLNCGAKTQSNPEDTVRVLTKAENGVRVMVI

SEQ ID NO: 4268 - protein, 251 aa, Zea mays
  misc_feature (128)..(128): Xaa can be any naturally occurring amino acid
  misc_feature (137)..(137): Xaa can be any naturally occurring amino acid
  misc_feature (224)..(224): Xaa can be any naturally occurring amino acid
MAKNYPTVSAEYSEAVEKARRKLRALIAEKSCAPLMLRLAWHSAGTFDVSSRTGGPFGTMKCPAELAHGANAGLDIAVRLLEPIKEEFPTLSYADFYQLAGVVAVEVTGGPEIPFHPGREDKPQPPPXEGRLPDATXGSDHLRQVFGKQMGLSDQDIVALSGGHTLGRCHKSGLGFEGAWTTNPLVFDNSYFKELLSGDKEGLLQLPSDKALLSDPVFRLFVEXYAADEKAFFDDYKEAQPQLSELGYADA

SEQ ID NO: 4269 - protein, 504 aa, Vibrio cholerae O1 biovar eltor str. N16961
MEKINLVWLKRDLRLTDHAPLQAALTSGRPTLLLYLFEPMLLGDAHYSERHWRFVWQSLQAINRDLAQSKGEVLIVTSDWQTCFARIAERYAIEAIYSHQEVGLACTFQRDLALAQWCQQHDIVWHEFPYAAVIRGAQTRKNWDEHWQQVMRSPCCDPDLTRANWLKLDAATLGLRSDIPATWQSKQAGMQTGGSDMAWATLEDFFARRGREYYRSISSPSLARHACSRMSPYLAWGNISLREMYQTLLKHWSVAGFRRSLIALSSRLHWHCHFIQKFESECEMEFRCVNRAYDSLLQQSSDAPAAQLAAWQTGHTGIPLVDACMRCLIQTGYLNFRMRAMLVSVLTHHMNVDWRAGVTYLAQLFLDFEPGIHYPQFQMQAGVTGTNTIRIYNPTKQAQEHDSEGQFIHKWVPELAQVPVPLLFEPWLMTPLEAQMYQVPLESPYLKPVMDLEASAKQARDRLWQWQKLPAVQAEAMRILARHVRQAKPRTSPRQPNKRQPEMD

SEQ ID NO: 4270 - protein, 316 aa, Zea mays
MIGLSRLGRCSSLELISSSEAGSSKQIPLLLSIVVVGVAGQFAWRRGGNIWCAFANRGAAGGWRRPGEDCSAAAKGFKMLACIACSAKDGGDQDGSRAATPHGRDAGKSLTSQLKDMVLKFSGSGRQYKAAAASPSFRGNRFPGFTSDGATEGYGYMRTTTHATGATAGTKVGRGFPQHVRSPSASWIPSIGEEDDEEDEEVVVVEEDRVPREWTAQVEPGVQITFVSLPGGAGNDLKRIRFSREMYDKWQAQKWWGDNNERIMELYNVRRFSRQVLPTPPRSDDAEVSRCLYPCLPSAFCVHVWESFIHSVGSPG

SEQ ID NO: 4271 - protein, 207 aa, Hypocrea jecorina
MPLCGGSKTVQRKLVLLGDGASGKTSLLNVFTRGYFPTVYEPTVFENYVHDIFVDNVHIELSLWDTAGQEEFDRLRSLSYDDTDLIVLCYSVDSKDSLENVESKWVGEIADNCPGVKLVLVALKCDLRQQEDDEPEDQAAADGNAQREKPPTISYDEGLEVAKRIGASRYLECSAMKNRGVNEAFTEAARVALSVKKEREDNKCTIM

SEQ ID NO: 4272 - protein, 264 aa, Hypocrea jecorina
MGHEDAVYLAKLAEQAERYEEMVENMKIVASEDRDLTVEERNLLSVAYKNVIGARRASWRIVTSIEQKEESKGNSSQVALIKEYRQKIEAELAKICDDILEVLDQHLIPSAKSGESKVFYHKMKGDYHRYLAEFAIGDRRKDSADKSLEAYKAATEVAQTELPPTHPIRLGLALNFSVFYYEILNAPDQACHLAKQAFDDAIAELDTLSEESYKDSTLIMQLLRDNLTLWTSSEAETSAGQVEAPPKEDTPAEAAAPAEEPKAE

SEQ ID NO: 4273 - protein, 500 aa, Panax ginseng
MFPLAYPLLFVLLGALSWWILPIISPLKRHHKLPPGPRGLPIIGSLHTLGALPHRTLQTLAKKYGPIMSMRLGSVPTIVVSSPQAAELFLKTHDNIFASRPKLQAAEYMSYGTKGMSFTAYGPHWRNIRKFVVLELLTPAKINSFVGMRREELGMVVKSIKEASAANEVVDLSAKVANIIENMTYRLLLGRTKDDRYDLKGIMNEALTLAGRFNIADFVPFLGPLDIQGLTRQFKDTGKRLDKILEFIIDEHEQNSSNGNASGDFIDDMLSLKNKPSNTHDELSKVIDRSVIKAIMIDIISAAIDTSDTSIEWILTELIKHPRAMKKCQEEIDAVVGVDRMVEETDLPNLEYVYMVVKEGLRLHPVAPLLGPHESMEDITINGYFIPKQSRVIVNSWALGRDPNVWSEDADEFLPERFEGSNIDVRGRDFQLLPFGSGRRGCPGMQLGLITVQLVVARLVHCFDWNLPNGITPDNLDMTEKFGLTTPRVKHLLAVPKYRL

SEQ ID NO: 4274 - protein, 156 aa, Ananas comosus
MSLVRRSNIFDPFSLDLWEPFEGFPFGGALSFPRPSASFPAETASFAGARIDWKETPEAHVFKADLPGVKKEEVKVEVEEGNVLQISGERTREKEEKNDTWHRVERSSGKFLRRFRLPDNAKVDQVKAAMENGVLTVTVPKEDVKKPQVKSVQISG

SEQ ID NO: 4275 - protein, 98 aa, Glycine max
MSTTESQRYKGTVKWFNEEKGFGFITPEDGGSDLFVHYSAIQTDGGFRTLSEGQSVEFLVTQDDSGRAAAVNVTTTTVKSSDSGNGENSGGDAANVEK

SEQ ID NO: 4276 - protein, 450 aa, Zea mays
MRGSMSNYYDDYDDIDEIEDDYDMDDPADDMVDEQRGVRDSDAEDNDYGQPNDKIPDTSSADARNGRDIQGIPWEQLNITRKKYRQSRLEQYKNYENVPNSGEEAMKDCKPTEKGGMYYEFRRNTRSIKSTILHFQLRNLVWATSKHDIYLVSHYSIRHWSALSGVDTELINVQGHVAPREKHAGSLSEGFYQTQVSTLAVKDNLLVAGGFQGELICKHLDREGISFCCRTTYDDNAITNAVEIFNTSSGAVHFIASNNDSGVRYYDMERFQLFKHLQFEWPVNHASLSPDRKTVVIVGDDPDGLLIDANSGKTLHSIKGHRDYSFASAWSPDGRTFATGNQDKTCRIWDARNLSKSVHVLRGNLGAIRSIRFTSDGQFMSMAEPADFVHVYDVKSDYNKRQELDFFGEISGTSFSPDTDALFVGVWDRMYGSLLQFGRLYNYSYLDSVF

SEQ ID NO: 4277 - protein, 503 aa, Triticum aestivum
MVATAKIPQRQLFIDGDWRAPALGRRLPVINPTTEASIGEIPAGTSEDVDAAVAAARAALKRNRGRDWSRAPGAVRAKYLRAIAAKMVERKSDLARLEALDCGKPLDEAAWDMDDVAGCFEFFAGHAEALDKRQNAAVALPENFKCHLKKEPIGVVALITPWNYPLLMAVWKVAPALAAGCTAVLKPSELASLTCLELGDVCKEIGLPSGVLNIVTGLGHEAGAPLSSHPDVDKVAFTGSYATGQKIMVAAAPTVKPVTLELGGKSPIVVFDDVDIDKAVEWTLFGCFWTNGQICSATSRLLIHKNIAKEFVDRMVAWSKNIKVSDPLEEGCRLGPVVSEGQYEKIKKFVANAKSEGATILTGGVRPKHLEKGFFIEPTIITDINTSMEIWREEVFGPVLCVKEFSTEEEAIELANDTHYGLAGAVISGDRERCQRLAEEIDAGCIWVNCSQPCFCQAPWGGNKRSGFGRELGKGGIDNYLSIKQVTEYTSDAPWGWYKAPAN

SEQ ID NO: 4278 - protein, 246 aa, Oryza sativa (indica cultivar-group)
MGRGKVQLKRIENTINRQVTFSKRRSGLLKKANEISVLCDAEVALIIFSTKGKLYKYATDSCMDKILERYERYSYAEKVLISAESDTQGNWCHEYRKLKAKVETIQKCQKHLMGEDLESLNLKELQQLEQQLENSLKHIRSRKSQLMLESINELQRKEKSLQEENKVLQKELVEKQKVQKQQVQWDQTQPQTSSSSSSFMMREALPTTNISNYPAAAGERIEDVAAGQPQHVRIGLPPWMLSHING

SEQ ID NO: 4279 - protein, 440 aa, Mycobacterium smegmatis
MDPVSQLEADARHLVRYSGRGGFTPTVIGSARGSLMFTEDGRELIDFTSGQMSAILGHSHPEIVATVQSQIAHLDHLYSGMLSRPVIELSRRLAETLPPTLDKVLLLSTGAESNEAAVRMAKLVTGKHEIVSFARSWHGMTQAAANATYSAGRRGYGPAAPGNFALPVPHRFRPDITDELGELDWRRQLDLGFDLIDAQSVGSLAACLIEPILSSGGIIELPPGYLAALAQKCREREMLLIVDEAQTGLCRTGDWYAFEHDGVVPDILTLSKTLGAGLPLAAVITSSEIEQRAQEREFLFFTTHVNDPLPAAVGLTVLDVLSRDRLDVRARELGQRLRAGLDELAGRHPIVADVRGRGLLLGMELSAEDTPGVSADQLGAVVTRRCFELGLHMNIVQLPGMGGTFRLAPPLTATDNEIDRALEIMDEALAYAREPAVHRS

SEQ ID NO: 4280 - protein, 203 aa, Ustilago maydis 521
MATNITFHPGHVSYDERAELLSQQGLTIWLTGLSASGKSTIATALEQHLLSLKKSAYRLDGDNIRFGLNKDLGFSPQDREENIRRISEVSLLFASSTTITITSFISPYKADREIARKLHEAHVPKLPFVEVFVDASIETCESRDPKGLYKKAKAGEIKEFTGISAPYEKPEQPEIHIDADKTSIEDAVRIITEYLINKGYLKL

SEQ ID NO: 4281 - protein, 175 aa, Zea mays
MTKAATLYGSKTQSDALRPGPLRPANIIRNKFPTYKNGSNGIVIKLADGPEMPPLKEIVAKETADLLDRRQRLSVRELAMKFEKGLNTATLLSNEVKWRQVALLERDILLKNLKCVLESLRGRVTGKTKDEIEESISMVEILAVQLSKREAELLQQKEEVTKLAKSLKQASEDAK

SEQ ID NO: 4282 - protein, 274 aa, Hordeum vulgare subsp. vulgare
SSEAAGPDGTLVRRYTTGPLCRWLTKDRGDGTLSPFAVFVVDPDHLFPWHHIAEAVTAGGPSAFERTQKWPYYEYMGKNQRLGTLFDNAMAQHSVILVTKMLERFKGFDGVQRLVDVGGGTGSTLGMITSKYKHMTGINYDLPHVIAQGLPLPGVEHVAGDMYESIPTGDAVLLQWITLMLNDDEFVKILSNCHNALPKDGKVIVVDGILPENPDSSLTARDAFTLDIIMFVLFKGAKQRTEKEFARLAKQAGFTGGIKKTYIFFNFYALEFTK

SEQ ID NO: 4283 - protein, 503 aa, Aspergillus nidulans FGSC A4
MGLELRSMVLVSLARIYQTGFKVRRPLLAVATTNFQNIINGEKTSTTERRHGINPATGEPNPDVPVAIKEDVDRAVVAAQEAFKTWIDVPFDERRKALLAYADAIEEYVADFAKLLVQEQGKPLQFAANEVAQSAQVIRSAADVAEGLTDEIIEDSAEKKIVVRHIPIGVGAGIIPWNFPHLLTVVKLAPALITGNVIIIKPSPFTPYCGLKLVELAQRFFPPGVVQALSGDDRLGPWLTAHPGIGKISFTGSSATGKKVMESASRTLKRVTLELGGKDAAIVCGDVDVQSVAPRVISKGFFNSGQICLAVKRIYVHESIYNEFRDAAVAYAKTIEVGPGTQEGVFMGPLQNSMQYEKVKGFFADLTKEQLSLTHPDGKAFDNKAGYFIKPTIIDRPAEDSHIATEEQFGPIMPLFSWSDESDVIARANNTQMGLGASVWSRDLEQAARIAAKLQAGSVWVNTHFEADLRAPFGGHKESGIGTENGLQGLRQWCNLQTLYLKN

SEQ ID NO: 4284 - protein, 429 aa, Mesorhizobium sp. BNC1
MANSTVTLELGGNSSEYPVRQASIGPGVFDISSLYKQTGMFTYDPGFTSTASCESKITYIDGDEGLLLHRGYPIDQLAEQGDFLEVCYLLLYGELPTKAQKEDFDLRVTRHTMIHEQMSRFFTGFRRDAHPMAVMCGVVGALSAFYHDSTDISDPHQRMVASIRMIAKMPTIAAMAYKYHIGQPFMYPRNELSYAANFLHMCFAVPCEEYKVNPVLARAMDRIFILHADHEQNASTSTVRLAGSSGANPFACIAAGIACLWGPAHGGANEAALNMLAEIGSVDRIPEYIARAKDKNDPFRLMGFGHRVYKNYDPRAKIMQKTCHEVLSELGIKDDPQLDIAMELERIALTDEYFIEKKLYPNIDFYSGITLKALGFPTTMFTVLFAVARTVGWIAQWKEMIEDPQQKIGRPRQLYTGAPQRDYVPIAKR

SEQ ID NO: 4285 - protein, 355 aa, Methanosarcina mazei Go1
MNKNICFIDGLEGILKYRDVDINELIDLPYDAVSYLLIKGELSEEKELAEYSARLHAERGINREVMDVIRMCNLNIDSMEALLTVVSFISQFDPDLYDNSLEGNMRKAIRLIAVVPTIVAAYYRTANGKEPVPPDPSLAHGANFLYMIKGSKPDPLEAEVMEKDFILSAEHELNASTFSSRVTASTMSDLYSAVVSGLCTLKGPLHGGARSEVMTMIETIGSPENAEKFVLEKIEKREKIMGFGHRVYKTYDPRGTIFKQLSRRLAEAKGDMHWYETAEAIENAVIRELVEKRGKPIYPNIDFYSGVIYKYMEIPPQLATSIFAIGRISGWIAHCFDQYEKKKIIRPRIFMLDEC

SEQ ID NO: 4286 - protein, 462 aa, Oceanobacillus iheyensis HTE831
MVKMQEWIEVTNPATGEVIDRVERGGKVEAREAVDKASEAFNDWSKRTAYERSELLMNWNALITKHQDELAEIMTMEQGKPIKEALGEVQYANNFVSWYAEEGKRLYGETIPASKADKRILVQRQPVGVIAAITPWNFPAAMITRKVAPALAVGCTAVVKPASATPRTAIRLAELAEEAGIPKGVLQVVTGSSGDISDAWMQDSRVRKISFTGSTEVGKILMKKSAETVKKVSLELGGHAPLIVMKDADIEKAAEGATASKFRNAGQTCVCTNRIYVHESIKDEFIKAFERKVRELRVGNGLEEGIDIGPLIDHDALEKVETHIRDAAHKGASIVYGGDKVGDDSLFYKPTILSNVTDNMLCMTEETFGPVAPVTTFSTEEEAVKRANHSPYGLAAYLFTENLATAIRISEQLEYGIVGINDGVPSTAQAPFGGFKESGIGREGGHHGMEEYVEVKYISIQL

SEQ ID NO: 4287 - protein, 294 aa, Glycine max
MLVLFLFLIFLQEHVLTGGHGLMVKGYDPVVKALANDLDIRLNHRVTKISNGYNMVMVTVEDGRNFVADAVIVTVPIGILKANLIEFTPKLPDWKASAINDIGMGNENKIALRFDRVFWPNVEVLGIVAPTSYACGYFLNLHKATGHPILVYMAAGRFAYDLEKLSDESAANFVMQQLKKMFPDASKPVQYLVSRWGTDPNSLGCYACDLVGMPDDVYERLRAPLGNLFFGGEAVSMDDHQGYVHGAYSSGLMAAENCQRHLLQKQGHMENLPLVPSVRHEMFETTIPLQISRI

SEQ ID NO: 4288 - protein, 444 aa, Desulfovibrio vulgaris subsp. vulgaris str. Hildenborough
MPGTRFEKDGLVIDTTIPHLGPAKIPSPLVYCHHTNDTGVPLYLDSEFIEELAGESTALNFEAAGPRRNLYFDPSKAKCAIVTCGGLCPGINDVIRAIVMEARHAYDVPAVLGIRYGLEGFIPKYRHDVVELTPDVVSDIHQFGGTILGSSRGPQSPEEIVDALERMNISALFMIGGDGTLKAASNIVQEVMRRNLKISVIGVPKTIDNDINFISQSFGFETAVYKATEAIQCAHTEAIGAMNGIGLVKLMGRESGFIAAHATLSLKEVNFVLIPEAPFTLHGEGGLLPTLERRLRARAHAVIVVAEGAGQNLLADTGKKDASGNPILGDIAQLLRAEIKAYCDERGLPHTLKYIDPSYIIRSVPANANDRVYCGFLGQHAVHAAMAGRTGMVVAKLMDRYVHLPLELVTLRRRKLNIRSDYWRAVLESTGQAELAGMVPGLDE

SEQ ID NO: 4289 - protein, 280 aa, Streptococcus agalactiae
MTDTMILNDNHKIPTLGLGTWMIDNDRVAQVVKDAIELGYRHINTAQAYNNEKGVGVGIKESGITRESLFVTTKIAAEHKDYESATKSIDQSLEALGLDCIDLMIIHSPQPWKEWRETDKHFDQGNLEAWRALEDAQKSGKVKSIGVSNFLEKDLKNGHVKPAVNQILAHIGNTPFDLIDYCQSKGIQVEAYSPIAHGQALKSDGIQKMAEKYGVSVAQLCIQYLLQLNLIVLPKASSKEHLQSNLDFDFVISDEDMSILKSLMFDDYGEFSNFPVFSEK

SEQ ID NO: 4290 - protein, 517 aa, Triticum aestivum
  misc_feature (447)..(447): Xaa can be any naturally occurring amino acid
  misc_feature (455)..(455): Xaa can be any naturally occurring amino acid
  misc_feature (465)..(465): Xaa can be any naturally occurring amino acid
  misc_feature (479)..(479): Xaa can be any naturally occurring amino acid
MAAANGAKGFEVPELDIKFTKLFINGQFVDAASGKTFETRDPRTGEVIARIAEGDKADIDLAVKAAREAFDNGPWPRMPGCARARIMHKFADLVDQHVEELAALDTVDAGKLFMMGKMMDIPGGANLLRYYAGAADKIHGETLKMARPLHGYTLKEPVGVVGHIVPWNYPTTMFFFKVSPALAAGCTMVVKPAEQTPLSALFYAHLAKEAGIPDGVLNVVPGFGPTAGAAIASHMDVDKISFTGSTEVGRLVMQAAATSNLKPVSLELGGKSPVIVFDDADVDMAVNLVNMATYMNKGEICVAGTRIYVQEGIYDAFVKKSVELAKKSVVGDPFNPNVHQGPQVDKDQYEKVLKYIDVGKSEGATLLTGGKPCSDKGYYIEPTIFTDVTDDMSIAQEEIFGPVMALMKFKTVDEVIQKANSTRYGLAAGVVTKNIDTMNTVSRSVSXGLWVNCYXAFDPTPFGGXKMTVGKDMGRCLEXYCTQDVVTPLYTHLAVIGRHRTTHSKQKWKDALHFTNA

SEQ ID NO: 4291 - protein, 195 aa, Glycine max
MGSHNALAATFGILGNIISVMVYLAPVPTFYRIYKKKCTDGFHSLPYLLSLMSSMLWLYYAFLKIHDGVVPLITINSIGCVIELIYILTYIKYAHKDARNLTYTLFAAMNIGFLALVLSSRFALNGSHRVKVIGWICDAVSLSVFASPLSIMAKVIRTKSVQFMPFYLSFFLTLNAITWFVYGLSMQDKCIYEGQ

SEQ ID NO: 4292 - protein, 256 aa, Zea mays
MRSLVLIMGLLLLSCSGMSSAARLLEEMAPKEEYPHPEVPELPKPELPPHPTVPELPKPDELPPHPVVPELPKPEVPVHPAVPELPKPEIPPHSTVPELPKPEMPELPKPEVPEHPAVPELPKPELPPHPTVPELPKPEVPELPKPEVPEHPAVPELPKHELPPHPTVPELPKPEVPELPKPEVPEHPAVPELPKPEFPPHPTVHELPKPEVPAHTAVPEPEPELPKHELPPLPEPELPLPPKAESHYPVPGMAKP

SEQ ID NO: 4293 - protein, 167 aa, Burkholderia fungorum LB400
MAEFRLWSDEFPTNGFMPKAHEYHDKAFGVDGENISPALKWEAPPPDTQSFALTVHDPDAPTGSGFWHWVVVNIPADIRSLPRNAGKPDGSLLPHGALQLRNDYGTVGFGGAAPPRGDKAHRYIFRLHALRVPHLPINADTTNAVARFMTHLNELDSTTHTGLYELK

SEQ ID NO: 4294 - protein, 505 aa, Hordeum brevisubulatum
MAAPPAIPRRGLFIGGGWREPTLGRHIPVINPATEATIGDIPAATAEDVELAVAAGGPVLARRREHWARASGAVRAKYLNAIAAKIKEKISYLALLETVDSGKPKDEAVADMDDVAACFEYYAGLAEALDGKQHAPISLPMEEFKTYVLKEPIGVVGLITPWNYPLLMATWKVAPALAAGCTAVLKPSELASLTCLELGAICEEIGLPSGVLNIITGLGPDAGAPIASHPHVDKIAFTGSTATGKMIMTAAAQMVKPVSLELGGKSPLVIFDDVADIDKAVEWAMFGCFFNGGRVCSATSRLLLHEKIAARFLDRLVEWVKNIKISDPLEEGCRLGSVISKGQYEKIKKFISTARSEGATILHGGDRPKHLGKGFFIEPTIITDVSTSMQIWREEVFGPVICVKVFKTESEAVELANDTHYGLAGGVISDNLERCERIAKVIHSGIVWINCSQPTLVQAPWGGNKRSGFGRELGEWGLENYLSVKQVTRYCKDELYGWYQRPSKL

SEQ ID NO: 4295 - protein, 237 aa, Lactobacillus johnsonii NCC 533
MNNFSQEPERRTIVDVTGLNRFLSRMYGMMTIAVLVSALSAYLTMTVFRTQVMTLFASNPAMTWILLLVPLALTFGISFRATRNPVASFVMLMIMAIVYGVEFSLIAGAYTGHSIASAFVASSTVFITMAVIGTTTKKNLNNLGSYASAALIGLIVAMLINMFLRNPMVSYIFSFIAVIIFTILTAWDAQRMKQIYENYSGQVSVDGLAVAGALALYLDFVNLFLQFLQIFGFSDRN

SEQ ID NO: 4296 - protein, 413 aa, Oryza sativa (japonica cultivar-group)
MEEQQQVEVEVEVPSYFVCPISLQIMRDPVTLPTGITYDRDGIERWLLTAGTCPLTKQPVPPDCDPTPNHTLRRLIQSWCALHADHGVDLVPTPKPPADRARVADLVSRLRAATSSAALLDALRELRDVAAESERNRKLLAAVPGAVDVLAAVVVASCRDAKAACDEALEIVCSLELSERCLARLVERNEELVDALVATLQRTNTTSRAHAALLLEAVTAVMPSNRLVSLPEEVFGEAVQLLRDRVSSPATRAALHVLVGTTSWGRNRVKAVDAGAVAVLVDMLLDGPVERRGCELALAALDRMCGCAEGRAALVSHGAGVAVVGRKVLRVSEVASEKAVRVLRSVARHAATAAVVQEMGQTGAVEKLCVVAQSEQCGERTRERARETLRLHARAWRNSPCLQPHLQALYPSC

SEQ ID NO: 4297 - protein, 126 aa, Glycine max
YPPPPAFRLQTEDLRYHHQLFRHIAQLGRIEAMASRLLAAASSSSASSSPLARLISSRRMAGAADHHGSTKVNMWQEPLNPGNWKEEHFVLASLAMWGAIIYGGLKAFGGKKEVKTEAGPAAAPAH

SEQ ID NO: 4298 - protein, 378 aa, Triticum aestivum
  misc_feature (316)..(316): Xaa can be any naturally occurring amino acid
  misc_feature (336)..(336): Xaa can be any naturally occurring amino acid
  misc_feature (345)..(345): Xaa can be any naturally occurring amino acid
  misc_feature (353)..(353): Xaa can be any naturally occurring amino acid
RSDTCELVARFCYGLTIELSPANIVHLRCAAEYLEMTEETAQDNLIHQAEMFFNQVVLRSWKDSLEALKTCDVLPHAEDLHIAKRCVESLAAKASIDPDLFGWPVSEHGAMHSPGGSVLWNGISTGAKLGNFSSDWWYDDASSLSFPTYKRLISTMESRGAKEEIVAGSLTYYAKKCLPGLNRRQSMGPVPLTSAAATLSEEEQRHLLEDIDRMLPLQRGLISTNVLLWLLRTAMILKVNRACISNLEKRVGMQLDEATLEDLLLPNFSYTMDTLYNVECVRRILDHFLAMGQTMGGGSPCLNDVMGSPSLARITXVAKLIDGYLAEIGPNITLSXPKFESLACXLAEIARPXNYGLYRAISFLGRAIWLRESRGGFW

SEQ ID NO: 4299 - protein, 281 aa, Triticum aestivum
GGASSSATAPAGGPITRRRKLAESEPPAQDTISNLPDAVLGEIISLLPTKDGARTQILASRWRHLWRSAPLNLDCRGLNHGDELVGALSRIISSHQGPCRRLCIHADLLDAPSTTVDSLLRSDALGNLQELEFSCFERPPPASIFRFSPTLRVVTIECSNLPDSTVQGIHFPLLQQLGLEFVCISECSLHSLIASCPVLESLLIHRSFGFACIQINSLSLKSVGLDSYAVWENNKVALQLQELIINNAPCLERLLLLHQETGLHISVIAAPKLETIGFLSD

SEQ ID NO: 4300 - protein, 122 aa, Mycoplasma penetrans HF-2
MIQFMTKLNVADNTGAKQVGVIKVLGGTKRRYASVGDIVVVSVKKAQPDGIVRKGQVCKAVIVRVKKNITRSSGNSLSFDDNACVIIKEDKTPRGSRIFGPVARELRDKGFSKIVSLAPEVL

SEQ ID NO: 4301 - protein, 382 aa, Helicobacter hepaticus ATCC 51449
MGETIKNTKVGGLAGITAGQSAICTVGTGHGLNYRGYDIYDLARECEFEEVAYLLLKEKLPNANELAAFKKELIAARDLPKALKDTLKLLPKNAHPMDIMRTTCSMLGCLEPETYDIVKMSFPMQNQIAIRLLGIFPSALTFWHHYHHNGKEISTQSNQDSIAGHFLELLHQKPPKELWIKAMHASLILYAEHEFNASTFTARVITATMSDVYSGVTGAIGALRGPLHGGANEAAMELIAEYKTPQEAEKGILDKLARKDKIMGFGHRVYVKADPRNVVIKEWSKKLSEDVGDTKGLYPISEAIEKVMWEQKKLFPNLDFYSASAYHFMGIPTPYFTPIFIFSRTAGWLAHIFEQRANNKLIRPSSEYIGPDKKAFVPLHNR

SEQ ID NO: 4302 - protein, 417 aa, Pyrococcus horikoshii OT3
MTQVDLVVVGKFLFKEKIIDGSIGIEDDKIAKFSLRELKGDKKIKVEKGKIILPGLIDVHVHLRDFNESYKETIASGTKAAIHGGITTVFDMPNTKPPIMDEKTLKLRELIFKKKSYSDYALGFLIAGNEPAKADFYKIFMGASTGGIYSKNFEEDYKKAPDIVSVHAEEYELINRYPERPPIVEVVAIKKALQASKKMKKPLHICHVSTKDGLKEILKANIPWVSFEVTPHHLFLTRRDYERSKLLKVYPPLRDEEDRRYLWENLKSIPIIASDHAPHTLEDKEAGAAGLPGLETEVALLLDAVNKGMITIWDIVAKMSINPARIFKIKNKGWEEGKDADLIVVDMKKEWTIKAENFYTKANWTPYEGWKVKGKVIMTILRGEVVMEDDEIIGKPRGERIVKEGNAQGNLGSSQEH

SEQ ID NO: 4303 - protein, 493 aa, Bordetella pertussis Tohama I
MSLSVGNAALLPGRNLIGSEWREAALGARFAVADPATGKVIAHVPDSGARDAGAAVTAAHQAFADWRRTPAKVRAQIIKRWNALLHENAEDLARLISSEQGKPLAEARGEVSYAASYVEWFAEEATRADGDLIPSPAQGRRMFALREPVGVVAAITPWNFPAAMIARKIAPALAAGCTVVCKPAEDTPLTSLALTALAQQAGVPPGVLNIVTASRGRAAEVADAWLDDPRVRKITFTGSTPVGKHLARRSADTLKRVSLELGGNAPFIVFDDADLDAAVEGLMVSKFRNGGQTCVCPNRIFVQAGVHDAFVRKLAARVEGLVVGPASDPASQIGPMINARAVEKIEHHVADALERGARLAVGGKRIHSARCAGDHYYAPTVLTGVDETMACFREETFGPVAPITVFASEAEVVAAANATAFGLAAYFYSTDVRRIWRLADALETGIVGVNEGALAAEAAPFGGVKDSGYGREGSRHGLAEYMQIKYVCQGQLD

SEQ ID NO: 4304 - protein, 349 aa, Lycopersicon esculentum
MGSEALEFFSCANNNNNNNGFSYEPKKNIIMEETDNLSINIHDGSWFEEEIDVDLKWSFALNSVLHKGTSEYQDIALLDTKHFGKILVIDGKMQSAEVDEFIYHECLIHPALLCHPNPKNVFIMGGGEGSAAREALRHKSMEKVVMCDIDKEVVDFCKKHLTANHEAFLNKKLNLVINDAKAELEQRQEKFDIIVGDLADPVEGGPCYQLYTKSFYQNILKPKLNDTGIFVTQAGPAGVFTHKEVFSSIYNTTKQVFKYVLAYTAHVPSFADTWGWVMASDKPFCLDAGKLDKKIAERIEGELLYLNGASFFSSTILNKTVAKTLKNESHVYAEDDARFIHGHGLGFRN

SEQ ID NO: 4305 - protein, 459 aa, Wolbachia endosymbiont of Drosophila melanogaster
MCFIKKTLDLFYNRYSNIMTQTWDLLQTGQKEGYKIAYTNARIIDPETKLDIKGSLLTEGDKIVDFGESLFSTSGVDETIDCKGLVLMPGLIDIHVHFREPGQEHKETIYTGSKSAAAGGVTTVVCQPNTVPAIDSVILAKYLKYRALETSHVNVEFYAKITTSEEHLTEMALLKEAGAVGFTDDGMPVMNPMIMRQALLYSSMLNVPIAQHAEDLNLSAGGAINEGKISEELGVKGILSASESVMVNRDILLMKDMENVHYHILHVSSKDSLDAIKRAKDLGLNVTCEVTPHHFTLTEDIVKQHGAIAKMNPPLRTEEDRLAMVEGLKTGVIDCIATDHAPHDRSSKDLPLENAAFGIVGLETMLPLSLELYHSGQMGLLDVLAKLTYKPADIIHIPRGRIQKNLAADLILVDLNHEWEIKTDNFASKSKNSPFDGRKVKGHVVRTVVSGKTIYSQKS

SEQ ID NO: 4306 - protein, 160 aa, Caulobacter crescentus CB15
MAMSIYDYSAKTLDGQDVSLADYRGQVLLIVNTASKCGFTPQYEGLEALYKAHKDRGFTVLAFPCNQFGAQEPGNAEEIANFCSLTYDVSFPVMSKIDVNGADAHPLYKFLKKEQKGVLGTEAIKWNFTKFLIGKDGQVVDRFAPTVKPEDLKVAVEALL

SEQ ID NO: 4307 - protein, 208 aa, Gossypium hirsutum
MSSENGKRLLETDAGGLNFEATELTLGLPGEPRVTSDGGAKLGSKRGFSETVDLKLGDNNQEVKLGHSLQEAAKSPVSKTQVVGWPPVRGFAKRGKKSCKYVKVAVDGAPYLRKVDLEIYNSYQQLLTSLEDMFSCFTIRNYLNEKKIDQVNGIEYMPTYEDKDGDWMLVGDVPWQMFVESCKRLRLMKSSEAVGLGLKTAPKYSSTN

SEQ ID NO: 4308 - protein, 291 aa, Glycine max
GLSVLAKYRRPLLVHSEIQQHSKKHLELNDKGGPRAYLTYLHTRPPSWEEAAIKELVGVTKDTRKGGPLEGAHVHVVHLSDSSASLDLIKEAKRRGDSISVETCPHYLAFSSEEIPNGDTRFKCSPPIRDAYNREKLWEAVLEGHIDLLSSDHSPTVPQLKLLEEGDFLKAWGGVTSLQFDLPVTWSYGKKHGLTLEQLSLLWSKKPATFAGLESKGAIAVGNHADIVVWKPEVEFDLNEDYPVFLKHPSLSAYMGRRLSGKVLETFVRGNLVFKKGKHAPSACGVPILAK

SEQ ID NO: 4309 - protein, 320 aa, Enterobacter cloacae
MIKKIGVLTSGGDAPGMNAAIRGVVRAALTEGLEVFGVYDGYLGLYEDRMVQLDRYSVSDMINRGGTFLGSARFPEFRDEHVREVAIENMKKRGLDALVVIGGDGSYMGAKRLTEMGFPCIGLPGTIDNDIKGTDYTIGFFTALGTVVEAIDRLRDTSSSHQRISIVEVMGRYCGDLTLAAAIAGGCEFIVVPEVEFSREDLVAEIKAGIAKGKKHAIVAITEHICDVDELAKYIEAETKRETRATVLGHIQRGGSPGPYDRILASRMGAYAIDLLLQGHGGRCVGIQNEKLVHHDIIDAIENMKRPFKGDWLDCAKKLY

SEQ ID NO: 4310 - protein, 163 aa, Triticum aestivum
  misc_feature (53)..(53): Xaa can be any naturally occurring amino acid
  misc_feature (72)..(73): Xaa can be any naturally occurring amino acid
  misc_feature (82)..(82): Xaa can be any naturally occurring amino acid
  misc_feature (86)..(87): Xaa can be any naturally occurring amino acid
  misc_feature (90)..(90): Xaa can be any naturally occurring amino acid
  misc_feature (99)..(100): Xaa can be any naturally occurring amino acid
  misc_feature (102)..(102): Xaa can be any naturally occurring amino acid
  misc_feature (105)..(105): Xaa can be any naturally occurring amino acid
  misc_feature (115)..(115): Xaa can be any naturally occurring amino acid
  misc_feature (119)..(119): Xaa can be any naturally occurring amino acid
  misc_feature (122)..(122): Xaa can be any naturally occurring amino acid
  misc_feature (125)..(125): Xaa can be any naturally occurring amino acid
  misc_feature (127)..(127): Xaa can be any naturally occurring amino acid
MAPAVMASSATTVAPFQGLKSTAGLPVSRRSSASLGSVSNGGRIRCMQVWPIXEGIKNSETLSYLPPLSTEXXWKQVDYLDXSKWXXCSXSSKLVPLPXXQXSPXYYDGPYWDKXNLPXFGXTDXQXAQRVEESRRPDPIRTVQLRQMDASRLKQRGARIREG

SEQ ID NO: 4311 - protein, 178 aa, Streptomyces coelicolor A3(2)
MTTGATVWLTGLPSAGKTTIARELADRLREEGRPVELLDGDEIREFLSAGLGFDRADRHTNVQRIGFVAELLARNGVTALVPVIAPYADSRDAVRERHGANGTAYVEVHVATPVEVCSVRDVKGLYAKQAAGELTGLTGVDDPYEEPVAPDLRIESQDQTVQESAAAVHALLTERGLA

SEQ ID NO: 4312 - protein, 121 aa, Triticum aestivum
  misc_feature (38)..(39): Xaa can be any naturally occurring amino acid
  misc_feature (42)..(42): Xaa can be any naturally occurring amino acid
GPMLIYPMLKSKWDPNTSVALPEGEVFYLVALLRFCPXXGGXAVEELVAQNGAIVDACRSSGYDFKTYFPHYRTEADWARHFGAKWARFVDRKARYDPLAILAPGQKIFARTPSSSRTDRS

SEQ ID NO: 4313 - protein, 447 aa, Glycine max
MEECHTVFGKYEMGRLLGKGTFAKVYYGKQISTGESVAIKVINKEQVRKEGMMEQIKREISVMRLVRHPNVVEIKEVMATKTKIFFVMEYVRGGELFAKISKGKLKEDLARKYFQQLISAVDYCHSRGVSHRDLKPENLLLDEDENLKISDFGLSALPEQLRYDGLLHTQCGTPAYVAPEVLRKKGYDGSKADIWSCGVVLYVLLAGFLPFQHENLMTMYYKVLRAEFEFPPWFSPESKRLISKILVADPAKRTTISAITRVPWFRKGFSSFSAPDLCQLEKQEAVTEEENNSKVPKFFNAFEFISSMSSGFDLSGLFETKRKTAAVFTSKCSAAAIVAKIAAAARGLSFRVAEVKDFKIRLQGAAEGRKGRLAVTAEVFEVAPEVAVVEFSKSAGDTLEYAKFCEEDVRPALKDIVWTWQGDATCAANFPACHGEECQKQVVVSTI

SEQ ID NO: 4314 - protein, 322 aa, Magnetococcus sp. MC-1
MNTIAVMTSGGDAPGMNSAIRAVVRTAIGAEMEVLGIRRGYSGLLEGDLIPMDAASVGNILQKGGTVLGTSRCAEFLKPEIRQEAANILRRKHVDGLVVIGGNGSFNGAYQLHQEHDIPVVGVPGTIDNDIQGTHYTIGFDTAVETGVYAVDKIRDTANAHDRIFLVEVMGRHSPAIAIHTGVCTGAEHVIHTPENTDYDTLVSGIRRGRKRGKNSFIIIVAEGQVPGSAYQVQKHLADNYQIASHVAILGHLQRGGSPTAHDRFIAASMGFHAVQALKTGEVATVTACRDGRIQLVPLQECLEKNDAIDAFSLNLTQQLAI

SEQ ID NO: 4315 - protein, 490 aa, Gibberella zeae PH-1
MASPKLSDPSLIKNACYVNGQWVAAKSGKDFSVENPASLEKLGSCPEFDANDTEAAIAAADAAYKTYRKTPARQRARYLRRWYDLMMENADDIARLITLENGKVWSDAKTEAVYAANFFEWFSEEAPRIYGETIEASNPSCRLSTIKQPVGVCGLIAPWNFPAAMITRKAGPALAAGCTVVIKAPAEAPLTALALAELAHRAGIPAGVVNIITALDNTAEVGKVLTTHPKIKKVSFTGSTGVGRLLMNQSSSTVKKLSFELGGNAPFIVFEDADLEKAVKGIITSKFRNSGQTCVCANRIFVHRSIYDKFVQMVLDVVKTFVIGDGFGEKTTHGPLIHGRAVAKTAEHVEDAISKGAKLIHGGERLADLGPNFFGLTMLTDMTPDMKIFSEETFGPVAAFFAFDTEEEVIELANDSEVGLGGYFFSENVNRCYRVAEALEVGMIGVNCGVLSDPAAPFGGIKQSGFGREGSKYGIDEFTVTKMVMTNIDP

SEQ ID NO: 4316 - protein, 399 aa, Zea mays
  misc_feature (113)..(113): Xaa can be any naturally occurring amino acid
THASFSSFFPVGFRSGNHFPTTRGRSTRPRAVELGSEASEFCHYKGFYSSNYLPMTPKSVNDIHKRGGTVLGTSRGGHDTKKIVDNIQDRGAIQVYTLGGDGTHQGAHGAINXSRGRGLQVAVAGIPKTIDNDIAVIDKSFGFDTAVEEAQRAINAAHVEASSAENGIGLVKLMGRYSGFIAMYATLASRDVDCCLIPESPFYLEGEGGLFEYIDRRLKENNHMVIVVAEGAGQDLIAQSIPAADQQDASGNKLLLDVGLWLTHKIKDYCKSKKMEMTIKYIDPTYMIRAIPSNASDNVYCTLLAHSAIHGAMAGYSFTVGMVNGRHAYIPFHRVTSTRNKVRITDRMWARLLSSTNQPSFLSQKDIDAAREADKAANRTKSREDAKKQSTPVLANGEK

SEQ ID NO: 4317 - protein, 189 aa, Solanum tuberosum
SDGKVDKFIGGESSLPLHEIGSNAGGDGGRYYLGMFLGGAYEEALGGLHNLFGGPSVVRVLQSDSPHSFAVTRSVPGPSCADVLRAMQFEPELMFETLKHRAEEFLEQGEGEGEDKGLAFASLTSSLAQSFHNMPYLVSSSSSCCFTAEATATASANANANNGGYYYYSEDNAADCATEEDEIWSYCTA

SEQ ID NO: 4318 - protein, 206 aa, Glycine max
PRPAESSEPPSHRQKPTTGDDDRISHLPDVLLLQILSLLPTKQAVITGILSKRGRPLWPAVSVLDFDDESSPEFHHPGGLTGFAEFVYSVLLLHDAPAIERFRLRCANPNYSARDIATWLCHVARRRAERVELSLSLSRYVALPRCLFHCDTVSVMKLNGVFLNALASFSVSLPLLKVLHVGDRVLFGCHDYVVKLIAGCPRLEDL

SEQ ID NO: 4319 - protein, 348 aa, Pseudomonas sp. TW3
MLAIRKTKAGPGGLSVDDVAAPKEAHSTDVLVKVEAAGICGTDLLIYKWGEFAKRMKLPTILGHEVSGVIEQVGSDVKGLRPGMRVSLESHLPCGTCYTCRRGWAHVCPKTRYPGVDFDGGFASFVVVPESVCWPVPCGIPPLQAAMMEPFGLAVHASLEGSGVSGLNVLVSGCGPIGLMNIAAAKALGASKVIATDIHPLRLTAAAKMGADECINAAEESVYKTVRSLLGERGVDVAIDYSGQAAALKELIQSITHGGELRLMGVPSHDILLNLEEWLFKGLIVRGLHGRRLYETWERSTSLLVTGRVDLSSLVSHRLPLSAAEDAFEMALNGQSLKILFEPNGSCI

SEQ ID NO: 4320 - protein, 443 aa, Azoarcus sp. EbN1
MHAPSLLERSLRSVWHPCTQMKQHEALPLVPIVRGEGPWLIDAEGRRLLDGISSWWVNLFGHCNPRINAALRAQLDTLEHVMLAGFTHEPVVELSERLAALTGHRLGHAFYASDGASATEIALKMSAHYWRNLGLAEKSRFVSLAGSYHGETVGALAVTDVAIFRDAYAPLVRAGTTVPTPDARLALPGESAADVARRAAAALEAHLAEHHAQTAALIVEPLVQGASGMVMYDPEYLRLARALCDRYRVHLIADEIAVGCGRTGTFFACEQAGIWPDFLCLSKGISGGYLPLSLVLATNTVYAAFYADSATRAFLHSHSYTGNPLACRAALATLDIFEQDGVLAANRVLARQLGDAVRARFGAHPAVRQLRQRGMILAFDVATERPDFARNFFRAGLDHGVLLRPIGNTVYFMPPYILDAAHVAHLVDGAAAALAEALEPAPG

SEQ ID NO: 4321 - protein, 307 aa, Solanum virginianum
MGSKHSKETTSTSHRVPFVDLQEATNNFDDNFLIGEGGFGKVYRGVWRDGTKVALKRYNPKSGQGIAQFRTEIKMLSQLRHPYLVSLIGYCDENNEMTLIYEYMENGNLRKHLYGSDLPTLSWEQRLEICIGAAKGLHYLHTTAVIHCDVKCTNILLAENFVAKVADFGLSKKGTVLDETHTTTMMKGTFGYLDPEYYRTLRLTEKSDVYSFGVVLLDVLCARPAVASSSSKGIINLAEWAMKWKKKGQLERIIDPNLVGKIIPDSLRKFGETAEKCLAESGVDRTSMNTVLWNLEYALHLQEPVIQ

SEQ ID NO: 4322 - protein, 345 aa, Triticum aestivum
MKTLLILTILAMAITISTANMQVDPSGQVQWPQQQLVPQPQQPLSQQPQQAFAQPQQTFPHQPQQQVPQPQQPQQPFPQTQQPQQPFPQQPQQPFPQTQQPQQPFPQQPQQPFPQQSQQPFPQTQQPQQPFPQQPQQPFPQTQQPQQPFPQFQQPHQPFPQPQQQFPQPQQPQQSFPQQQRPFIQPSLQQRLNPCKNILLQQCKPASLVSSLWSIIWPQSDCQVMQQQCCQELAQIPQQLQCAAIHSVVHSIIVQQQQQQQQQQQQQQGMHILLPLSQQQQLGQGTLVQGQGIIQPQQLAQLEAIRSLVLQTLPTMCNVYVPPECSIIRAPFASIRASSGHHLPA

SEQ ID NO: 4323 - protein, 412 aa, Streptococcus mutans UA159
MKNYALLNGAYDNKTMYDFKPVRADNTYLYDSQNRKYLDLRSGLWNTSLGYIDSLYQRVSKRFDQVLNKKLPYLDIHSFQHDIYDEVAQKVLELTGHAFKRVLYTNSGSENTELALKIADYTNKKGENNRILAFKDSYHGTFFGGVSVSGIDQEINSSFYPKYGEVTFIDYPKSAEQEKNVLDYIANVASFYDVMMIEPILASAGIYFASTDFFNALLKLLRKNQVLIVFDEVATGFFKTGKPFYFQQLSEKPDILCLSKAINNGITSFGCVCVNEEVDAKLQKNPKTMEHFSTQNGNLLGLESANIVLDYYLKSRDVIKGKVKDISDSISNVLDSQNVFYRNQGIMTAIRTESNQSLQLMKSLEKLGILTYLYVNEEEEGLSIMPPININLNVLEKALKLISKKIESQNSF

SEQ ID NO: 4324 - protein, 477 aa, Streptomyces avermitilis MA-4680
MATAPSVSYSMTVRLEVPASGTAVSQLTTAVESHGGSVTGLDVTASGHEKLRIDVTIAATSTSHADEIVAQLRTIEGVTLGKVSDRTFLMHLGGKIEMQSKHPIRNRDDLSMIYTPGVARVCMAIAENPEDARRLTIKRNSVAVVTDGSAVLGLGNIGPKAALPVMEGKAALFKRFAGIDAWPLCLDTQDTDAIVEIVKAIAPGFAGINLEDISAPRCFEIEARLREALDIPVFHDDQHGTAIVVLAALTNALRVAGKAIGDIRVVMSGAGAAGTAILKLLIAAGVKNAVVADIHGVVHADREDLVNAAADSPLRWIADNTNPEGLTGTLKEAVRGADVFVGVSAPNVLDGDDVAAMAEDAIVFALANPDPEVEPAVARQTAAVVATGRSDFPNQINNVLVFPGVFRGLLDAQSRTVNTEMMLAAAAALADVVTEDELNPNYIIPSVFNEKVAGAVAGAVRTAAKAAGVTESDSKDA

SEQ ID NO: 4325 - protein, 476 aa, Methylobacillus flagellatus KT
MDGEYFDNISPVTGKVFCQVPRSNEKDINLALDAAHAAKEAWARTSGTGRANILLKIADVMEANLETIAIAETIDNGKPIRETMAADIPLAIDHFRYFASCIRTQEGGISEIDHETVAYHFHEPLGVVGQIIPWNFPILMAAWKLAPALAAGNCIVMKPAEQTPASILVVMELIGDLLPPGVLNVVNGHGVEAGKALATSPRIAKIAFTGSTSVGRLIMQYASQNLIPVTLELGGKSPNIFFEDVMDKDDAYFDKALEGFTLFALNQGEICTCPSRALIQESIYEQFIERAIKRVKAIKQGSPLDKSTMIGAQASSEQVEIIMSYIKLGLEEGAQLLTGGNATKLPGDLSEGYYIEPTVFKGHNKMRIFQEEIFGPVLSVTTFKDEKEALEIANDTMYGLGAGLWTRDGSRAYRVGRGIQAGRVWTNCYHLYPAHAAFGGYKQSGIGRENHRMMLDHYQQTKNLLVSYSPNALGFF

SEQ ID NO: 4326 - protein, 172 aa, Arabidopsis thaliana
MAAAFASRLTRGGRSLLGGLNNVGSMNSSNGMMNESILSQQQRRTFIQMGTVLKVVDNSGAKKVMCIQALKGKKGARLGDTIVASVKEAMPNGKVKKGAVVYGVVVRAAMQRGRVDGSEVRFDDNAVVLVDSKDKNTKTDRQPIGTRVFGPVPHELRKKKHLKILALAQHVA

SEQ ID NO: 4327 - protein, 261 aa, Aspergillus nidulans FGSC A4
MGHEDAVYLAKLAEQAERYEEMVENMKVVAASDVELTVEERNLLSVAYKNVIGARRASWRIVTSIEQKEESKGNESQVALIKEYRQKIEGELAKICQDILDVLDQHLIKSAQSGESKVFYHKMKGDYHRYLAEFAVGDNRKAAADASLEAYKSATEVAQTDLAPTHPIRLGLALNFSVFYYEILNSPDQACHLAKLAFDDAIAELDTLSEESYKDSTLIMQLLRDNLTLWTSSEAEPAAENAPAEKKEEAPAAEGEEKPAE

SEQ ID NO: 4328 - protein, 117 aa, Glycine max
FCWLICIIVEFINLVSSESNEVCNKEERRTIAPEHVLKALGVLGFGEYIEEVYAAYEQHKLETMQDSLKGAKWSNRAEMTEEEALAEQQRMFAEARARMNGGAITSKQPDAHQSLES

SEQ ID NO: 4329 - protein, 154 aa, Nostoc punctiforme PCC 73102
MEIRSPAFFIGNTIPFKYTCDGDNISPPIYWEAAPQETKSFALIVDDIDAPNETFIHWVIYNIPADIRELPEGVAKQPKLPEGALQGKNNFGELGYGGPCPPKNGAHRYFFTIYALDQMLDLAAGANKQQLLAAIKNHILDKAELMGRYAREIE

SEQ ID NO: 4330 - protein, 499 aa, Ralstonia eutropha JMP134
MDTRTELLSAATRAFLQRPKRMLIDGQWCAATDGAVFTTEDPASETTLAEVPAAGPADVDAAVQAARAAFEQGPWNAMRPSDRERLLLRLADLVEANAEELAQIEALDNGKPATMARAIDVAGAAGFLRYMAGWATKLHGESLDVSVPLVREREFVAFTRQEAVGVVGAIIPWNFPLLMAAWKLGPALACGCTVVLKPAEETPLSALRLGELVMEAGYPAGVVNIVTGDGARCGAALAGHPQVDKIAFTGSTEVGKLVGGAAMERLARVTLELGGKSPVIMLDDMSPEAAATGAAQAIFFNQGQVCTAGSRLYLPRSKFDATVQALADIANSLRLGPGLEPDTGMGPLVSRRQHKRVAGYVQAGVDAGAQLICGGNADLPRGHFFKPTVLARAPETSSVVQEEIFGPVVVALPYDDIDEVVGRANGTPFGLAASVWSNDLSRVHRLVPRIKAGTVWVNCHNLLDNAMPFGGFKQSGLGREMGRAVFDHYTETKSVMIAV

SEQ ID NO: 4331 - protein, 325 aa, Emericella nidulans
MSSGKTFKLSNGVTIPAVGFGTFASEGASGETYRAVKKALEVGYRHLDCAWFYQNEDEVGDAVRDFLKENPSVKREDIFICTKVWNHLHRPEDVRWSIEDSLKKLKTDYVDLFLIHWPIAAEKESQDKPKIGPDGKYVILKDLTEDPKPTWQAMEKLYEDKLARSIGVSNWTIEGLEKLLKYAKVKPHVNQIEIHPFLPNEELIQYCWKNDILPEAYSPLGSQNQVPTTGERVSENKTLNEIAQKGGNTLAQVLIAWGLRRGYVVLPKSSNPARIESNFKTIELSDEDYEAVNAVAKGRHFRFVNMKDTFGYDVWPEETAKNISA

SEQ ID NO: 4332 - protein, 240 aa, Triticum aestivum
  misc_feature (62)..(62): Xaa can be any naturally occurring amino acid
MGERVKGTVKWFNVTKGFGFISPDDGGEDLFVHQSAIKADGYRSLNENDAVEFEVITGDDGXRTKAADVTAPGGGALAGGSRPGDGGGDRGGRGGGGGGGGGYGGGGGGYGGGGGAYGGGGGGYGGGGGGYGGGGYGGGGGGGRGCYKCGEEGHISRDCPQGGGGGYGGGGYGGGGGGGGGRECYKCGEEGHISRDCPQGGGGGGGYGGGGGRGGGGRGGGCFSCGESGHFSRECPNKAH

SEQ ID NO: 4333 - protein, 433 aa, Saccharomyces cerevisiae
MQSMNVQPRVLAVGGEQFFSQRQASEQHQQQNMGPQVYSPKVNRARMFPQGMPVNTINGSVNQEMNNAYLLKQKNEPLLTQQQQQQQQQQQPFNIGTPVSVASLPPGLNVLQQQQQQQQQQQQQQQGVGLNRPLASQLPKHLTNQSMPPIFLPPPNYLFVRDVWKSNLYSEFAVIRQLVSQYNHVSISTEFVGTLARPIGTFRSKVDYHYQTMRANVDFLNPIQLGLSLSDANGNKPDNGPSTWQFNFEFDPKKEIMSTESLELLRKSGINFEKHENLGIDVFEFSQLLMDSGLMMDDSVTWITYHAAYDLGFLINILMNDSMPNNKEDFEWWVHQYMPNFYDLNLVYKIIQEFKNPQLQQSSQQQQQQQYSLTTLADELGLPRFSIFTTTGGQSLLMLLSFCQLSKLSMHKFPNGTDFAKYQGVIYGIDGDQ

SEQ ID NO: 4334 - protein, 127 aa, Triticum aestivum
MEAPAAAAAAVSTLSALAVFVSTVDRGAVRSAHGYRVAGKGGGCGWERWVEREFAFTPTSAREVPLPADALRLLPADWRGRPAYREGQIAGPWRCILAFDFVAAVAPPPVPPPVLCPFRNPRLMCVP

SEQ ID NO: 4335 - protein, 368 aa, Oceanobacillus iheyensis HTE831
MKTDEKFVPGLDGVIASETAISFLDVEKEKIIINGHDLIELSLKQDYLDILYLLLEGDLPKKVEITKTEKLLKDHYEVPQAVLDILKLLPKETHPMDGMRTALSVLAGYDKNIEDRSASANKDRAYQLLGQLPTITVNSYRILNNQEVVQPATELSYSANFLYMITGKEPSDLQVEIFDRLLLLYSEHEMPNSTFTARVISSTNSDMYGALTGAISSLKGNLHGGANEAVMYMLNEVETADEFEQLLYKKLENKEKIMGFGHRVYMKKMDPRALITKEALKKLCEKDNDYTLLEMCEAGEEVMKKEKGLYPNLDYYAAPVYWKLGIPISLYTPIFFSARTAGLAAHIVEQHSNNRIFRPRVKYIGKDY

SEQ ID NO: 4336 - protein, 364 aa, Aminobacter sp. IMB-1
MATYHLKIVGKRDEGNDAASLWLEVPQDLRGAFSYRPGQFLTVERDGDGGRIARQYSLSSTPEAHRDLRITVKKIDGGAVSPWLVQDVGEGQALEVQPPRGRFFRGFDEPRHVLMLACGSGIAPILSIARHLLAQDAGHRVTIIYGNRTPDAVILGDEVGALAESHPTACHVEQVMSRAGESWHGARGRIDKTFIETRWKDWQAASHGLSTSIFLCGPQEFMDDAERAFVDLGLALADIHRESFDLVLNDDDGEPGLTLVGVNDPGESGPCERIVAVVGGEEYETVPEEGESILAALIRAEADVPFSCQEGTCASCISKLTEGSASVRPGVLQTLRQDDLDEGLTLACLSRPTTRSVRIDFDEI

SEQ ID NO: 4337 - protein, 355 aa, male-killing Rickettsia from Adalia bipunctata
GFMSTASCRSTITYIDGDKGILRYRGYDIKDLAEKSDFLEVAYLLIYGELPSSEQYNNFTKKVAVHSLVNERLHYLFQTFCSSSHPMAIMLAAVGSLSAFYPDLLNFKEADYELTAIRMIAKIPTIAAMSYKYSIGQPFIYPDNALDFTENFLHMMFATPCEKYKVNPIIKNALNKIFILHADHEQNASTSTVRIAGSSGANPFACVSTGIASLWGPAHGGANEAVINMLKEIGSSENIPKYIAKAKDKNDPFRLMGFGHRVYKNYDLRAAVLKETCKEVLKELGQLDGNPLLQIAIELEAIALKDEYFIERKLYPNVDFYSGIIYKAMGIPSQMFTVLFAIARTVGWMAQWKEM

SEQ ID NO: 4338 - protein, 234 aa, Methanosarcina acetivorans C2A
MTERNTSTDSPEKRAAGIAAAGLVSSGMLVGLGTGSTVAYTIKELGRRVREEGLDILGVVTSYQSEMLAIEAGIRLTTLAQHPELDLAIDGADQIDSELRAIKGGGAAHTREKIVSVSARRFVVVADESKTSKQLDKLVPVEVLPFAKEPVVKKIRELGGKPQLRSAVKKDGPVITDNGNFVLDVEFGVIKDPEALALQLSSIPGVVEHGIFCNVSELYIGNKDGAIKIITRQK

SEQ ID NO: 4339 - protein, 72 aa, Zea mays
MADGPFCPFLEILFAIILPPLGVFLRFGCCRIKFCICLLLPILGYVPGIIYAIYVLVALDSGQPEREYSPPA

SEQ ID NO: 4340 - protein, 247 aa, Prunus dulcis
  misc_feature (220)..(220): Xaa can be any naturally occurring amino acid
  misc_feature (228)..(228): Xaa can be any naturally occurring amino acid
  misc_feature (235)..(235): Xaa can be any naturally occurring amino acid
  misc_feature (243)..(243): Xaa can be any naturally occurring amino acid
RIENKINRQVTFAKRRNGLLKKAYELSVLCEAEVALIIFSNRGKLYEFCSSSSMLKTLERYQKCNYGAPETNVSAREALELSSQQEYLKLKARYEALQRNQRNLLGEDLGPLSSKELESLERQLDMSLKQIRSTRTQCMLDQLTDLQRKEHMLNEANKTLKQRLFEGYHVNSLQMNPNADEYGRQQTQAHGDGFFHPLDCEPTLQIGYQNDPISVVTAGXSVSNYMAXMVAMIIXKCVLESTXSHEW

SEQ ID NO: 4341 - protein, 355 aa, male-killing Rickettsia from Adalia bipunctata
GFMSTASCRSTITYIDGDKGILRYRGYDIKDLAEKSDFLEVAYLLIYGELPSSEQYNNFTKKVAVHSLVNERLHYLFQTFCSSSHPMAIMLAAVGSLSAFYPDLLNFKEADYELTAIRMIAKIPTIAAMSYKYSIGQPFIYPDNALDFTENFLHMMFATPCEKYKVNPIIKNALNKIFILHADHEQNASTSTVRIAGSSGANPFACVSTGIASLWGPAHGGANEAVINMLKEIGSSENIPQYIAKAKDKNDPFRLMGFGHRVYKNYDLRAAVLKETCKDVLKELGQLDGNPLLQIAIELEAIALKDEYFIERKLYPNVDFYSGIIYKAMGIPSQMFTVLFAIARTVGWMAQWKEM

SEQ ID NO: 4342 - protein, 136 aa, Glycine max
  misc_feature (126)..(126): Xaa can be any naturally occurring amino acid
MSTKKIVLKSSDGESFEVDEAVALESQTIAHMVEDDCVDNGVPLPNVTSKILAKVIEYCKKHVDAAASKSEAVDGGGSSDDDLKAWDAEFMKIDQATLFELILAANYLNIKNLLDLTCQTVADMIXGKTPEEIRTT

SEQ ID NO: 4343 - protein, 194 aa, Zea mays
  misc_feature (81)..(81): Xaa can be any naturally occurring amino acid
SGRGGLWRVPPASAFRATTKPGISVRAYMARIARFAGCSPACYVGAYVYLDRLLRRARLLALAVDSYSVHRLLITAVLAAXVKFMDDICYNNAYFAKVGGISLVEMNYLEVDFLFGIAFDLNVTPAAFASYCAVLQSEMAYLDDAPAPAPVVEAPPRLHYCYGAAGTSDRHDDPAAVAAAAACHRHSSQPQLTV

SEQ ID NO: 4344 - protein, 447 aa, Corynebacterium glutamicum ATCC 13032
MVDSNTQYPETGALAPAPADSLLISNVLVYGEGEPTNVFVKDGVIAAIGGTHEADRTIDGNGGVLLPGFVDMHVHLREPGREDTETIATGSAAAAKGGFTAVFTMANTTPVMDQPVIAESVWFKGQNIGLCDVHPVGSITKGLEGKELTEFGMMARSEAKVRMFSDDGKCVDDPQVMRRALEYAKGMDVLIAQHAEDHRLTEGASAHEGENAARLGLRGWPRVAEESIVVRDAIMARDYGNRVHICHASTEGTVELLRWAKSQGIPITAEVTPHHLTLTDERLETYDAVNKVNPPLRESRDAEALKKALLDGTIDVVATDHAPHGSEDKCCEFENAKPGMLGLETSLSIIVDTFVATGLADWRFVARVMSERPAEITRLPGQGRPIAEGEPANLAIVDPGKTWTASGADFASKAENTPFEGQEFSAKVTHTVLRGKVTCADGVAQNA

SEQ ID NO: 4345 - protein, 321 aa, Schizosaccharomyces pombe
MSAEQKYFENAQNVHFTLADGSKIPGLGLGTWRSEPNQTKNAVKTALQYGYRHIDAAAIYGNEDEVGDGIKESGVPRKDIWVTSKLWCNAHAPEAVPKALEKTLKDLKLDYLDEYLIHWPVSFKTGEDKFPKDKDGNLIYEKNPIEETWKAMEKLLETGKVRHIGLSNFNDTNLERILKVAKVKPAVHQMELHPFLPQTEFVEKHKKLGIHVTAYSPFGNQNTIYESKIPKLIEHETIQKIAKSKGEGVTGATIAVSWAITRGTSVIPKSVNEQRIKSNFKYIPLTKEDMDEINSIGIRARFNQATFSNEPVFAGLEDGRT

SEQ ID NO: 4346 - protein, 250 aa, Hordeum vulgare subsp. vulgare
MAKSYPVVSAEYLEAVEKARQKLRALIAEKNCSPLMLRLAWHSAGTFDVSSKTGGPFGTMKKPAEQAHAANAGLDIAVRMLEPIKEEIPTISYADLYQLAGVVAVEVSGGPVIPFHPGREDKPQPPPEGRLPDATKGSDHLRQVFGKQMGLSDQDIVALSGGHTLGRCHKERSGFEGPWTRNPLKFDNSYFTELLSGDKEGLLQLPSDKTLLTDPVFRPLVEKYAADEKAFFEDYKEAHLRLSELGYAEA

SEQ ID NO: 4347 - protein, 355 aa, male-killing Rickettsia from Adalia decempunctata
GFMSTASCRSTITYIDGDKGILRYRGYDIKDLAEKSDFLEVAYLLIYGELPSSEQYNNFTKKVAVHSLVNERLHYLFQTFCSSSHPMAIMLAAVGSLSAFYPDLLNFKEADYELTAIRMIAKIPTIAAMSYKYSIGQPFIYPDNSLDFTENFLHMMFATPCEKYKVNPIIKNALNKIFILHADHEQNASTSTVRIAGSSGANPFACVSTGIASLWGPAHGGANEAVINMLKEIGSSENIPKYIAKAKDKNDPFRLMGFGHRVYKNYDLRAAVLKETCKEVLKELGQLDGNPLLQIAIELEAIALKDEYFIERKLYPNVDFYSGIIYKAMGIPSQMFTVLFAIARTVGWMAQWKEM

SEQ ID NO: 4348 - protein, 505 aa, Candida maltosa
MAIFTPELWLICFAVTVYIFDYIYTKYLMYKLGAKPITHVIDDGFFGFRLPFLITLANNQGRLIEFSVKRFLSSPHQTFMNRAFGIPIILTRDPVNIKAMLAVQFDEFSLGLRYNQFEPLLGNGIFTSDGEPWKHSRIMLRPQFIKSQVSHVNRLEPHFNLLQKNITAQTDNYFDIQTLFFRFTLDTATEFLFGQSVHSLNDGENSLQFLEAFTKSQAILATRANLHELYFLADGIKFRQYNKMVQDFSQRCVDKVLNMSNSEIDKLDRYFFLYEMVKITRNPQVLRDQCLNILLAGRDTTASLLSFAFFELALNEPIWIKLRTEVLHVFQTSLELITFDLLKTKCPYLQAILHETLRLYPSVPRNARFSKKNTTLPHGGGVDGMSPILIKKGQPVAYFICATHVDEKFYTKDALIFRPERWCEEPLIKKNLAWSYLPFNGGPRICLGQQFALTEASYVLTRLAQCYTKISLQPNSFEYPPKKQVHLTMSLLDGVHVKISNLSIS

SEQ ID NO: 4349 - protein, 510 aa, Candida maltosa
MIDALYILIVALVIYKTAQFVHRKSLEKKHHCQPVKQIPLVSILSGLGFDMFFKDTAEMTKNGGLHKKLQQMLESLQTTTFRSRMLTGSQIVTMEPENERTMCSSAHMKDWTIGYRPFALKPLLGDGIFSSEGESWKHSRIMLRPIFAKEHIKQITAMEPYMLLLIEIIKSSSANEGPVDLQPLFHAFTIDYASDFLFGESCDVLKENLGGKSTSGMDAQVKRDFASVFNDVQNYLTKRMMLGPLAFLVSSKDFHDGIKKQHEFVSYFVQKAISMSDEELNDESKNYVFLYQLAKQTKDAKVLQDELLSILLAGRNTTASLLSFLFFELSHHENVWTTLKEVVDQSFPDVESITFETIQNCDYLRWCLFESLRVNPSVPFNSRTANKDTILPRGGGEDCSHPILVKKGDQVLFPLYASNRQEKYFGRKPEEFIPERWRDLPKTGGPAFMPFSTGPRMCLGQQFALIEASYVTIRLVQTFSKLKSHSLEYAPKRLVAATIRLIDGCFVSFE

SEQ ID NO: 4350 - protein, 256 aa, Oryza sativa (japonica cultivar-group)
MEAKRGKIIPAAQVTNFIRRNNVGFGTSIGRKGAPHTIPHGLHGLGRSSNLTLAREGLVGGWHVALRPNLPKPVAKTMEQERREAKSRTSALPGQRRLRRRVQGEDYLPKEDDFAMASSPLRGPRKPFRPIKPRGYRAGDRQTAHQGPMSPYNIMYPCKCPFLVILTTTVLPSVTLLPRILFIHPTTVMFHMNRTNYQLIDISEDGLFVSLLTESGNTKDDLGLPTETISWGRSRLDLVKARKEEEIYALKDIGTK

SEQ ID NO: 4351 - protein, 289 aa, Bifidobacterium longum DJO10A
MTNGHINPANVPDIALKDGHSIPQVGLGVLRIDDEGVVPVVESALEAGYRHIDGAAGYNNEAGVGRALAASGYNKGTKRETLWVTTKLRDSQQGYDSALKAFDNSLKLLQLDYVDMYMIHWPTPFDWRSTDTWKAFVKLRDEGMARTLGVCNFMPADLKRLHEETGAWPAVNQIELHPTWQQREVVAFCKEHGIAVEAYSPMARGADLNAGDGTIEKIAAAHEVSPAQVILRWHIENGTIIIPKSVHADRQKENLNLFGFALTADEHAAIDALDGPTRAGHDPLTFTYA

SEQ ID NO: 4352 - protein, 327 aa, Trichoderma atroviride
MATDTSQKTLSSTTYTLNTGAKIPAVGFGTFANEGAKGETYAAVTKALDVGYRHLDCAWFYLNEDEVGDAIRDFLARRPDVTRKDLFICTKVWNHLHEPEDVKWSAKNSCENLKVDYIDLFLVHWPIAAEKNADRTVKIGPDGKYVINKALTENPEPTWRAMEELVDSGIVKAIGVSNWTIPGLKQLLEFARIKPAVNQIEIHPFLPNTELVEFCFQNDILPEAYSPLGSQNQVPTTGERVRDNPTLNAVADRRGSSLAQVLLAWGLKRGYVVLPKSSTPSRIESNFIIPELSEEDFAAIQKVAEGRHVRFVNMKDTFGYDVWPEDK

SEQ ID NO: 4353 - protein, 178 aa, Glycine max
MASSMISSPAVTTVNRAGAGMVAPFTGLKSMAGFPTRKTNNDTISIASNGGRVQCMQVWPPVGKKKFETLSYLPDLDDAQLAKEVEYLLRKGWIPCLEFELEHGFVYREHNRSPGYYDGRYWTMWKLPMFGCTDASQVLKELQEAKTAYPNGFIRIIGFDNVRQVQCISFIAYKPPGF

SEQ ID NO: 4354 - protein, 144 aa, Triticum aestivum
NKFVQKSRLVPVRNSRDIVDPRVRDWSTRTLTWTEGVENIILSVLPSPTQPPDQSKREISPDSIRSDPRSPSPMASRSCTFLEILLAIILPPLGVFLHYGCCSMEFCICLLLTILGYIPGIIYAVYVLVALGSEERDRDYDTLA

SEQ ID NO: 4355 - protein, 113 aa, Rickettsia typhi
ANEAVINMLKEIGSSENIPKYVAKAKDKNDPFRLMGFGHRVYKSYDPRAAVLKETCKEVLNELGQLENNPLLQIAIELEALALKDEYFIERKLYPNVDSYSGIIYKAMGIPSQ

SEQ ID NO: 4356 - protein, 429 aa, Arabidopsis thaliana
MESLPQPQNQSSPATTPAKILLGKYELGRRLGSGSFAKVHLARSIESDELVAVKIIEKKKTIESGMEPRIIREIDAMRRLRHHPNILKIHEVMATKSKIYLVMELASGGELFSKVLRRGRLPESTARRYFQQLASALRFSHQDGVAHRDVKPQNLLLDEQGNLKVSDFGLSALPEHLQNGLLHTACGTPAYTAPEVISRRGYDGAKADAWSCGVILFVLLVGDAPFDDSNIAAMYRKIHRRDYRFPSWISKQAKSIIYQMLDPNPVTRMSIETVMKTNWFKKSLETSEFHRNVFDSEVEMKSSVNSITAFDLISLSSGLDLSGLFEAKKKKERRFPAKVSGVEVEEKAKMIGEKLGYVVKKKMMKKEGEVKVVGLGRGRTVIVVEAVELTVDVVVVEVKVVEGEEDDSRWSDLITELEDIVLSWHNDIM

SEQ ID NO: 4357 - protein, 420 aa, Listeria monocytogenes str. 4b F2365
MSQKIQVENGVLKTPNNPVIPFIEGDGTGPDIWAAAKRVLDAAVKKAYNGEKEIAWKEVLAGEKAFKQTGEWLPQATLDTIDEYLIAIKGPLTTPIGGGIRSLNVALRQELDLYVCLRPVRYFKGVPSPVKRPEDTDMVIFRENTEDIYAGIEFKEGSEESKKLIDFLKSEFGVDKIRFPETSGIGIKPISKEGTERLVRSAIEYAIKEGRKSLTLVHKGNIMKFTEGAFKNWGYDLCEREYGDKVFTWNEYDRIKEAEGTEVADAKQKEALAAGKILVKDSIADIFLQQILTRPAEFDVVATMNLNGDYISDALAAQVGGIGIAPGANINYLTGHAIFEATHGTAPKYAGLDKVNPSSVILSGTLLLEHIGWGEAAALINQSMEKTIAAKTVTYDFARLMDGATEVKCSEFADELIKNF

SEQ ID NO: 4358 - protein, 178 aa, Glycine max
  misc_feature (178)..(178): Xaa can be any naturally occurring amino acid
MASSMISSPAVTTVNRAGAGMVAPFTGLKSMAGFPTRKTNNDITSIASNGGRVQCMQVWPPVGKKKFETLSYLPDLDDAQLAKEVEYLLRKGWIPCLEFELEHGFVYREHNRSPGYYDGRYWTMWKLPMFGCTDASQVLKELQEAKTAYPNGFIRIIGFDNVRQVQCISFIAYKPPGX

SEQ ID NO: 4359 - protein, 373 aa, Listeria monocytogenes str. 4b F2365
MTLSKGLENVYVAETSISSIIDDMLTYVGYGIDDLMENNASFEEVIYLLWHLRLPNKDEFKKFKREIQENMAVSETIITSLRMQNHQKLHPMSVLRTTVSMLGVFDTEAELDDGEAVYRKGLRLQAKMPTIVAAFSRIRRGLDPIPPREDLNMAANFLYMITGEEADALSVEAMNKALVLHADHEFNASTFTARVCVATLSDVYSGVTAAIGALKGPLHGGANERVFDMLEEIDQAGDVRNYIQEKIDTKQKIMGFGHRVYRGGDPRAQHLREMSRKLTAEKGEEKWFDISLQVEESVWELKHLKPNVDFYSASVYHALGIDRDLFTLVFSVSRVSGWLAHIFEQYRDNRLIRPRAIYVGPENRSYLPVEERI

SEQ ID NO: 4360 - protein, 312 aa, Saccharomyces cerevisiae
MPATLHDSTKILSLNTGAQIPQIGLGTWQSKENDAYKAVLTALKDGYRHIDTAAIYRNEDQVGQAIKDSGVPREEIFVTTKLWCTQHHEPEVALDQSLKRLGLDYVDLYLMHWPARLDPAYIKNEDILSVPTKKDGSRAVDITNWNFIKTWELMQELPKTGKTKAVGVSNFSINNLKDLLASQGNKLTPAANQVEIHPLLPQDELINFCKSKGIVVEAYSPLGSTDAPLLKEPVILEIAKKNNVQPGHVVISWHVQRGYVVLPKSVNPDRIKTNRKIFTLSTEDFEAINNISKEKGEKRVVHPNWSPFEVFK

SEQ ID NO: 4361 - protein, 153 aa, Methylococcus capsulatus str. Bath
MKRLILCLCGMLAISAAEAMEIRQFDDPAKEERYETLIKDLRCLVCQNQSLAESDAELAKDLRTEVYNIIQSGKSSEEAVRFLTERYGDFVLYRPPFKRITLLLWLGPFLLLAGGAVFLWKQARRRAAAAQQDATLSAEERRRLQQLKDRFQG

SEQ ID NO: 4362 - protein, 98 aa, Glycine max
  misc_feature (83)..(83): Xaa can be any naturally occurring amino acid
  misc_feature (87)..(87): Xaa can be any naturally occurring amino acid
TRAESPLFAPFTVLKTMAGLPTIKTTNYITSIANNGGRVQCMQVCPPVGKKKFDTLSYLPNLDDAQLAKEVQYLLRKGWIPCXEIRXDHGLEYREHNR

SEQ ID NO: 4363 - protein, 813 aa, Zea mays
  misc_feature (420)..(420): Xaa can be any naturally occurring amino acid
MAQILLHGTLHATIFEAESLSNPHRATGGAPKFIRKLVEGIEDTVGVGKGATKIYATVDLEKARVGRTRMISNEPVNPRWYESFHIYCAHMAADVIFTVKIDNSIGASLIGRAYLAVQDLLGGEEIDKWLEISDENREPVGDSKIHVKLQYFDVGKDRNWARGVRSTKYPGVPYTFFSQRQGCKVTLYQDAHVPDNFVPRIQLADGKNYEPHRCWEDIFDAISKAQHLIYITGWSVYTEITLVRDTNRPKPGGDVTLGELLKRKASEGVRVLMLVWDDRTSVGLLKKDGLMATHDEETANYFHGTDVNCVLCPRNPDDSGSFVQDLQISTMFTHHQKIVVVDHEMPNQGSQQRRIVSFIGGIDLCDGRYDTQYHSLFRTLDTVHHDDFHQPNFEGGSIKKGGPREPWHDIHSRLEGPIAXWDVLYNFEQRWRKQGGKDLLVRLRDLPDIIIPPSPVMFPEDRETWNVQLFRSIDGGAAFGFPETPEEAARAGLVSGKDQIIDRSIQDAYVNAIRRAKNFIYIENQYFLGSSYGWKPEGIKPEEIGALHLIPKELSLKIVSKIEAGERFTVYVVVPMWPEGVPESASVQAILDWQRRTMEMMYTDIAQALEANGIEANPKDYLTFFCLGNREVKQEGEYEPEEHPEPDTDYIRAQEARRFMIYVHTKMMIVDDEYIIIGSANINQRSMDGARDSEIAMGAYQPYHLATRQPARGQIHGFRMSLWYEHLGMLEDVFQRPESVECVQKVNEVAEKYWDLYSSDDLEQDLPGHLLSYPIGVTADGSVTELPGMENFPDTRARVLGNKSDYLPPILTT

SEQ ID NO: 4364 - protein, 393 aa, Gibberella zeae PH-1
MATRTIEARFERMSVNDENDPIGDGSKLYSKSKVQTISSTSSHGANRPNLFKVALQSQSSNANAAVMLPSQAAQRKVNNPPPSPTRKALPSSSRTSDEVSEDRKSVTLPEQMSVPKQFHLGMFEIGRPLGKGKFGRVYLARERTTGFICALKVLHKNELQAGRVEKQVRREIEIQSNLRHPNILQLYGHFHDSKRVFLILEFAGKGELYKHLRKENRFPEWKAAQYIAQMASALRYLHRKHVIHRDIKPENILVGIHGEIKISDFGWSVHAPNNRRKTMCGTLDYLPPEMIKPGTSDNFYNEKVDLWSLGVLTYEFLVGEAPFEDTPVMTQRRIARADMSIPTWVSPEATDLIKKLLVLDPEKRIPLEQIQQHPWIIKHCVKGERASNREKGL

SEQ ID NO: 4365 - protein, 424 aa, Exiguobacterium sp. 255-15
MATIQGENITVTDGTLNVPNSPIIPFIIGDGTGPDIWNAAVRVFDAAVEKAYNGEKKIEWKEVYAGEKAFNKTGNWLPEETLDLIREHIIAIKGPLTTPVGGGIRSLNVALRQELDLYTCLRPVRYFTGVPSPVKRPEDTDMVIFRENTEDIYAGIEYASGSEEAQKLLNFLQTEMGVNKIRFPETSGLGIKPISKEGTERLVRAAIEYALENKRASLTLVHKGNIMKFTEGAFKNWGYELAEREYAEHVFTWNQYDRIKDEEGADAANKAQSEAEAAGKLIVKDSIADIFLQQILTRPKEFDVVATMNLNGDYISDALAAQVGGIGIAPGANINYMTGHAIFEATHGTAPKYAGLDKVNPSSVILSGEMMFRHLGWNEVADLIIQSMEKSIEGKVVTYDFARLMDGATEVKCSEFADELIKNM

SEQ ID NO: 4366 - protein, 105 aa, Crocosphaera watsonii WH 8501
MIQQQTYLNVADNSGARKLMCLRVLGTGNCTYGKIGDKIIAVVKDALPNMPVKRSEIVTAVIVRTRQPVNRASGMTIRFDDNAAVIINADGNPRGTRVFGPVARD

SEQ ID NO: 4367 - protein, 114 aa, Lycopersicon pennellii
MEMVSKIACFVLLCMVVVAPHAEALTCGQVTAGLAPCLPYLQGRGPLGGCCGGVKGLLGSAKTTADRKTACTCLKSAANAIKGIDLNKAAGIPSVCKVNIPYKISPSTDCSTVQ

SEQ ID NO: 4368 - protein, 146 aa, Brassica napus
  misc_feature (51)..(51): Xaa can be any naturally occurring amino acid
  misc_feature (56)..(56): Xaa can be any naturally occurring amino acid
  misc_feature (67)..(67): Xaa can be any naturally occurring amino acid
  misc_feature (83)..(83): Xaa can be any naturally occurring amino acid
  misc_feature (104)..(104): Xaa can be any naturally occurring amino acid
  misc_feature (116)..(116): Xaa can be any naturally occurring amino acid
MAYSMLSSAAVVTSPAQATMVAPFTGLKSSSAFPVTRKANNDITSIVSNGXGRVSXALQVWPPIGKXKKFETLSYLPDPYRKXMGVREVDYLLRNKWDFLCVEXFELEQRDFVYRXEHGSTPELLTMGRYWTNGESFPLVRMHCSG

SEQ ID NO: 4369 - protein, 114 aa, Lycopersicon pennellii
MEMVNKIACFVLLCMVVVAPHAEALTCGQVTSTLAPCLPYLMNRGPLGGCCGGVKGLLGQAQTTVDRQTACTCLKSAASSFTGLDLGKAASLPSTCSVNIPYKISPSTDCSKVQ

SEQ ID NO: 4370 - protein, 473 aa, Arabidopsis thaliana
MSSSVPNSDRKIVTGPAGYILEDVPHFSDDFPDHPTYPNPLQDNAAYSVVKQYFVDEDDTVPQKIVVHPDSPRGTHFRRAGPRQRVYFESDDVLACIVTCGGLCPGLNTVIREIVCGLSYMYGVKRILGIDGGYRGFYARNTIHLDLKTVNDIHRSGGTILGTSRGGHNTTKIVDSIQDRGINQVYIIGGDGSQKGAAAIFEEIRKRKLKVAVAGIPKTIDNDIPIIDRSFGFDTAVEEAQRAINAAHVEATSFENGIGLVKLMGRYSGFIAMHATLASRDVDCCLIPESPFFLEGSGGLFEFIDKRLKESGHMVIVIAEGAGQDLLSESMKESTTLKDASGNKLLQDIGLWISQRIKDHFAKKMTLTLKYIDPTYMIRAVPSNASDNVCCTLLAQSAVHGVMAGYNGFTVGLVNGRHTYIPFNRITEKQNKVVITDRMWARLLSSTNQPSFMKQADKIHSNQLVGEPGTMKW

SEQ ID NO: 4371 - protein, 397 aa, Clostridium acetobutylicum ATCC 824
MCGIAGFVNFKKNLIDKKSIIEDMTNTLIKRGPNEKGYYISKNALLGHRRLIVVDPKGGSQPMIKIHNGKKYIIVYNGELYNTEDIRKELLEAGYEFSSYSDTEVLLTSYIHWKEDCVNHINGIFAFAIYSETDKKIFLARDPLGVKPLFYTIKNNNLIFGSEIKTLLANPLVEPILTKEGLTEIFALGPARNLGSGVLKDIHEIPPANFIEFTEHKFKLHEYWRLSCKPHTENASETAEHIKFLLTDAIKRQLYADVPVCTFLSGGLDSSIISAVAASEFKKHGKTLNTYSIDYKDNNLYFKNDNFVITPDSVWAEKMRKFIGSNHHKIINNNLDLASALYDAVKANDIPGMADIDSSLFLFCKGVAEKNVVSLSGERAIQMITNLVKQFINIGEL

SEQ ID NO: 4372 - protein, 163 aa, Triticum aestivum
  misc_feature (104)..(104): Xaa can be any naturally occurring amino acid
MPSVEVEVQVGGAGGWRPKQQQKHRHHHHPLEIRQVWADNVDREFKLIRAAIERFPYVSMDTEFPGVIHHPPPAVHHSTLTAPQRYALLKSNVDALHLIKVGLXLAPSPGLPPALAFRLTPRLQPARERQAPDRRLLAATAHSPQRARGPLAALSAEPRPGTR

SEQ ID NO: 4373 - protein, 303 aa, Acinetobacter calcoaceticus
MKFGTVWKYYFTESLLKATIRTPSQLNLAPNALRPVLDQLCRLFPQNPTVQIRPIRLAGVRGEEIKAQASATQLIFHIHGGAFFLGSLNTHRALMTDLASRTQMQVIHVDYPLAPEHPYPEAIDAIFDVYQALLVQGIKPKDIIISGDSCGANLALALSLRLKQQPELMPSGLILMSPYLDLTLTSESLRFNQKHDALLSIEALQAGIKHYLTDDIQPGDPRVSPLFDDLDGLPPTLVQVGSKEILLDDSKRFREKAEQADVKVHFKLYTGMWNNFQMFNAWFPEAKQALADIAEFATSLDLD

SEQ ID NO: 4374 - protein, 486 aa, Pseudomonas stutzeri
MKEIKHFINGAFVDSASGRTFEDINPVNGQVIGRVHEAGRAEVDAAVRAARAALKGPWGKMTVAERAEILHRVADGVTARFDEFLEAECLDTGKPKSLASHIDIPRGAANFKVFADLIKNVPTEAFEMATPDGAGALNYGVRRPKGVIGVISPWNLPLLLMTWKVGPALACGNCVVVKPSEETPLTATLLGEVMQAAGVPAGVYNVVHGFGGDSAGAFLTEHPDVDAYTFTGETGTGETIMRAAAKGVRQVSLELGGKNAGIVFADCDLDKAIEGTLRSAFANCGQVCLGTERVYVERPIFDAFVARLKAGAEALKIGEPNDPEANFGPLISHKHREKVLSYYQQAVDDGATVVTGGGVPEMPAHLAGGAWVQPTIWTGLTDDSAVVTEEIFGPCCHIRPFDTEAEAIELANSLPYGLASAIWTENASRAHRVAGQIEAGIVWVNSWFLRDLRTAFGGSKQSGIGREGGVHSLEFYTELKNICVKL

SEQ ID NO: 4375 - protein, 450 aa, Agrobacterium tumefaciens str. C58
MTILPNSVEARDIAYQMHPNVNLRKFEKTGGLVIESGEGIYVTDSSGKRYIEAMAGLWSVALGFGEQRLVDAATKQMQKLPYYHTFSYKTHGPSVDLAELLIELSPVPMSKVHFTSSGSEANDLVAKMVWYRSNALGKKDKKKIIGRIKGYHGVTIASASITGLPRNHESFDLPLDRMLHTACPSYVHFGKDGESEAEFTARILGELEELILREGPETVAAFWGEPVMGAGGVLLPPEGYWEGVQAILKKYDILLVVDEVICGFGRTGKMFACETYDIKPDVLVVSKQISSSYMPLSAIIMNDSFYQPIADESDRIGSFGHGYTASGHPVATAVGLENLKIIQERDLVGNVARLEGKFLDHLKALADHPLIHSSRGIGLLGALEVKPWDGTKPGDTTLALAAAIESEGVITRPIGESICFCPPLIITAEQLDELFAGVKRGLDNALAARG

SEQ ID NO: 4376 - protein, 387 aa, Ralstonia solanacearum GMI1000
MSEADSSTPAGAFKPKKSVALSGVTAGNTALCTVGRTGNDLHYRGYDILDLAAACEFEEVAYLLVHGKLPNKAELTTYKARLKALRGLPANVKAALEWVPASAHPMDVMRTGVSVLGTVLPERDDHNLPGARDIADRLMASLGSMLLYWYHYSHNGRRIEVETDDDSIGGHFLHLLHGVEPSKSWVDAMHVSLNLYAEHEFNASTFTGRVIAGTGSDIYSAITGAIGALRGPKHGGANEVAFEIQKRYDTPDEAEADVRRRVEAKEVIIGFGHPVYTISDPRNKVIKEVARKLSKEAGNTRMFDIAERLETVMWDVKKMFPNLDWFSAVSYHMMGVPTAMFTPLFVISRTSGWAAHVIEQRIDNKIIRPSANYTGPEDLKFVPLGKR

SEQ ID NO: 4377 - protein, 71 aa, Triticum aestivum
  misc_feature (41)..(41): Xaa can be any naturally occurring amino acid
MAGTANCIDIILAIILPPLGVFLKFGCGHEFWICLLLTFLXGYIPGIIYAIYAITKVNQRQPAPECSRRNK

SEQ ID NO: 4378 - protein, 486 aa, Pseudomonas sp. ST41
MKEIKHFINGAFVYSADGRTFEDINPVNGQVIGRVHEAGRAEVDAAVKAARAALKGPWGKMTVAERAEILHRVADGITARFDEFLEAECLDTGKPKSLASHIDIPRGAANFKVFADLIKNVPTEAFEVATPDGAGALNYGVRRPKGVIGVISPWNLPLLLMTWKVGPALACGNCVVVKPSEETPLTATLLGEVMQAAGVPAGVYNVVHGFGGDSAGAFLTEHPDVDAYTFTGETGTGETIMRAAAKGVRQVSLELGGKNAGIVFADCDMDKAIEGTLRSAFANCGQVCLGTERVYVERPIFDAFVARLKAGAEALKIGEPNDPEANFGPLISHKHREKVLNYYQQAVDDGATVVTGGGVPDMSAHLAGGAWVQPTIWTGLADDSAVVTEEIFGPCCHIRPFDSEEEAIELANSLPYGLASAIWTENASRAHRVAGQIEAGIVWVNSWFLRDLRTAFGGSKQSGIGREGGVHSLEFYTELKNICVKL

SEQ ID NO: 4379 - protein, 139 aa, Arabidopsis lyrata subsp. petraea
STGKRSEREEDTDPQGSRGISDDEDGDNSRKKLRLSKDQSVILEETFKDHSTLNPKQKQALAKQLGLRARQVEVWFQNRRARTKLKQTEVDCEFLRRCCENLTEENRRLQKEVTELRALKLSPQFYMHMSPPTTLTMCP

SEQ ID NO: 4380 - protein, 74 aa, Triticum aestivum
  misc_feature (2)..(2): Xaa can be any naturally occurring amino acid
  misc_feature (6)..(6): Xaa can be any naturally occurring amino acid
  misc_feature (8)..(8): Xaa can be any naturally occurring amino acid
  misc_feature (10)..(12): Xaa can be any naturally occurring amino acid
  misc_feature (15)..(16): Xaa can be any naturally occurring amino acid
  misc_feature (18)..(18): Xaa can be any naturally occurring amino acid
  misc_feature (21)..(21): Xaa can be any naturally occurring amino acid
  misc_feature (33)..(33): Xaa can be any naturally occurring amino acid
  misc_feature (35)..(35): Xaa can be any naturally occurring amino acid
  misc_feature (43)..(46): Xaa can be any naturally occurring amino acid
  misc_feature (49)..(49): Xaa can be any naturally occurring amino acid
  misc_feature (54)..(54): Xaa can be any naturally occurring amino acid
  misc_feature (56)..(56): Xaa can be any naturally occurring amino acid
  misc_feature (61)..(62): Xaa can be any naturally occurring amino acid
LXSSLXAXVXXXHLXXTXAAXRWGTKLQSFCVXLXGSPDLKAXXXXPNXLGTMXHXFTFTXXDGIDAIEDVIYH

SEQ ID NO: 4381 - protein, 294 aa, Staphylococcus aureus subsp. aureus Mu50
MVIQWYPGHMAKAKREVSEQLKKVDVVFELVDARIPYSSRNPMIDEVINQKPRVVILNKKDMSNLNEMSKWEQFFIDKGYYPVSVDAKHGKNLKKVEAAAIKATAEKFEREKAKGLKPRAIRAMIVGIPNVGKSTLINKLAKRSIAQTGNKPGVTKQQQWIKVSNALQLLDTPGILWPKFEDEEVGKKLSLTGAIKDSIVHLDEVAIYGLNFLIQNDLARLKSHYNIEVPEDAEIIAWFDAIGKKRGLIRRGNEIDYEAVIELIIYDIRNAKIGNYCFDIFKDMTEELANDANN

SEQ ID NO: 4382 - protein, 361 aa, Myxococcus xanthus
MRLGVLTGGGDCPGLNALIRGLVKRGTHEFGYEFVGIENGYMGLVEPGLAHPLTEEDTRGILPKGGTILGTSNKANPFSYATREDGHWVERDVSDQVLLRCEELGLDGLIAVGGDGTLSIAHRLVEKGLKVVGCPKTIDNDLSGTDQTFGFDTARLIVTEALDRLHSTAEAHDRVMVVEIMGRHAGFLTLESGIAGGADVILIPEIPYSVESVVEKIRRRSTRRRSFSIIAISEGAFPQGGELAVLDTAEAIPGRGVVRLGGSGKALADLLARHIEAEIRVTVLGHLQRGGSPSAADRVLATRYGCKVLDLVSAGQWDHMVALRAGEIIAVPLSESRKERRVDPAGELVRFTKSMGISFGD

SEQ ID NO: 4383 - protein, 124 aa, Zea mays
  misc_feature (105)..(105): Xaa can be any naturally occurring amino acid
MDNLSRLPDELLVRILSLVPTKVVVSTSILSKRWKFLWMSLPKLEFVDRDESLLVLKNFVNKNLPLHRAPVIQSFLLSLYESREKNIKPEDIRQWVEIAVSRHLXELDVSYSSDNKENMVPNSL

SEQ ID NO: 4384 - protein, 541 aa, Zea mays
MATANGSWVPRGRAGIHLSITTTSSFPRLPSALRVARGSMATANGSSKGSFEVPKVEVRFTKLFIDGKFVDAVSGKTFETRDPRTGEVIASIAEGGKADVDLAVKAAREAFDNGPWPRMTGYERGRILHRFADLIDEHVEELAALDTVDAGKLFAVGKARDIPGAAHLLRYYAGAADKVHGATLKMAQRMHGYTLKEPVGVVGHIVPWNYPTTMFFFKVGPALAAGCAVVVKPAEQTPLSALFYAHLAREAGVPAGVLNVVPGFGPTAGAAVAAHMDVDKVSFTGSTEVGRLVMRAAAESNLKPVSLELGGKSPVIVFDDADLDMAVNLVNFATYTNKGEICVAGTRIYVQEGIYDEFVKKAAELASKSVVGDPFNPSVSQGPQVDKDQYEKVLRYIDIGKREGATLVTGGKPCGDKGYYIEPTIFTDVKDDMTIAQDEIFGPVMALMKFKTVEEVIQKANNTRYGLAAGIVTKNIDVANTVSRSIRAGAIWINCYFAFDPDAPFGGYKMSGFGKDMGMDALDKYLQTKTVVTPLYNTPWL

SEQ ID NO: 4385 - protein, 189 aa, Zea mays
MSVSPSSLCGGDPAMRIVVWFRRDLRVEDNPALAAAARAGGEVVPAYVWSPEEEGPYYPGRVSRWWISQSLNHLDASLRRLGAGKLVTRRSADAAVALLQLVRDTGATHVYFNHLYDPISLVRDRRLKEMLAAEGIVVQSFNSDLLYEPWEVVDDEGQPFTMFDPFWNRCLSMPYDPPAPLMPPKRINS

SEQ ID NO: 4386 - protein, 351 aa, Vibrio parahaemolyticus RIMD 2210633
MFFEWQGNQPVTLRCIDKYFETHDTVSIKLAELTESLLFQFKPGQFINLGVEIDGKMEFRAYSISSINEDDHLQLTIKRVSGGKVSNYIVDSLLLGDTVQALPPAGEFNCIDHPPVLRDGETRALLISAGCGVTPVFSMAKHWLSNQDENDNDVDIAFLHIARSPEETIYYDQLETFDAVYPNFHLKLLLKNREGTSHPQGRLNADWLKELVPDFKQRTVYLCGPSQFMQDVHGYLNDLGFDMTNFYQESFTPATGAETSVSDEVVHVSVPDFAQTIDAQKGQVLADVLEGAGLPLIVACRSGICGSCKCKVRQGSVSSTSLETLTPEEIEQGYVLACSSTIEADLEVQIG

SEQ ID NO: 4387 - protein, 249 aa, Zea mays
MGKHGHGKCHDVEACYPPGAAGGGKYPYMTENPQLRWAFIRKVYVIVCLQLLLTVAVAATVNLVRAIGDFFLSRTMGAMFAIIGVIVAPILVMIPMIIYRKRHPVNLALLALFTVCISFAVGLSCLTANGPVILEAVVITMVVVLGLTFYTFWAAKRGYEFEFLGPFLVSACLILMLFSLLRIIFPLGRTGTMVYGCIAALVFSGFIIYDTDNLIRVYSYDEYVAAAIELYLDIINLFQAILAVLEGVD

SEQ ID NO: 4388 - protein, 362 aa, Arxula adeninivorans
MSKNIIILSGDHVGPEVTAEAIKVLEAITQARPNVKFNFDHKLIGGAAIDATGSPLPDETLEASKKADAVLLGAVGGPKWGTGAVRPEQGLLKIRKELNLYANLRPCNFMSEKLLDLSPLRSEIVKGTNFTVVRELVGGIYFGTRKEDEGNGEAWDTEKYTVEEVKRITRMAAFLALQSNPPLPVWSLDKANVLASSRLWRKTVTETIEKEFPQLTLNHQLIDSAAMILIQNPSKMNGVIVTSNMFGDIISDEASVIPGSLGLLPSASLSSLPDKNTAFGLYEPCHGSAPDLPPNKVNPIATILSAAMMLRLSLNLKEEADAVEKAVSKVIDNGIVTADLKGASSTTEVGDAVAAEVQKLLK

SEQ ID NO: 4389 - protein, 121 aa, Zea mays
  misc_feature (83)..(83): Xaa can be any naturally occurring amino acid
RFQAGPFEVEPIRVTHSIPDCCGLVLRCGDGIIFHTGDWKIDESPVDGKNFDRQALEELSKEGVTLMMSDSTNVLSPARSISXESVVAGSLLRHISEAKRRVIATQFASNIHRIGRIPAAA

SEQ ID NO: 4390 - protein, 175 aa, Triticum aestivum
  misc_feature (169)..(169): Xaa can be any naturally occurring amino acid
MAPAVMASSATTVAPFQGLKSTAGLPVSRRSGSAGLSSVSNGGRIRCMQVWPIEGIKKFETLSYLPPLSTEALLKQVDYLIRSKWVPCLEFSKVGFVFREHNSSPGYYDGRYWTMWKLPMFGCTDATQVLNEVEEVKKEYPDAYVRVIGFDNMRQVQCVSFIAFRPPGXEESGKA

SEQ ID NO: 4391 - protein, 170 aa, Zea mays
MAAFLRSKCSPVGRTLMGSLGNSLFGAANSSVGAITRPSHCDAISQQIRTFIQMRTNLKVVDNSGAKRVMCIQSLRGKKGARLGDMIIGSVKEAQPRGKVKKGDVVYGVVVRAAMKKGRSDGSEVQFDDNAVVLVNKKGELIGTRVFGPVPHELRKKKHLKILALAEHIV

SEQ ID NO: 4392 - protein, 487 aa, Sinorhizobium meliloti 1021
MQRFQCYINGEFADGEARFESIDPTTGRAWAEMPEAREADVNRAVEAARIALHDQPWSTLTATQRGKLLYKLADLVAENAGRLAELETRDTGKIIRETSSQIAYVADYYRYYAGIADKIEGSYLPIDKPDMDVWLRREPIGVVAMVVPWNSQLFLSAVKIGPALAAGCTMVVKASEDGPAPLLEFARLVHAAGFPAGVVNIVTGFGPSCGAALSRHPQVDHIAFTGGPETARHIVRNSAENLASTSLELGGKSPFIVFADADLESAANAQIAGIFAATGQSCVAGSRLIVEKSVKDRFLQILKAKAETIRIGSPLEMSTEVGPLATERQSNHVKTLVARSLAAGAKLVTGGTAPEGAGFYYRPTILDCDGSASPSLENEFFGPVLSVLSFETEAEALHLANDSRFGLAAGVFTQNLTRAHRLMKGIRAGIVWVNTYRAVSPVAPFGGFGLSGHGREGGLEAALDYTRSKTVWLRTSDDPIPDPFVMR

SEQ ID NO: 4393 - protein, 181 aa, Triticum aestivum
  misc_feature (94)..(94): Xaa can be any naturally occurring amino acid
MAGVGRNMVAPLLVLNLIMYLIVIGFASWNLNHFINGLTNRPGVGGNGATFYFLVFAILAGVVGAASKLAGVHHVRTWRGDSLATSASSSLVAXAVTALAFGLACKEIHIGGYRGWRLRVLEAFVIILVFTQLLYVLALHSGLFGNQFGGNHAGGYPAEHGAYGAGDPHNKGMGTGGVARV

SEQ ID NO: 4394 - protein, 174 aa, Methanosarcina acetivorans C2A
MATGPRYKVPFRRRREGRTNYHLRLKLLLSRQDRVVVRKSSRNVQIQLIAPTPDGDITYSSAVSNELAKYGYTGATGNTTAAYLTGLLFGLKSLQKGYEGGILDIGLQASSAGSRVYAALKGVVDSGFEIPCSPEVFPPDERIRGEHIAGYREESSDLPEQFEATKEKIFAEFS

SEQ ID NO: 4395 - protein, 133 aa, Glycine max
RISSHVVTTVNRAGAGLVVPLTGLKSMAGFPTGKTNIAIPSIVGTGGGVHCMQGGPPIGRKKFGTFSYWPDLVDAQLAKEVESFLRKGWIPCLEFGWEHGFGFRGPTSLPGSFDGPLWTMWKLPMLGCTDAFK

SEQ ID NO: 4396 - protein, 457 aa, Iris hollandica
MVGILVYVALFILSLLLFLTAAAKLHNSKSKIKNQAPSPPSLPVVGHLHLLKKPLHRSISLLSARHGPILLLRFGSRPALAVSSLPLAEECLSGKNDLAFANRAHFPHEAAPLQLLTLGSANYGPHWRMLRRISAVELLSSHRINSFSQLRSEEVHSMISTLFRESSDKELNRVELKSKLFELAMNNMMRMIFGKDLASSEGAGRFREMVKESHSLLGASTRLGDFFPFLGWMDWRARRMVLRLVRRRDEFLQSLIDAHARKMEEVEEKTMIRVLVELQKSNRESNNDEGFMLKPLIIGLLQAGTDTSSDTIEWAMSLLLNNRDKLKKARDEIDARVGKERLLRESDLPNLPYLQCVITETLRLYPAAPLLVPHESAEECTVGGYAVPQGTMLLVNAYAIRVVGIVLGTLIQCFEWERVGEEEVDMTEGSGLTLPRANPLEAICRPRQSMISVLAGL

SEQ ID NO: 4397 - protein, 178 aa, Glycine max
MAESDNDSGGAQNAGNSGNLSELSPREQDRFLPIANVSRIMKKALPANAKISKDAKETVQECVSEFISFITGEASDKCQREKRKTINGDDLLWAMTTLGFEEYVEPLKIYLQRFREMEGEKTVAARDSSKDSASASSYLEPLEPQGHVYGSAYHHQVPGGAIMGGSAYPGGGSNARPR

SEQ ID NO: 4398 - protein, 428 aa, Gloeobacter violaceus PCC 7421
MENRFLNIFPGLSEERAIELLYTPMAQLEDASERYIAAAHLVNFPSERAIDALLAAVENRDSALDNRIVRRKAVETLGRLKVERALPVIRASLQDEDNYLVENAAWAIGEIGCSDPEILEELTALLARPRQSYRTIIQTLAKLGYTPATGRIAAFEQSPEPPIASAAITAVGRLSGERAGLERLLPFLQHPNVNARRGVIQDLMDSEYFEAIPRIAACPVSAVFRLRGIRHLADAGVPIGAVSFQQVESGLDRVIVDHPRFLEPVHRYERTPHLEELIEELYSTDFGRCYLATQTIIDHYPDAGPALVASFEAAGHNDYGAHYHIVKLLGWLRFGEAREIVVGALHDRRPQFMKSRSAAAIALAELGDTRVPADLRSCLDSFIWELKYACLIALEHLEDPTGAQIALQDSDWVVRAKAERQCTAPLAH

SEQ ID NO: 4399 - protein, 149 aa, Triticum aestivum
  misc_feature (123)..(123): Xaa can be any naturally occurring amino acid
GDDDGPEWMMEVGGAGATGKGKGGALDKNKKRFSEEQIKSLESMFATQTKLEPRQKLQLARELGLQPRQVAIWFQNKRARWKSKQLERDYSALRDDYDALLCSYESLKKEKHTLLKQLEKLAXMLHEPRGKYSGNADAAGAGDARASAA

SEQ ID NO: 4400 - protein, 193 aa, Exophiala dermatitidis
MVVATIKCVVVGDGAVGKTCLLISYTTNKFPSEYVPTVFDNYAVTVMIGDEPYTLGLFDTAGQEDYDRLRPLSYPQTDVFLVCFSVTSPASFENVREKWFPEVHHHCPGVPCLIVGTQTDLRDDPQVREKLAKQKMQPVRKEDGERMAKELGAVKYVECSALTQYKLKDVFDEAIVAALEPPPKKSSKKCTIL

SEQ ID NO: 4401 - protein, 497 aa, Synechococcus elongatus PCC 7942
MPRGVAPAFAGRKPKGWAWASTAVPDFQGGFKRLINRFQGSKLWLACVPLAATIAVFWGVAANAQGSADPVPSAQFLVNNLWLMVATVLVIFMNAGFAMVETGLCRQKNAVNVLAKNLIVFTLAATAYWFIGYSLMYGSPVVDGFLYFGKGGPLGFFFDPTVSAETIKNDGLISSLDFLFQAAFAGTAATIVSGSVAERIKFVDFIIFSLILTAVIYPIAGSWQWNVGSGWLNKAGFIDFAGSTVVHSVGGWAALIGAITLGPRMGKFQDGRPGALPGHNLAIATLGALILWIGWYGFNGGSVLAFNTAVPYVAVTTTLGGAAGGISATITSWSTSGKPDLSMVINGILAGLVGVTAGCDGFGMGGSFIVGLIAGVLVVFSVYTFENLKIDDPVGACSVHLVCGIWGTLAVGLFNLEKGLFYGGGFGQLGSQILGIISYGVWTVVASVIIWNILKALLGLRVSPEEELQGLDIGEHGMEAYSGFAKDASNALSSISE

SEQ ID NO: 4402 - protein, 301 aa, Zea mays
FVSISQCTGLSLQHPWAFTFGLLGNVISFMTFLAPIPTFYRIYKSKSTEGFQSVPYVVALFSAMLWIFYALIKSNETFLITINAAGCVIETVYVVMYFVYATKKGRMFTAKIMLLLNVGAFGAILLLTLLLFKGDKRVVMLGWICVGFSVSVFVAPLSIMRRVIQTKSVEYMPFSLSLSLTLSAVVWFLYGLLIKDKYVALPNILGFTFGVVQMVLYVVYMNKTPLPVADGKAAGKLPSAADEHVVVNVTKLSPGRLPPVTQMAAVPTKSCATEAAAPATLPSRDVVDVLVNRHSPAVHVT

SEQ ID NO: 4403 - protein, 463 aa, Glycine max
MVLTSTATHPDEQDQSLNYTFASRYVREPIPKFKMPEKSIPKDAAYQIINDELMLDGAPRLNLASFVTTWMEPECDKLIMASLNKNYVDMDEYPVTTELQNRCVNIIANLFHAPISDDETAVGVGTVGSSEAIMLAGLAFKRKWQTKRKAEGKPYDKPNIVTGANVQVCWEKFARYFEVELKEVKLKEGYYVMDPAKAVEMVDENTICVAAILGSTMTGEFEDVKLLDELLTKKNNETGWDTPIHVDAASGGFIAPFLYPDLEWDFRLPLVKSINVSGHKYGLVYPGVGWVVWRSKDDLPDELVFHINYLGSDQPTFTLNFSKGSSQIIAQYYQLIRLGFEGYKNIMENCWENARVLKEGIERTGRFNIISKDIGVPLVAFSLKDSSQHTVFEIADHLRKFGWIVPAYTMPPDAQHIAVLRVVIREDFSRGLAERLAADIEKVAKLLDTLPSPLTTKAVHITA

SEQ ID NO: 4404 - protein, 422 aa, Mycoplasma penetrans HF-2
MLTLLKNCLLSNSRKVDILIKDSIIEKISDTSLDSKTYNNKKIDAVFDMKCNLVMPGFIDAFSRIKKQTSYTTSDYETESRACAYGGITTFVDIPSAPISEKYYDAIIDKVNEAKENSHVNFGFVVSVSNLSNIVELEKIQDYSVGTIININARTVSDRIIDSEKLSEALKASKLVLLHLSGFDIDLFFSVCDDKFTKLVFYDITNENDLEKILSYKKEGYNIRTATSVNYLLFNRDMIANEYKRKTITTEYKLGTMLNNLGLWNAVKDRKIDIITSDHTPVSLIEKFETEQKGLPNFETMFSILFDSCYYKRIPITILEDLLCKNPAKVCGFKNKGEIKEGYDADLVVVNTTKRWWIKNEDIVSSARWTPFNDYRISGRVMMTFVNGQLVYNFINQMSPIRNVKAGKFAEFDKNLASRSAS

SEQ ID NO: 4405 - protein, 243 aa, Zea mays
GILNNWRASFKPQDPVQASHFQSDGRVLYCLELTKNFNSGDTDTMEQEEVAVLLSRLRFIQSTLFHTDVTYLEFLDRVHTSELKLRAQSLWEVPHPWLNLLIPRSSIRRFATEVFGRILKDSNNGPILLYPVNKSKWDNKTSVVIPDEEIFYLVGFLSSAPSLSGHGSIAHAMSLNSQIVEFCEEADIGMKQYLAHYTTQEQWKTHFGARWETFERRKHRYDPLAILAPGQRIFPKASLPLSL

SEQ ID NO: 4406 - protein, 238 aa, Oryza sativa
MCGIKQEMSGESSGSPCSSASAERQHQTVWTAPPKRPAGRTKFRETRHPVFRGVRRRGNAGRWVCEVRVPGRRGCRLWLGTFDTAEGAARAHDAAMLAINAGGGGGGGACCLNFADSAWLLAVPRSYRTLADVRHAVAEAVEDFFRRRLADDALSATSSSSTTPSTPRTDDDEESAATDGDESSSPASDLAFELDVLSDMGWDLYYASLAQGMLMEPPSAALGDDGDAILADVPLWSY

SEQ ID NO: 4407 - protein, 483 aa, Mesorhizobium sp. BNC1
MSGRKYPNPSLFINGRSVTGRGAKEEMVIDPSNEEVLGSYRSAAPEDLQELLDSAAAGFEKWRRTSAYERCEILHKVAAALRENAQEIGSLLTLETGKILSESITEVRGAADHFDWSGEEGRRLYGYTVPARRAESRLRVELEPLGIVFALIPWNFPLGTSARKVAPALAAGCSVILRPPEEAPATVEAFVRCCQEAGLPPGVLNMVLGSPKDVVEPLMASFSVRAVTFTGSTRVGKILIQQAADTVKHLVLELGGHAPAIVLPDADPKKVGVAAARAKFRNAGQVCVSPSRFIVHEKIVEPFTQAMVEETRSIKLGSGFDAGAQMGPLTTARQRERVERLVEDARSKGARILAGGQRPSGFNRGFFFEPTVLGDVPDTALIFEEEPFGPVAPIIPVRSVQEAVEKANAVKWGLAGYLFTSSLADATKVSEAMQVGMVGLNTFAAAAPEAPFGGVKESGYGRECGLEGIREFVSSKLIHTDIG

SEQ ID NO: 4408 - protein, 288 aa, Zea mays
  misc_feature (15)..(15): Xaa can be any naturally occurring amino acid
  misc_feature (23)..(23): Xaa can be any naturally occurring amino acid
ILLNTTCCTPAYLVXEIINKKGXEGAKADIWSYSKILFMLLCAYLPFYNANLEEMYRTIRTTDGKYPQGIYPELRRIIPKLLTPNPNNRITIDKLGKHPWFKKGYRPAVMLAQPHGSSSLKDVQVAFSNADHKDSSSKVEQPADSSLKPASLNAFDIISHSRGFDLSSLFEVDQEQKASNSRFMTQKPASAIVSKLEQIAETERFMVKKQDGLVKLQGSKQGRKGQLAIDAEIFEVTPAFHVVEVKKSAGDTLEYEMFCSKGLRPSLSDICWSSRSEENMAPSVVQPS

SEQ ID NO: 4409 - protein, 176 aa, Triticum aestivum
MAPTVMSSAATAVAPFQGLKSTAGLPVSRRSSSAAGLGSVSNGGRIRCMQVWPIEGIKKFETLSYLPPLSTEALLKQVDYLIRSKWVPCLEFSKVGFIFREHNASPRYYDGRYWTMWKLPMFGCTDATQVINEVEEVKKEYPDAYVRIIGFDNMRQVQCVSFIAFKPPGCEESGKA

SEQ ID NO: 4410 - protein, 479 aa, Medicago truncatula
MLSEKQGEETMMSSLNETIELNEEREEEKGASPGSGFKNFLWHGGSVYDAWFSCASNQVAQVLLTLPYSFSQLGMISGIIFQVFYGLMGSWTAYLISILYVEYRSRKEKENVSFKNHVIQWFEVLEGLLGPYWKAIGLAFNCTFLLFGSVIQLIACASNIYYINDHLDKRTWTYIFGACCATTVFIPSFHNYRIWSFLGLGMTTYTAWYMTIAAIVHGQVENVVHSGPKKMVWYFTGATNILYTFGGHAVTVEIMHAMWKPQKFKAIYFFATLYVFTLTLPSAIAVYWAFGDQLLDHSNAFSLLPRNAWRDAGVILMLIHQFITFGFACTPLYFVWEKVIGMHDTKSIFLRALARLPVVIPIWFLAIIFPFFGPINSAVGALLVSFTVYVIPASAHMLTYRSASARQNAAEKLPKVIPSWTLMYVINAFVVIWVTIVGFGFGGWASMTNFIKQVDTFGLFAKCYQCPPKLPASNHTMHH

SEQ ID NO: 4411 - protein, 291 aa, Candida albicans SC5314
MIRSYIRNIILAILSPLLTTPPPLILPPPYEKIIQEITTVLSINNYDDGSLAPIILRLAWHCCATYDVTTNTGGSNGATMRFVPEITDEGNYGLDIARAALEPIKQRYPAISYADLWTLAGKVAIEYMGGPTIIWKSGRVDYTNDRCTPSNGLLPFADKDANHIRKTFTRLGYNDQQTVALIGAHGVGRCHKRFSGWEGKWTRTPKTFSNQFYVVLLNETWSQGEVPETGKTQYFNADKSLIMLNTDMELIRDKSYLHWVEIYAKDEPKFFHDFSSAFAKLLELGIKRETL

SEQ ID NO: 4412 - protein, 490 aa, Sinorhizobium meliloti 1021
MTISETLLVKLKDPSLAVDKGLIGAEWLDRSDSGKTFDVSNPATGEVIAILPDMSRSETARAIDAAHAAQRAWAEKTGKERAAVLRNLYDLVVANADDLATILTMEMGKPLTEAKGEILYGASYVEWFGEEAKRVYGDTIPGHQPDKRIIVLKQPIGVVAAITPWNFPNAMLARKLAPAAAAGCAVVSKPAAETPLSALALALLAERAGLPAGVFNVILSTDSAEVGKEMCANDKVRKLTFTGSTNVGKILMRQGADQIMKLGLELGGNAPFIVFDDADLDAAVEGAMVAKYRNNGQTCVCANRIFVQAGIYDAFAARLTAKVSEMTIGDGFEPDVDAGPLISEKALAKVEEHIRDAVTKGADLVLGGNARGGLFFEPTVLTGATMDMKIAGEETFGPVAPLFKFETENEVVSMANKTEFGLASYFYSKDVSKVFRVAEALEYGMVGINTGLISTEVAPFGGVKQSGQGREGSKYGIDDYVETKYLCLSI

SEQ ID NO: 4413 - protein, 321 aa, Aquifex aeolicus VF5
MRIGILTAGGDAPGMNAVIRAVVRSAEREGHEVIGIKRGYKGLIEGDFIKLTSRDVGGILDRGGTILLSSRDPRYKKLEYREKAYKNLNEQGIEALIILGGEGTLAGAKLTAEETGIPVIGVPCTIDNDVGGTEYCIGYDTALRNAVDAIDKIRDTASSHERIFIVEVMGRNRGFIAVEAGLATGAELILIPEERFPREQIPEEIEKAKKLGKLHFIIVLAEGYCRAKELEDFLLEKIGDKYGEIRSTVLGHIQRGGIPTHFDRIMGTKFGVVAYESLIAGERSGFVAYEKGKFYIEDFEKAQEYKPIDREAYKLNTRLAI

SEQ ID NO: 4414 - protein, 149 aa, Zea mays
  misc_feature (69)..(69): Xaa can be any naturally occurring amino acid
ASFPVSRKQSLDITSIASNGGRVSCMQVWPPINMKKYETLSYLPDLSDEQLLSEIEYLLKNGWVPCLEXFETEHGFVYRENHKSPGYYDGRYWTMWKLPMFGCTDATQVLAEGQEAKKAYPQAWVRIIGFDNVRQVQRIRFIGYKPEGY

SEQ ID NO: 4415 - protein, 218 aa, Ipomoea batatas
MGRGKVEIRRIEKSTNRRVTFWKRRNGLLKKAMEMGILCDAEVGLMIFSSTGKLHEFATTSIRSVIERYNKTQGDGLQSPLDPTLELKFWQIKVAILRKQLHNMQEDHRKAMGEVYGLSVKDLLNLENQLEMSMSSIIMKKEQLLIDQILELTHQQRSIVLQENFELFNKFQAYGTSDPNAVNGDTISPYDFTISEESQGHIHFQLPQNFSDLARALY

SEQ ID NO: 4416 - protein, 411 aa, Rickettsia sp. DnS28
DSEFAELKIRGKIFKLPILKASIGEDVIDISRVSAEADCFTYDPGFMSTASCQSTITYIDGDKGILRHRGYDIKDLAEKSDFLEVAYLLIYGKLPSGEQYNNFTKQVAHHSLVNERLHYLFQTFCSSSHPMAIMLAAVGSLSAFYPDLLNFKEADYELIAIRMIAKIPTIAAMSYKYSIGQPFIYPDNSLDFTENFLHMMFATPCTKYKVNPIIKNALNKIFILHADHEQNASTSTVRIAGSSGANPFACISTGIASLWGPAHGGANEAVINMLKEIGSSKYIPKYIAKAKDKNDPFRLMGFGHRVYKNYDPRAAVLKETCKEVLKELGQLDNNPLLQIAIELEAIALKDEYFIERKLYPNVDFYSGIIYKAMGIPSQMFTVLFAIARTIGWMAQWKEMHEDPEQKISRPR

SEQ ID NO: 4417 - protein, 283 aa, Schizosaccharomyces pombe
MSESQTESTTVTLTNGMVIPRIGFGAFMLKYNECYGLVTQALDSGYRHIDTAAVYGNEDICGKAIVDWCEKNNVKRTDIFLTSKLANCSDYYSTRAAIRSSLHHLGTYIDLFLIQSPAGGKKSRIASWKAMEEFVDSGDIRSVGVSNYGVKHLQELYASNPKFYPCVNQIELHPFLSQDDIVKYCQSHDIAIEAYSPLTHGIRLNDEKLVPIAKKLNISVAQLLIRWSLQKGYIPIIKSTKKEHMLSDLDVFNFTIPDDVVQELSSFDEHWHAGTTYDPTVCD

SEQ ID NO: 4418 - protein, 321 aa, Mesorhizobium loti MAFF303099
MMEMAMTLDPDALRALVIGRVAGGEPFEKGSVAAARAAYNASFPTQQGEHEPVAASQERQTDGPNGPVKIRVHRGIGAPRAGARAVLYLHGGGWVIGNLSSHDEICRWLANLSNAVVVYPDYRLAPEHKFPAGLEDCTAALRFMAENAGELGIDPARISVAGDSAGGNLAAVLALLARDRLVPRLAAQVLIYPNTDARQTADSYRRFGDGFGLTAATMAWFRDHYVRTPNDITDWRVSPLLASSLAGAAPAFVVIAGHDILADEGTAYAERLRVAGVPLVLRPWPGQIHGFVSMGRHILAARQAVSEAAAWLQLQTRVQAD

SEQ ID NO: 4419 - protein, 411 aa, Rickettsia sp. RpA4
DSEFAELKIRGKIFKLPILKASIGEDVIDISRVSAEADCFTYDPGFMSTASCQSTITYIDGDKGILRHRGYDIKDLAEKSDFLEVAYLLIYGELPSGEQYNNFTKQVAHHSLVNERLHYLFQTFCSSSHPMAIMLAAVGSLSAFYPDLLNFKEADYELIAIRMIAKIPTIAAMSYKYSIGQPFIYPDNSLDFTENFLHMMFATPCTKYKVNPIIKNALNKIFILHADHEQNASTSTVRIAGSSGANPFACISTGIASLWGPAHGGANEAVINMLKEIGSSEYIPKYIAKAKDKNDPFRLMGFGHRVYKNYDPRAAVLKETCKEVLKELGQLDNNPLLQIAIELEAIALKDEYFIERKLYPNVDFYSGIIYKAMGIPSQMFTVLFAIARTIGWMAQWKEMHEDPEQKISRPR

SEQ ID NO: 4420 - protein, 271 aa, Glycine max
MFSKLQPQHQQQHQPFQFSRECQTSEDDDSRSSGGPNTAVAQKSVLGGGGCSDGATIEVVRRPRGRPPGSKNRPKPPLIITREPEPAMSPFILEIPGGSDVVEALARFSRRKNTGLCVLTGSGTVANVTLRQPSFSPDGATVATVTFHGRFDILSMSATFLHHASPAAIPNAFAVSLSGPQGQIVGGFVAGRLLAAGTVFVIAASFNNPSYHRLSSEEEAQNNSGGGAGDAQSPPVSGGGVESGHVPAESFMYSCHLPSDVIWAPTPRPPF

SEQ ID NO: 4421 - protein, 371 aa, Bacillus cereus ATCC 14579
MTVIRGLEGVVATTSSVSSIIDDTLTYVGYNIDDLAENATFEEVVYLLWHRKLPNEKELAEFNEIVSEYYKVPGEILTYLKQVDLKIAHPMSVLRTAISMLSLYDESAEIMDEKSNYLKAVKLQAQVGTLVAAYARIRKGLDIVEPRKDLSLAANFLYMLNDREPNEVEIEAFDKALVLHADHELNASTFTARVCVATLSDVYSGITAAIGALKGPLHGGANENVMKMLTEIGEEENVESYIHNALQNKVKIMGFGHRVYEQGDPRAKHLREMSKRLCVLLGEEKWYNMSIKIEDIVTKEKGLPPNVDFYSASVYHCLGIDHDLFTPIFAISRMSGWLAHILEQYENNRLIRPRADYNGPTHQVYVPIAQR

SEQ ID NO: 4422 - protein, 502 aa, Corynebacterium efficiens YS-314
MTAVIPAALQRREQLNLPYTHVDDFYINGAWVTATGEKRNPVVDPATGQEWGSVPEAGQVELDHAVGAAREALPGWGSLTAADRAEYLVRIAEEIEKRAEVLALTNTRENGSPISETRGAAANAAGIFRYFATLAPFLDDPDIRPFPAGGAESLVDKDPIGVCALIAPWNFPINLVVIKLAPALLAGCSVVIKPASPTPLSIRFIIEAVEAAGVPAGVINLLTGSGRFGDAMVRHPGVNKVAFTGSTPVGRKIASACGELLRPVTLELGGKSSAIVLPDADMSVLSARLIRSCMRNTGQTCYISTRIIAPASRYEEVVQVVADTIAAGRQGDPLDEDTIFGPVATASQYATVMEYIESGHAEGARAVTGGAATAGLTGGLENGVFIEPTVFADVTPDMRIAAEEIFGPVISILRYDDSAGVEEAIAIANNTEFGLGGLVFGADEDRALDVARRVDSGSVGINFFGSNHSAPFGGRHDSGMGVEYGIEGLSAYLSYKSIHRMV

SEQ ID NO: 4423 - protein, 193 aa, Triticum aestivum
  misc_feature (117)..(117): Xaa can be any naturally occurring amino acid
MAPTVMASSATSVAPFQGLKSTAGLPVSRRSNGASLGSVSNGGRIRCMQVWPIEGIKKFETLSYLPPLSTEALLKQVDYLIRSKWVPCLRFKQVGSSSREHNASLGYYDGRYWDMWXLPISGAPTHTSVNEVEESRRIPDAYSASSDRHIASACVSSCLNHGLKIRKANSYHTGIINAFSLHPKCLVPLLLMS

SEQ ID NO: 4424 - protein, 229 aa, Oryza sativa (japonica cultivar-group)
MARPLYPMMLESPQLRWAFVRKVYAILSIQMLLTIAVASVVVFVRPVALFFVSTPAGFALYIFLIILPFIVLCPLYYYYQRHPVNLLLLALFTAAISFAVGLTCAFTKGEVILESAILTAAVVVSLTAYTFWAARRGHDFSFLGPFLFAAVMILMVFALIQVFFPLGRVSLMIYGGLAALVFCGYIVYDTDNLIKRYSYDEYVWAAVALYLDVINLFLSLLTLFRASDS

SEQ ID NO: 4425 - protein, 251 aa, Arabidopsis lyrata
MGRGRVQLKRIENKINRQVTFSKRRAGLLKKAHEISVLCDAEVALVVFSHKGKLFEYSTDSCMEKILERYERYSYAERQLIAPESDVNTNWSMEYNRLKAKIELLERNQRHYLGEDLNAMSPKELQNLEQQLDTALKNIRTRKNQLMYESINELQRKEKAIQEQNSMLSKQIKEREKILRAQQEQWDQQNHGHNMPPPPPPQQHQIQHPYMLSHQPSPFLNMGGLYQEEDPMAMRRNELELTLEPVYNCNL

SEQ ID NO: 4426 - protein, 218 aa, Oryza sativa
MEVEEAAYRTVWSEPPKRPAGRTKFRETRHPVYRGVRRRGGRPGAAGRWVCEVRVPGARGSRLWLGTFATAEAAARAHDAAALALRGRAACLNFADFAWRMPPVPASAALAGARGVRDPVAVAVEAFQRQSAAPSSPAETFANDGDEEEANKDVLPVAAAEVFDAGAFELDDGFRFGGMDAGSYYASLAQGLLVEPPAAGAWWEDGELAGSDMPLWSY

SEQ ID NO: 4427 - protein, 444 aa, Agrobacterium tumefaciens str. C58
MDNPSRSNSTSLDSYWMPFTANRQFKANPRLLTSAEGMYYTSNDGRQVLDGTAGLWCVNAGHGRQQIASAVKHQLSTLDYAPSFQMGHPVAFEFAERLAEIAPGPEGGKLDRVFYTGSGSESVDTALKIAIAYQRAIGQGTRSRLIGRERGYHGVGFGGISVGGLVNNRRVFPQIPADHLRHTHDLARNSFVKGQPEHGAELADDLERLVALHGAETIAACIVEPVAGSTGVLVPPKGYLERLRAICDKHGILLIFDEVITGFGRMGSSFASNYFGVTPDIVTTAKGLTNGAIPMGAVFTSRKVHDALMHGPENQIELFHGYTYSGHPVACAAGIATLDIYRDEGLFTRAAELQDAWHDAIHSLKSAANVIDIRTIGFIAGIELQSREGAVGARAYDVFVDCFERGLLIRVTGDIIALSPPLIAEKSHFDDIVSILGDALNRAV

SEQ ID NO: 4428 - protein, 330 aa, Candida albicans SC5314
MSNNIEDDSISVDNIVDRLLEVRGSRPGKQVTLTENEIRFLCTKAREIFIQQPILLELEAPIKICGDIHGQYYDLLRLFEYGGFPPEANYLFLGDYVDRGKQSLETICLLLAYKIKYPENFFILRGNHECASINRIYGFYDECKRRFNIKLWKTFTDCFNCLPIAAIIDEKIFTMHGGLSPDLNSMEQIRRVMRPTDIPDVGLLCDLLWSDPDKDITGWSENDRGVSFTFGPDVVSRFLQKHDMDLICRAHQVVEDGYEFFSKRQLVTLFSAPNYCGEFDNAGAMMSVDESLLCSFQILKPADKKPRYAPANVANNRPGANQRKPKKAVK

SEQ ID NO: 4429 - protein, 204 aa, Arabidopsis thaliana
MSQLGDLLRESEDGTRSERTMMMSLLEEDQINGGDRTMSKWTTLKQRLRFDWVGCCGKPLTLRLRQAETPIVVDDDDDEEESQNQVVDFSDPGTGTELDCLTRGSTRNLAEALAEERLAHVTEEETAVTKVPLMRLLAESDGCDSTTTWLGNDPLCCVCMGREKGAAFIPCGHTYCRVCSREIWMNRGTCPLCNRSIFDVLDLY

SEQ ID NO: 4430 - protein, 197 aa, Bacillus subtilis
HNPNIIWHPAAISKSDRQSLNGHKSCVLWFTGLSGSGKSVLANAVDEKLYRKGIQSYVLDGDNIRHGLNKDLGFQTGDRIENIRRIGEVAKLFVDSGQMILTAFISPFREDRDMVRALFPKGEFFEIYVKCPLHVCEQRDPKGLYKKARNGEIKHFTGIDSPYEAPLSPDFIIESDQTSISDGADLIINALQNRGII

SEQ ID NO: 4431 - protein, 205 aa, Auxenochlorella protothecoides
ARPPDDGTSEEEKTTLQRHIEFWDPKGTGVIWPRDVYAGFRRLGFSRAFSTAITPIISGGLSFNTQTSKIPDPRLPVYVERIHLGIHTSDTGSYDAKGHFDSKRFDEVLAQYDIGNKGGLTQEEVKALTRGQREPKDPKGWTGSWIEWNISFHLAARESPDGKLPLYKEDLLGIMDGTLFPKISKEVAEGTWVRHGHLSPGLRRP

SEQ ID NO: 4432 - protein, 391 aa, Glycine max
MSLTLQTPPSTTLSSASPIHRTITRYTTFSFSLRPPTTLHFNPHRSLPLIRASNSSINAASTTELDAVSAFSEIVPDTVVFRCISKIFLPILLGICGLPDTIFRNAVEMALADSECYGLENPNARLSCFVNKAFANIGSDMAKLVPGRVSTEVDARLAYDTHAIIRKVHDLLKLYNDSNVPPQRLLFKIPSTWQGIEAARLLESEGIQTHLTFVYSFAQAAAAAQAGASVIQIFVGRIRDWARNHSGDTEIESAQLRGEDPGLALVTKAYNYIHKYGHKSKLMAAAVRNKQDLFSLLGVDYIIAPLKVLQSLKESVASPDEKYSFVRRLSPQSAAKYTFSDEELVRWDEDSLSKAMGPAAVQLLAAGLDGHADQAKRVEELFGKIWPPPNV

SEQ ID NO: 4433 - protein, 501 aa, Magnaporthe grisea 70-15
MASAPEKDRHTFFAGKVQPSPDSPGTFTTVNPATAQPIATIHTSSRASVDAAVDAARAAFPAWSSTPAPERAQILQRAVAILRERNDALARVETLDTGKAFSETQAVDVVTGADVLAYYANLVASDGLNGESFRLRPGAWVYSSKEPLGACAAIGAWNYPIQIALWKSAPCLAAGNTLVYKPSEYTPLHAQYLADIYAEAGVPPGVFNVVYGAGDVGAQLSSHPKIAKVSFTGQVSTGRKVAGTAAGGLKSVTMELGGKSALVVLPDADVSQAADGAMMANFYSSGQVCTNGTRVFVPRALKEEFERAVLEKIVHVRAGDLFDANTNFGPLSSKVHYEKVVSYVRHGIEQDKARLLCGGIGQPRGVPKELGKGFWIEPTVFTDCTDDMRIVKEEIFGPVMSILTYDTLEEVVQRANATELGLAAGVFGKDLNQCHQVIAQLEAGITWINTWGESPAEMAVGGWKQSGIGVENGHKGLDAWVQNKSTLVEMGGAVPTVFAKI

SEQ ID NO: 4434 - protein, 238 aa, Oryza sativa (japonica cultivar-group)
MVCSNFHQQRKKYTEGRRHQPTGGEEGGGGSLLSVLANEDEQWRSWSHTREEEEPSAPGHTTLLDAGDDGWVLGPNLSVFTSLPDMWAIGQMFPIIPIQCLGERPAIDGVLSDLTSDSDGKVDHFISGRHSLPLHELPVHGTRGYYLGGTYQEALGGLHNLFGGPSVHEHEVFKQRTDGATAAALAKAFGAMPYLSFYPEAAAMARGESSGMSSDSEVSAAGVAEDDDEWEFMRGLIV

SEQ ID NO: 4435 - protein, 370 aa, Exiguobacterium sp. 255-15
MHVEKRDYYEVLGVARDASAAEIKRAYRKLARTYHPDVNKEADADQKFKELSEAYEVLSDDNQRARYDQFGHQDPSQGGGGFGGAEGFGDIFDMFFGGGRRQDPNAPRKGQDLQYVEEIDFMEAFSGVEKVITIPVEEDCGTCHGSGAKPGTHPETCKRCGGSGHINVEQNTMFGRVVNQTTCSTCHGRGQIVKEPCETCRGAGRVRKNKDVRVKIPAGIDNGQQIRLAGKGEAGVNGGPFGDLYVVVRVREHELFERVDDHIVMDMPLTFAQATLGDEIEVPTVHGKVSLKIPAGTQTGSRFRLRGKGMPNVRSGHHGDQYVNVVIITPKNLTDRQKELLREFNEISDEKGVEEQHEGVFSRIKTFFTG

SEQ ID NO: 4436 - protein, 309 aa, Glycine max
MAPGSSVFKEVLESHLMSSDYEMGKAKSEAKSNSTSTKSSIGLSGKSGISSNNGVYELLGCPVCKNLMYPPIHQCPNGHTLCSHCKVEVHNICPSCHHDLGNIRCLALEKVAESLELPCRYQSLGCHDIFPYYTKLKHEQNCGFRPYNCPYAGSECSVMGDIPTLVAHLKDDHKVDMHDGCTFNHRYVKANPHEVENATWMLTVFNSFGRHFCLHFEAFQLGSAPVYMAFLRFMGDDNEAKKFSYSLEVGANGRKLIWQGIPRSIRDSHRKVRDSQDGLIIQRNLALYFSGGERQELKLRITGRIWREE

SEQ ID NO: 4437 - protein, 319 aa, Bacillus cereus ATCC 14579
MKRIGVLTSGGDSPGMNAAIRAVVRKAIFHDIEVYGIYHGYAGLISGHIEKLELGSVGDIIPRGGTKLYTARCLEFKDPEVRLKGIEQLKKHGIEGLVVIGGDGSYQGAKKLTEQGFPCVGVPGTIDNDIPGTDFTIGFDTALNTVIDAIDKIRDTATSHERTYVIEVMGRHAGDIALWAGLADGAETILIPEEEYDMDDVIARLKRGSERGKKHSIIVVAEGVGSAIDIGKHIEEATNFDTRVTVLGHVQRGGSPSAQDRVLASRLGARAVELLIAGKGGRCVGIQDNKLVDHDIIEALAQKHTIDKDMYQLSKELSI

SEQ ID NO: 4438 - protein, 412 aa, Bacillus cereus ATCC 14579
MSTLREEALHMHKVHQGKLETVSKVKVENAKDLSLAYSPGVAEPCKEIYDDKSKVYEYTMKGNMVAVVTDGTAVLGLGNIGPEASLPVMEGKAVLFKSFAGVDAFPIALNTNDVDKIVETVKLMEPTFGGVNLEDIAAPNCFIIEERLKKETNIPIFHDDQHGTAIVTVAGLVNALKLVGKKMSDIKVVANGAGAAGIAIIKLLYRYGVRDIIMCDRKGAIYDGRPTGMNPVKDEVAKYTNKNRIEGSLADVVQGADVFIGVSAEGALTEEMVRTMNDDAIIFAMANPVPEIMPELAKAAGAAVVGTGRSDFPNQVNNVLAFPGIFRGALDVHATQINEEMKMAAVQAIAELVAEDELNADYIIPAPFDARVAPQVAAYVAKAAMETGVARRQVDPNEIAEKTKQLALIGKE

SEQ ID NO: 4439 - protein, 286 aa, Pseudomonas aeruginosa UCBPP-PA14
MSDYQETLYQGYGQRFSIDNMLHEVRTEHQHLVIFENARMGRVMALDGVIQTTEADEFIYHEMLTHVPILAHGAARRVLIIGGGDGGMLREVAKHKSVERITMVEIDGTVVDMCKEFLPNHSQGAFDDPRLNLVIDDGMRFVATTEERFDVIISDSTDPIGPGEVLFSENFYQACRRCLNEGGILVTQNGTPFMQLEEVRTTAARTDGLFADWHFYQAAVPTYIGGAMTFAWGSTREGLRRLPLETLRQRFRDSGIATRYYNADIHLGAFALPQYVLQAIGKQDND

SEQ ID NO: 4440 - protein, 254 aa, Zea mays
MAAKCYPTVSDEYLAAVAKARRKLRGLIAEKNCAPLMLRLAWHSAGTFDVATKTGGPFGTMKCPAELAHGANAGLDIAVRLLKPIKEQFPILSYADFYQLAGVVAVEVTGGPEVPFHPGRQDKPEPPPEGRLPDATQGSDHLRQVFSTQMGLSDQDIVALSGGHTLGRCHKERSGFEGAWTANPLIFDNSYFTELLSGEKEGLLQLPTDKTLLTDPAFRPLVDKYAADEDAFFADYAEAHLKLSELGFGEAGCC

SEQ ID NO: 4441 - protein, 144 aa, Nitrosomonas europaea ATCC 19718
MAITRYEPWGLLTQLQRELERARDDMATEGASAIAEWAPAVDIKEESDKFIVHADLPGVKPEAIDVTTENGVLTIKGEKQTEARTEKEGYKRVERTHGSFYRRFSLPDTADLGAISAVTKDGVLVVTIPKREAVQPKKVSVTAQ

SEQ ID NO: 4442 - protein, 138 aa, Pyrococcus horikoshii OT3
MGDKTKVQVSKLKPGRYIIIDDEPCRIVNITVSSPGKHGSAKARIEAVGIFDGKVRSIVKPTSAEVDVPIIDKKTAQVIAITPDTVQIMDMETYETFEVPIDTGVADEIRDQLKEGINVEYWETLGRIKIMRIKGEGE

SEQ ID NO: 4443 - protein, 152 aa, Brassica napus
MGGGVRGTERWFNVTKGFGFISPEDGREGLFVHPSAIKSDRYRPLNENDTVGFEVITGDEGRTKAGDLTPPGGGALAGGRRPADGGGDRGGGGGEGGGGDGGGGAAGGEAGGAGGEAAGGAGAGAGAGGGGCYKCGEEAAAATEEAAVAAVS

SEQ ID NO: 4444 - protein, 278 aa, Streptomyces avermitilis MA-4680
MSTKVPPITLNNGVEMPQLGFGVWQVPDDEAERAVATALEAGYRSIDTAAIYGNEEGTGKAIATAGIPRADLFVTTKLWNSDQGYDSTLRAFDVSLEKLGLDYIDLYLIHWPLPTRGQFVETYKAFEKIYADGRAKAIGVSNFLPEHLRTLIDATSVIPAVNQIELHPHLQQHAAREFHAEHGIATEAWSPLGSGKGLLEVPAIVAIARKHERTPAQVVLRWHIQLGNIVIPKSVTPSRIKENIEVFDFSLDDEDIAAISALNEDRRLGPDPATFDMG

SEQ ID NO: 4445 - protein, 508 aa, Zea mays
  misc_feature (180)..(180): Xaa can be any naturally occurring amino acid
  misc_feature (286)..(286): Xaa can be any naturally occurring amino acid
MKTSVVVAALAAVLFAAQSYASLAGASGPRVIIVGAGMSGISAGKTLWEAGVRDLLILEATGRVGGRMHKHNFGGINVEIGANWVEGLGGDQLNPIWPLVNSTLKLRNFYSDFDSVVGNVYKENGGGLYDEEYVQKRMDRAYEVEELGANLTKKMHPSGRDDISVLAMQRLFNHQPNGPXTTPVDMALDYFIYDYEFAEPPRVTSLQNTQPTPTNADFGEDNYFVADQRGYESIIHSIGSSYLSTDGNGKLKDRRILLNKVVRQITYNKQGVVVKTEDGSSYRADXYVVVSTSLGVLQTDLIQFKPQLPFWKIAAIYSFDMGVYTKIFLKFPERFWPVGEGKQFFMYASSRRGYYALWQSFEREYPGANVLLATVTDDESRRIERQSDDQTKAEVAEVLRDMFPAADVPGPDQIDVYVPRWWSDRFFKGSYSNWPVGVSRYEYDQLRAPVGRVYFTGEHTSERYNGYVHGAYLAGIDSANILINYIFKNEEYKVRGKYDVDDLIAQAR

SEQ ID NO: 4446 - protein, 297 aa, Yersinia pestis KIM
MRYAFPTQQLKDNVMQTVKLNNGIAMPLLGFGVFQMTNTAECERAVIDAIETGYRLIDTAASYQNETQVGNALKLSGIARDELFITTKLWLQDTYYEGAKAQFERSLNRLQLDYVDLYLIHQPYGDVHGAWRAMEELHQAGKIRAIGVSNFHPDRLADLMAFNKIIPAVNQIEVNPFNQQLHAVPWMQSRGIQPEAWAPFAEGRNGLFQNPVLTAIGEKYGKSVGQVVLRWIFQRGIVSLAKSVRKGRMEENINILDFELSAEDMLQIAALDTATSAFFSHRDPAMVEWLTGRKLDV

SEQ ID NO: 4447 - protein, 250 aa, Zea mays
MAKTYPVVSAEYQEAVEKARQKLRALIAEKNCSPLMLRLAWHSAGTFDVSSKTGGPFGTMKKPAEQAHAANAGLDIAVRMLEPIKEEIPTISYADLYQLAGVVAVEVSGGPVIPFHPGREDKPQPPPEGRLPDATKGSDHLRQVFGKQMGLSDQDIVALSGGHTLGRCHKERSGFEGPWTRNPLKFDNSYFTELLSGDKEGLLQLPSDKTLLTDPVFRPLVEKYAADEKAFFEDYKEAHLRLSELGYAEA

SEQ ID NO: 4448 - protein, 456 aa, Securigera parviflora
MCGILAVLGCSDDSQAKRVRVLELSRRLKHRGPDWSGLHQHGDCFLAHQRLAIVDPASGDQPLFNEDQSIIVTVNGEIYNHEELRKQMPNHKFRTGSDCDVIAHLYEEHGENFVDMLDGIFSFGLLDTRDNSFIVARDAIGVTSLYIGWGLDGSVWIASELKGLNDDCEHFETFPPGHLYSSKEREFRRWYNPPWFSESIPSAPYDPLALRQAFEKAVVKRLMTDVPFGVLLSGGLDSSLVASITARHLADTKAAKQWGAKLHSFCVGLEGSPDLKAGKEVADYLGTVHHEFQYTVQDGIDALEDVIYHIETYDVTTIRASTPMFLMSRKIKSLGVKWVISGEGSDEIFGGYLYFHKAPNKEELHKETCRKIKALHKYDCLRANKSTFAWGLEARVPFLDKEFINVAMNIDPENKMIKLDEGRIEKWILRKAFDDEENPYLPKHILYRQKEQFSDG

SEQ ID NO: 4449 - protein, 300 aa, Magnaporthe grisea 70-15
MASKPGDFDAVRKDIVSLLDQPEYDDGSAGPVLVRLAWHSAGTYDKSTDTGGSNGAGMRYEAEGGDPANAGLQNARQFLEPVKARHPWITYADLRTLAGVVAVRAMGGPEIPWRAGRTDFADDSRVPPRGRLPDATQGAAHVRDIFYRMGFDDREIVALSGAHSLGRCHPANSGFEGKWVNNPTRFSNQYFRLLLSEDWREKTVAGTGLKQFVAVDEVTGDELMMLPTDLSLTSDPVFARWVKVYRDDQDLFFADFAKVFDKLMELGIKRDAEGKVINKENVEGGYVSAPKKQGKIASKL

SEQ ID NO: 4450 - protein, 443 aa, Zea mays
MEDAVAADGKSVLQGRYELGRVLGHGNFGRVHAARDLRTGRSVAVKVVAKDKLERAGMAEQIKREIAVMKMVSHPNIVELHEVMATRSKIYLALELVRGGELFSRIARAGRVREDVARCYFRQLVAAVDFCHGRGVFHRDLKLENLLLDEVGNLKVADFGLSALAGHARSDGLLHTACGTPSYVAPEVLGGKGYDGAKADLWSCGVILYVLLVGSLPFHEDNLMVMYRKMQRGEFLCPPWVSADARKLIGELLDPDPSTRITVARLVETPWYRKPLPVLPPLNLKEPTPDARRATSDKEEPEVLNAFHLISFSEGFDLSPLFDQGRGGGVGRSSAGGIRFVTREAASSVVSRLESLVTGRGANMRVTKSGSRGVRLEAVSRGRSGARLAVAAEIFSVAPSVLLVDVKKDGGDTMEYRSFCSEELRPALKDIVWASSQDTPGAA

SEQ ID NO: 4451 - protein, 202 aa, Saccharomyces pastorianus
MATNITWHPNLTYDERKELRKQDGCTVWLTGLSASGKSTIACALEQLLLQKNLSAYRLDGDNIRFGLNKDLGFSEKDRNENIRRISEVSKLFADSCAVSITSFISPYRVDRDRARDLHKEAGLKFIEIFVDVPLEVAEQRDPKGLYKKAREGVIKEFTGISAPYEAPKAPELHLRTDQKTVEECAAIIYEYLVNEKIIRKHL

SEQ ID NO: 4452 - protein, 312 aa, Saccharomyces cerevisiae
MPATLKNSSATLKLNTGASIPVLGFGTWRSVDNNGYHSVIAALKAGYRHIDAAAIYLNEEEVGRAIKDSGVPREEIFITTKLWGTEQRDPEAALNKSLKRLGLDYVDLYLMHWPVPLKTDRVTDGNVLCIPTLEDGTVDIDTKEWNFIKTWELMQELPKTGKTKAVGVSNFSINNIKELLESPNNKVVPATNQIEIHPLLPQDELIAFCKEKGIVVEAYSPFGSANAPLLKEQAIIDMAKKHGVEPAQLIISWSIQRGYVVLAKSVNPERIVSNFKIFTLPEDDFKTISNLSKVHGTKRVVDMKWGSFPIFQ

SEQ ID NO: 4453 - protein, 421 aa, Novosphingobium aromaticivorans DSM 12444
MTADGKTVEMPVKSGTIGPDVIDIRKLYGQTGMFTYDPGFTSTASCDSALTYIDGDEGVLLHRGYPIGQLAEHSSFMEVSYLLLNGELPSQQELADFTRTITRHTMLHEQLATFYRGFRRDAHPMAIMCGVVGALSAFYHDSTDISDPTHRKISSHRLIAKMPTIAAMAYKYSVGQPFVYPDNKLSYTGNFLKMTFGVPAEEYEVIPAVEKAMDRIFILHADHEQNASTSTVRLAGSSGANPFACIAAGIACLWGPAHGGANEAALNMLKEIGTPDKIPHYIERAKDKNDPFRLMGFGHRVYKNYDPRATVMQQTVREVFDALKVNDPLFETALRLEEIALNDPYFVEKKLFPNVDFYSGIILSAIGFPTTMFTVLFALARTVGWVAQWNEMISDPGQKIGRPRQLYTGPTQRDYVPLASR

SEQ ID NO: 4454 - protein, 470 aa, Sulfolobus solfataricus P2
MMSLEVIEVRSPSNLKVIGTVKRMSKDEVRGEIEEAYKGFEIISRMPLYKRTAILRKISEILEREQERLARLLAMEAGKPISDSRVEVLRASRLFRQAAEEVGIVLEGKNYRVDAYEYPPGNENRIVLSTREPIGVVTAILPFNFPINSFAHKVAPALAVGNSVVVKPSINTPLAAVEMKKILVEAGLPDSAVRVVTGYSSEIGDEIITHPLVGLITLTGSTQTGLKIASKAISLGKRIIMELGGSDPIIILEDANIERASSIAVRARFEYAGQNCNAGKRIIVRQEVYDKFVKAFNEKAKALKVGEPLDETTDVGPVINKESVENLNSVLEDAKVKGGRVEILNRGPESGSFFPLTMVTNPSLDMLVLKSEVFGPIVPIVSVKSDEEAIRIANSTEYGLQSAIFTNDVNRALKLSRELKFGAVIINDSTRLRWDSLPFGGFKKTGIGREGVRETMLEMTENKLIAITLL

SEQ ID NO: 4455 - protein, 84 aa, Glycine max
MEYQRQRSHQSQGRSRWVPASYFSVESLLLLSCLTASLLILPLLLPPLPPPPFLLLLLPIAILLVLIISAFMPSNVRDITHTYM

SEQ ID NO: 4456 - protein, 204 aa, Xylella fastidiosa Temecula1
MHLISNDFKNGQPIPVECAAGQTDGFAPNRNPHLAWDNVPENTRSFALLCIDPDVPSIPETIGRTDMEIPVTQPRIDFVHWVMTDISTDLRMIAHGSCSDGFVVGGKTMPPGPAGTHQGLNDYTKFFANTPEMAGDYYGYDGPYPPFNDLRIHRYLFRLFALDLEHLPLHKRFDGPTLLRTIQGHVLTEATLYGTYTLNPKAQK

SEQ ID NO: 4457 - protein, 367 aa, Malus x domestica
MGKGGQSCNGVVRDAKPVEQENMAVWLVDVNTIKILPFKLPAIGPNDVRIRIKAVVICGSDVHYLKTMKCADFEVKEPMVIGHECAGIVDTVGSEVKHLVPGDRVGEPGISCARCQQCKGGRYNLCPDMKFFATPPVHGSLANQIVHPADLCFKLPENVSLEEGAMCEPLSVGVHACRRANVGPETSVLIIGAGPIGLVSVLAARAFGAPRIVIVDMDDKRLAMAKSLGADEAVKVSTKMEDLDDRVAEIKKAMISEVDVTFDCVGFNKTMSTGLNATRPGGKVCLVGMGHGVMTVPLTPAAAREVDVVGVFRYQNTWPLCLEFLRSGKIDVKPLITHRFGFTEKEVEEAFATSARGGNAIKVMFKL

SEQ ID NO: 4458 - protein, 358 aa, Medicago sativa subsp. x varia
MENGKVHVVKPQSEARLAILELAHIMSVPTSLVAVLKMKVPEAIWQGGKNTPLSASQILSIVRPNGGGDAENLQRILRLLTTYAIFAEDLSSNGKRKYSLTDIGKALVPDDDGLSYATYVLQHYQDQYLRAWPLVGDAVEDASVEPFEKLHGEGAYAYCMKRPDEMSLFYASMSGLSMPHMNEMLEKYDGFKGVETLVDVGGNSGVILNMIMNKYPNILKGINFDLPDMISSAPQLPGITHVGGDALESVPAGDAIFTKWTMLTWTDEECKKVLQNCYKALPVNGKLIVCEPVSPELTDESQRTRALLSGDIFIMTMYRTKGKHRTEEQFKQLGISTGFLRFRAFHIDPYFPVLEFQK

SEQ ID NO: 4459 - protein, 493 aa, Actinobacillus pleuropneumoniae serovar 1 str. 4074
MKDLNVFDKNYGLLINGKWTQGSGNDLLPSYNPANGEVLAHFVDATDADVDAAVKAAQEAFKSWRKTTVAERAAILNKIADVIDENSELFALQETLDNGKPIRETRAADIPLASDHFRYFASAIRAGEGSLNQINQEELSLVLREPIGVVGQIIPWNFPFLMAAWKIAPALAAGCTVVIHPSSTTSLSLLSFAQKINHLLPKGVLNVITGKGSKSGEYMLHHKGFNKLAFTGSTEIGRHIAISAAELLIPATLELAAKSANIFFDDMPFDKALEGAQKGILFNQGQVCCAGSRIFVQEGIYDKFVAALAEEFKKVKVGLPWEDDTQMGAQVNAGQLNTILKYVKIGEEEGCRIITGGRKVLSDNLACGEFVEPTLIESKDNNSRIAQEEIFGPVATVIKFKTEEDVIRMANDSEYGLGGGVWTKDINRALRVSQAIETGRVWVNCYNILPAGAPFGGYKSSGIGRETHQMMLDAYTQVKNIYISTREEREGMY

SEQ ID NO: 4460 - protein, 205 aa, Ralstonia solanacearum GMI1000
MHASIPVSPSLPDTQRFALAPSEAFTIWMTGLSGAGKSTLAQEMQSRLRQHGRACYVLDGDVLRDGLSSDLGFSREDRCEQVRRVAHVARILNEAGVVAIVALVSPYRADRQLAHEIIGAGAMHEVWICTPLQVCQARDPKGLYQRASAGLLPAMTGVAAPYEPPPESTLRIDTSRHDVSTCASRILDAVGIYPCMNGSQHDVRR

SEQ ID NO: 4461 - protein, 263 aa, Escherichia coli
DRVNIEPGVPCGHCRYCLEGKYNICPDVDFMATQPNYRGALTHYLCHPESFTYKLPDNMDTMEGALVEPAAVGMHAAMLADVKPGKKIIILGAGCIGLMTLQACKCLGATEIAVVDVLEKRLAMAEQLGATVVINGAKEDTIARCQQFTEDMGADIVFETAGSAVTVKQAPYLVMRGGKIMIVGTVPGDSAINFLKINREVTIQTVFRYANRYPVTIEAISSGRFDVKSMVTHIYDYRDVQQAFEESVNNKRDIIKGVIKISD

SEQ ID NO: 4462 - protein, 182 aa, Brassica napus
  misc_feature (11)..(11): Xaa can be any naturally occurring amino acid
  misc_feature (171)..(171): Xaa can be any naturally occurring amino acid
MAETLKEDSIXFREVWNDNLLEEFALIREIVDKFTYVAMDTEFPGVVLKPVETFKHNNDLNYRTLKENVDLLKLIQVGLTFSDEDGNLPTCGADDKFCVWQFNFREFNIGEDIYASESIELLRQCGIDFKKNLERGIDVARFGELMMSSGIVLNDSISWGTFHGGYDFGYXLVKLLTCKELP

SEQ ID NO: 4463 - protein, 122 aa, Buchnera aphidicola str. Sg (Schizaphis graminum)
MSITKEQILEAVSEMSVMNVVELISAMEKKFGVSANMSVNTNNNSEKSTIEEKTEFDIFLKSIGPNKVSVIKSVRSATGLGLKEAKDLVESAPTVLKENMSKNDAESLKKTLEDAGAEIEIK

SEQ ID NO: 4464 - protein, 315 aa, Glycine max
MAAAIEIPTIVFPNSSAQQRMPVVGMGSAPDFTCKKDTKEAIIEAVKQGYRHFDTAAAYGSEQALGEALKEAIHLGLVSRQDLFVTSKLWVTENHPHLVLPALRKSLKTLQLEYLDLYLIHWPLSSQPGKFSFPIEVEDLLPFDVKGVWESMEECQKLGLTKAIGVSNFSVKKLQNLLSVATIRPVVDQVEMNLAWQQKKLREFCKENGIIVTAFSPLRKGASRGPNEVMENDVLKEIAEAHGKSIAQVSLRWLYEQGVTFVPKSYDKERMNQNLHIFDWALTEQDHHKISQISQSRLISGPTKPQLADLWDDQI

SEQ ID NO: 4465 - protein, 330 aa, Candida albicans SC5314
MWSKEEKKQKREKKMYVQPQQRTYYLLLMFRLFARRNYSIHWRFKDVCPSPRYDTGCTYCQPEFPTNLAIDFDKNLNKTGAIPTKHVMVLTNPINQISELPSKTEFIPNSIPSEITKYRTMIQTDDQRVTISVIHLNNNRHQQILDQYNIKPGSSQQLVFLYPSMKIIRFDLSVSDQFVKKYLYSKPTAPVYNPFVQTKPSAPNNDLFDSIIVDESNFIEDELDKDLLVICGHAKRDLRCGIIAPQLESEFNQVLVRHNLQDTIYTGQVSHVGGHAYAGNVLYYPKDCQTSKDFIWYGRVFPKDVQGIVESTIINKEIIKDLFRGDIEAY

SEQ ID NO: 4466 - protein, 425 aa, Vibrio vulnificus YJ016
MSDDNSQQMTPEEVLRQQALDYHALPTAGKIAVALTKPAETAKDLALAYSPGVAEPVREIAQNPDNVYKYTSKGNMVAVISNGTAILGLGNLGPLASKPVMEGKALLFKRFAGLDSIDIEVKHRTIDEFVDTVANIADTFGGINLEDIKAPDCFEIEKRLIERCDVPVFHDDQHGTAIVTAAGMLNAIELQGKKLNECIIVCLGAGAAAVACMELLIKCGAMREKIYMLDRKGVIHTRRDDLNEYKQLFANNTDKRTLEDVISGADLFLGVSGPNLMPAEALKLMADKPVVFACSNPDPEIKPELAHEVRSDLIMGTGRSDYPNQVNNVLCFPFIFRGALDVRASEINDEMKLAAVEAIRQLAKEPVPEAVLKAAGVESLSFGPQYIIPKPMDSRLLPRVAKAVAQAAVDTGVARIPMPENYMAG

SEQ ID NO: 4467 - protein, 194 aa, Zea mays
APAFCELSLPLTKEEAAFSPSHPAMQRHVASGRPSGTDGSDFSYRMVVESRYQRVAEGRSRLARLILVQALHLVAGGLLLLLSLSKGAAVNKFAVLSMAAGFLAIVVGELGRMRTMSVLLRLYTSLSSIAVAFSVTCIIRSELFLKVMKQNTEAITSYEMLDAVRVALGILLQMVVIATTTRLLQNMSPPKRAS

SEQ ID NO: 4468 - protein, 363 aa, Exiguobacterium sp. 255-15
MMTKLVTAVEDTTKVKTMRALVKEERGFGAVLKEVAVPSPKRGEVLIRVEATSICGTDVHIYEWDAWAASRVNPPYVFGHEFSGEVVELGEGTKRLKLGDRVSAETHIVCHQCKQCLRGQYHICKNTKIIGVDTQGCFAEYVVMPEENLWVNPEDMPAAIASIQEPMGNAVHTVLASDVSAKTVAIVGCGPIGLMAVSVAKAAGAAEVIAIDVNPYRLELAKTMGADVVIDSRHEDVLERVRMMTDGDGIDVVCEMSGHPVAIRQAFEMVTAGGDVNILSLPVKPVEIDLTNHVVFKGVRVQGITGRKMYETWSQVSAFLSSGKVDVKPLITHTLPLERFEEGFELMRQGKCGKVVLQPRGTN

SEQ ID NO: 4469 - protein, 129 aa, Brassica napus
LCVSALKSDPRSPTADTKGLAAIMASVGMTNATATASYIAKNLTATANNTVLKKVLKDCSDKYILAADSLRLTIQDLDDEAYDYAYMHVLAAQDYPNVCRNIFRRAKGLVYPAEISRCEVSLRSICVVV

SEQ ID NO: 4470 - protein, 378 aa, Gibberella zeae PH-1
MLSRGSLRSAQLLRGVAKQQPQLARSFATVQSDIFKPAKYGGKYTVTLIPGDGIGTEVAESVKTVFKADNVPVEWEQIEVSGLEGAGRTEDAFRESVASLKRNKLGLKGILHTPISRSGHQSFNVAMRQELDIYASISLIKNIPGYETRHKDVDLCIIRENTEGEYSGLEHQSVEGVVESLKIITRAKSERIARFAFSFALANGRSKVTCIHKANIMKLADGLFRSTFHQVAKDYPTLETNDMIVDNASMQAVSRPQQFDVMVMPNLYGGILSNIGAALVGGPGIVPGCNMGREVAVFEPGCRHVGLDIKGKDQANPTAMLLSGSMLLRHLGLDEHANRISKATYAVIADGKVRTPDMGGKSTTHEFTRAILDKLETV

SEQ ID NO: 4471 - protein, 115 aa, Glycine max
  misc_feature (39)..(39): Xaa can be any naturally occurring amino acid
  misc_feature (106)..(106): Xaa can be any naturally occurring amino acid
MKPMKKQAGAGMDAPFTGLKSMAGFPTRKTINDFSFIAXFGGRVLCMQVWPPVDKKKFVTLSYLPDLDDAQLAKEAEYLLRKGWIPCLEFQLEHGFLYREHIGSPXYYYGRYWSL

SEQ ID NO: 4472 - protein, 327 aa, Arabidopsis thaliana
MVASGHEVVTLTFPIGSVHHLMPVLALGTAASPPPEPIVLKRTVLEAIKLGYRHFDTSPRYQTEEPLGEALAEAVSLGLIQSRSELFVTSKLWCADAHGGLVVPAIQRSLETLKLDYLDLYLIHWPVSSKPGKYKFPIEEDDFLPMDYETVWSEMEECQRLGVAKCIGVSNFSCKKLQHILSIAKIPPSVNQVEMSPVWQQRKLRELCKSKGIVVTAYSVLGSRGAFWGTHKIMESDVLKEIAEAKGKTVAQVSMRWAYEEGVSMVVKSFRKDRLEENLKIFDWSLTEEEKQRISTEISQSRIVDGEVYISEKGPIKSVTEMWDGEI

SEQ ID NO: 4473 - protein, 505 aa, Brassica napus
MTSINVKLLYHYVITNLFNLCFFPLTAIVAGKAYLTIDDLHHLYYSYLQHNLITIAPLLAFTVFGSVLYIATRPKPVYLVEYSCYLPPTHCRSSISKVMDIFFQVRKADPSRNGTCDDSSWLDFLRKIQERSGLGDETHGPEGLLQVPPRKTFARAREETEQVIIGALENLFKNTNVNPKDIGILVVNSSMFNPTPSLSAMVVNTFKLRSNVRSFNLGGMGCSAGVIAIDLAKDLLHVHKNTYALVVSTENITYNIYAGDNRSMMVSNCLFRVGGAAILLSNKPRDRRRSKYELVHTVRTHTGADDKSFRCVQQGDDENGQTGVSLSKDITDVAGRTVKKNIATLGPLILPLSEKLLFFVTFMGKKLFKDEIKHYYVPDFKLAIDHFCIHAGGKAVIDVLEKNLGLAPIDVEASRSTLHRFGNTSSSSIWYELAYIEPKGRMKKGNKVWQIALGSGFKCNSAVWVALNNVKASTNSPWEHCIDRYPVKIDSDSGKSETRVPNGRS

SEQ ID NO: 4474 - protein, 489 aa, Xanthomonas axonopodis pv. citri str. 306
MEALSETLRGIAARGPLGLFIDGQWRASTGDRTVDVIAPHTEERLLRYTEPSPSDTEAAIAAARSAFDNGPWPQLSPQERSVVLKRVADHLRARMPELAEAWTGQVGATLGFSKRASQQAPDLFDYYADLIATHAFVQPRVRPSGGRVHVVQEPVGVVAAITPWNAPLVLLCYKVAAALAAGCTVVAKPSPETPIDAYILAECISAAGVPDGVFNLLPAGREVGEQLIRHPHVDKISFTGSTQAGRSIGIACAERLARVGLELGGKSAAIVLEDADLAKMLPTLVPYSMPIAGQVCFSLTRVLVPTQRREEILQAYCTALSAVKLGDPFAADTGMGPLALGRQLERVQSYIAKGKAEGARLVMGGSRPAHLSRGFFVEPTVFAEVMPDMAIAREEIFGPVVSFIDYHDEADLIAKANASDYGLHGTIYSEDAERAYRIARRVRSGSHAINGMWVDISMPFGGFKHSGIGREGGIEGLHAFLETRTLYLS

SEQ ID NO: 4475 - protein, 324 aa, Actinobacillus pleuropneumoniae serovar 1 str. 4074
MAKQIKKIAVLTSGGDAPGMNAAIRGVVRAALNEGLEVYGVQDGYYGLYTDRVIPLDRRSVSETINRGGTFLGSARFPQFKDPDVRKKSVETLKKYDIDALVVIGGDGSYMGAKLITEEFGYPCIGIPGTIDNDIVGTDYTIGYQTALETAVEAIDRLRDTSTSHQRISIVEIMGRHCGDLTISAALASGCEYIIVPEKGLDKESLMRNIEDGFNKGKRHAIIAITELMTDVQALAKEIEDRFGHETRATVLGHIQRGGAPCPFDRILASRMGVYAVDLLLQGHGGRCIGIKNENLVHHDIIDAINNMRRPFKEELFEAARKLF

SEQ ID NO: 4476 - protein, 342 aa, Pyrococcus horikoshii OT3
MKAKDIVLKKSEKIEGVEVKGPWLDDAQSLEEVVSYYYRIGFQATHLGRAIEIWRKVEEKRERGEEIRVFLGYTSNIISSGLREIIAWLVKEKKVDVIVTTAGGVEEDFIKSLKPFILGDWEVDDAELRKKGVNRIGNIFVPNDRYIEFEKYMIPFFERVLKIEEKLSRPLTASEFIYEMGRYMDEKLGKEKEKSVIYWAYKNNIPIFCPAITDGSIGDMLYFFKEERRDSRLIIDIANDIVKLNNLAITAKETASIILGGSLPKHAIINANLFRGGTDYAIYISTAVPWDGSLSGAPPREGVSWGKIKAKADYVEVWGDATLIFPILVWMVMKARGQGYAQ

SEQ ID NO: 4477 - protein, 73 aa, Triticum aestivum
MASRSCTFLEILLAVILPPLGVFLRYGCCSMEFLICLLLTILGYIPGIIYAVYVLVAHGSASEESGRDYDALA

SEQ ID NO: 4478 - protein, 457 aa, Streptomyces avermitilis MA-4680
MNVSVVLFTSDLRLHDHPPLRAALDGARQVVPLFVRDRAVDGAGFAAPNRLAFLADCLRDLDAGLRERGGRLVLRSGDVVDQVCKVAAEADADEVHLAAGVSAYAHRREQRLRSALEADGRRLHVHETVITAVAPGAVTPSSSDHFAVFTPYFRHWEREHLRDALGAPRGVRVPESVGSERLPTRTELSGLSQGLAAGGEEEGRKRLMAWLRGGITAYEDRHDDLAGDATSHLSPHLHFGTLSPVELVHRARRTGGPGAEAFVRQLAWRDFHYQVLAARPDAATADYRGRGDRWRSEAAAREEVEAWRTGRTGYPVIDAAMRQLRHEGWMHNRGRLLTASFLTKTLYVDWRVGARHFLELLVDGDVANNQLNWQWMAGTGTDTRPNRVLNPVTQAKRYDPDGAYVRRWVPELEGLRGAAVHEPWKLKGLDRAAYDYPDPIVELADGLARFRHARGRD

SEQ ID NO: 4479 - protein, 115 aa, Triticum aestivum
AEILRGHGGPSLGFVKLPPRVRPARPRVPGIATRWSNVLRTGSVAAKFVAVDFGTLMFTMERGRDMRELKEFILGQPEAYEFKVGDQFFRRPGDPPLDQVIQMLRKHKDKSEDEL

SEQ ID NO: 4480 - protein, 187 aa, Triticum aestivum
MSVAWRLLSSNTMAPTVMGSSATSVAPFQGLKSTAGLPISRRSSSAGLSSVSNGGRIRCMQVWPIEGINNFESVGDLLPLSTEALLKQVDYLIRSKWVPCLEFSKVGFVFREHNSSPGYYDGRYWTMWKLPMFGCTDATQVLNEVEEVKKEYPDAYVRVIGFDNLRQVQCVSFIAFRPPGCEESGKA

SEQ ID NO: 4481 - protein, 164 aa, Ustilago maydis 521
MSNPNLAEVMGDGPASIADKLTLLPGYEPDFSAVTFCLKEEDHTLGNSLRYIIMKDPRVEFCGYSNPHPSENKIHLRIQMYDNASALDALRDAIENLDQLFAAIGEAYDRSLSAGNYETYVEPKLDHERLAQMAEQGKKRRAEEKAREAEARKQAAQAAAGRPM

SEQ ID NO: 4482 - protein, 205 aa, Eucalyptus globulus subsp. globulus
MVRGKTQMKRIENDTSRQVTFSKRRNGLLKKAFELSVLCDAEVALIIFSPRGKLYEFSSSSLCKTIEKYQTRAKDMEAKTAEISMQPSKGNTLDMEKKIEHFEISRRRLLGEGLDSCSVEELQQTENQLERSLTKIRARKNHLIREHIERLKAEERKLLEEKRKLLQEIECGKGLTPVSSERPREEIRAESMDVETELFIGPPKR

SEQ ID NO: 4483 - protein, 93 aa, Triticum aestivum
MHPRSASTVRLCLVCLVLLLLTRDAHSRNLVGAVVVQKEKHKQSHGGHGAATLEPWGEEGSNAGAKRRQLQRDPTKWEEIHTDYIYTQDVKHP

SEQ ID NO: 4484 - protein, 294 aa, Triticum aestivum
VTILNKFVQKSRLVPVRNSRDIVDPRVRTGSTKVGQMVQPPRPARFGKCLLELSGNNAIIVMDDADIPLAVRSVLFAAVGTAGQRCTTCRRLLLHESIYQTFLDQLVEVYKQVRIGDPMEKGTLLGPLHTTASKESFLKGIQNIRSQGGKILLGGSAIESEGNFVQPTIVEISPAAPVVREELFGPVLYAMKFQTLKEAIEINNSVPQGLSSSIFTRKPDAIFKWIGPHGSDCGIVNVNIPTNGAEIGGAFGGEKATGGGREAGSDSWKQYMRRATCTINYGSELPLAQGINFG

SEQ ID NO: 4485 - protein, 126 aa, Zea mays
  misc_feature (35)..(35): Xaa can be any naturally occurring amino acid
  misc_feature (67)..(69): Xaa can be any naturally occurring amino acid
  misc_feature (87)..(87): Xaa can be any naturally occurring amino acid
  misc_feature (92)..(93): Xaa can be any naturally occurring amino acid
  misc_feature (98)..(98): Xaa can be any naturally occurring amino acid
  misc_feature (108)..(108): Xaa can be any naturally occurring amino acid
KNSPGGGRGRRANTRRGRAAGHSSTDGPQAKRARXPASTRRKKHRGPDRTGPDQHEGGGGAQQRPAXXXPQTGDQPQRNEDRTDEEXAKGEXXNHKNXRKQGTGTHNXSTGRDREDNKPRNEKDGE

SEQ ID NO: 4486 - protein, 290 aa, Solanum berthaultii
LNSSYRVPFESFRVPFVDLQEATNNFDEKFHIGLGGFGKVYRGVLRDGTKVALKRCKRESSQGIEEFQTEIEILSFCSHPHLVSLIGYCDERNEMILVYDYIENGNLRSHLYGSDLPSMSWEQRLEICIGAARGLHYLHTSAVIHRDVKSINMLLDENFVAKITDFGLSKKGTELDQTHLSTLVQGTIGYLDPEYFIRGQLTEKSDVYSFGVVLFEVLCARPAIVQSLPREMVNLAEWAVDSHNKGQLEQIIDLNLAAKIRPESLRKFGETAVKCLALSSGDRPSMGDVL

SEQ ID NO: 4487 - protein, 244 aa, Glycine max
MEYSQYTTYSAEGVEAETYTSSCTTPSRSKKRNNNNTRRFSDEQIKSLETMFESETRLEPRKKLQLARELGLQPRQVAIWFQNKRARWKSKQLERDYGILQSNYNTLASRFEALKKEKQTLLIQLQKLNHLMQKPMEPGQRCTQVEAANSMDSESENGGTMKCEAEGKPSPSMEISEHLLGVLSDDDTSIKVEDFGLEDEHGLLNFAKHVDGSLTSPEDWNAFESNDLLGQSTTDDYQWWDFWS

SEQ ID NO: 4488 - protein, 175 aa, Mesorhizobium sp. BNC1
MAETATKLPVKSEKSVASPEGWAPFESLRREIDRLFDDFHPFGWRLPSRTAFDLEIPKFSRAAWQVAPAMDLVEKEKEYEITAELPGIDEKNVEIKLSNHTLTIKGEKKEEKEEKDKDYYLSERRYGSFQRSFRVPDGVDADKIEATFTKGVLTVRLPKTAQAQKADKKIEVKAA

SEQ ID NO: 4489 - protein, 175 aa, Zea mays
  misc_feature (73)..(73): Xaa can be any naturally occurring amino acid
  misc_feature (87)..(87): Xaa can be any naturally occurring amino acid
  misc_feature (96)..(96): Xaa can be any naturally occurring amino acid
  misc_feature (105)..(105): Xaa can be any naturally occurring amino acid
  misc_feature (130)..(130): Xaa can be any naturally occurring amino acid
  misc_feature (140)..(140): Xaa can be any naturally occurring amino acid
MAPTVMMASSATAVAPFQGLKSAASLPVARRSTRSLGNVSNGGRIRCMQVWPAYGNKKFETLSYLPPLSTDDXLLKQVDYLLRNGWXIPCLEFSKXGFVYRENSXTSPCYYDGRYWTMWKLPMFGCTDAXTQVYKELQEXAIAAYPDAFHRVIGFDNVRQTQCVSFIAYKPPGSE

SEQ ID NO: 4490 - protein, 322 aa, Candida tenuis
MSASIPDIKLSSGHLMPSIGFGCWKLANATAGEQVYQAIKAGYRLFDGAEDYGNEKEVGDGVKRAIDEGLVKREEIFLTSKLWNNYHDPKNVETALNKTLADLKVDYVDLFLIHFPIAFKFVPIEEKYPPGFYCGDGNNFVYEDVPILETWKALEKLVAAGKIKSIGVSNFPGALLLDLLRGATIKPAVLQVEHHPYLQQPKLIEFAQKAGVTITAYSSFGPQSFVEMNQGRALNTPTLFAHDTIKAIAAKYNKTPAEVLLRWAAQRGIAVIPRSDLPERLVQNRSFNTFDLTKEDFEEIAKLDIGLRFNDPWDWDNIPIFV

SEQ ID NO: 4491 - protein, 321 aa, Capsicum chinense
MGSKYSKATNSINDALSSSYLVPFESYRVPLVDLEEATNNFDHKFLIGHGVFGKVYKGVLRDGAKVALKRRTPESSQGIEEFETEIETLSFCRHPHLVSLIGFCDERNEMILIYKYMENGNLKRHLYGSDLPTMSMSWEQRLEICIGAARGLHYLHTRAIIHRDVKSINILLDENFVPKITDFGISKKGTELDQTHLSTVVKGTLGYIDPEYFIKGRLTEKSDVYSFGVVLFEVLCARSAIVQSLPREMVNLAEWAVESHNNGQLEQIIDPNLVAKIRPESLRKFGDTAVKCLALSSEDRPSMGDVLWKLEYALRLQESVI

SEQ ID NO: 4492 - protein, 589 aa, Zea mays
  misc_feature (559)..(559): Xaa can be any naturally occurring amino acid
  misc_feature (572)..(572): Xaa can be any naturally occurring amino acid
MCGILAVLGCSDWSQAKRARILACSRRLKHRGPDWSGLYQHEGNFLAQQRLAVVSPLSGDQPLFNEDRTVVVVANGEIYNHKNVRKQFTGTHNFSTGSDCEVIMPLYEKYGENFVDMLDGVFAFVLYDTRDRTYVAARDAIGVNPLYIGWGSDGSVWIASEMKALNEDCVRFEIFPPGHLYSSAGGGFRRWYTPHWFQEQVPRTPYQPLVLREAFEKAVIKRLMTDVPFGVLLSGGLDSSLVASVTKRHLVETEAAEKFGTELHSFVVGLEGSPDLKAAREVADYLGTIHHEFHFTVQDGIDAIEEVIYHDETYDVTTIRASTPMFLMARKIKSLGVKMVLSGEGSDELLGGYLYFHFAPNKEEFHRETCRKVKALHQYDCLRANKATSAWGLEVRVPFLDKEFINVAMGMDPEWKMYDKNLGRIEKWVMRKAFDDDEHPYLPKHILYRQKEQFSDGVGYNWIDGLKSFTEQQVTDEMMNNAAQMFPYNTPVNKEAYYYRMIFERLFPQDSARETVPWGPSIACSTPAAIEWVEQWKASNDPSGRFISSHDSAATDHTXAVSRRWPTAAATXAANGTVNGKDVAVAIAV

SEQ ID NO: 4493 - protein, 122 aa, Glycine max
  misc_feature (96)..(96): Xaa can be any naturally occurring amino acid
APSLISTAAVTTVNRAGARMDAPFTGLKSMAGYPTRKTNHDITSIASNRGRVQCMQVWPPLGKKKMETLSYLPHLDDAQLATDVEYLLRNGGIPCXEFQLQHGIEYREHNRSPAYYNGRYWT

SEQ ID NO: 4494 - protein, 321 aa, Capsicum chinense
MGSKYSKATNSINDALSSSYLVPFESYRVPLVDLEEATNNFDHKFLIGHGVFGKVYKGVLRDGAKVALKRRTPESSQGIEEFETEIETLSFCRHPHLVSLIGFCDERNEMILIYKYMENGNLKRHLYGSDLPTMSMSWEQRLEICIGAARGLHYLHTNGVMHRDVKSSNILLDENFVPKITDFGISKKGTELDQTHLTTVVKGTLGYIDPEYFIKGRLTEKSDVYSFGVVLFEVLCARSAIVQSLPREMVNLAEWAVESHNNGQLEQIVDPNLADKIRPESLRKFGDTAVKCLALSSEDRPSMGDALWKLEYALRLQESVI

SEQ ID NO: 4495 - protein, 274 aa, Brassica napus
  misc_feature (120)..(120): Xaa can be any naturally occurring amino acid
  misc_feature (153)..(153): Xaa can be any naturally occurring amino acid
MIAAGAKSMLGLSIASPKGVSDSNSRSVGVLRACVSMEGSQTMSHNKNGSIPELKAVNGHTGQKQGPLSTVGNSTNIKWHECPVEKVDRQRLLDQKGCVIWVTGLSGSGKSTLACALNQXLYQKGKLCYILDGDNVRHGLNRDLSFKAEDRAXENIRRVGEGAKLFADAGIICIASLISPYRRDRDAWRTLLPEGDFVEVFMNVPLEVCEARDPKGLYKLARAGKIKGFTGIDDPYEPPLNCEISLGEEGTGTSPIEMAETVVAYLEHKGYLKA

SEQ ID NO: 4496 - protein, 511 aa, Oryza sativa (japonica cultivar-group)
MARMGISKGGSGKEAKKPPLLLGRFEVGKLLGQGNFAKVYHARNVATGEEVAIKVMEKEKIFKSGLTAHIKREIAVLRRVRHPHIVQLYEVMATKLRIYFVMEYVRGGELFARVARGRLPEADARRYFQQLVSAVAFCHARGVFHRDIKPENLLVDDAGDLKVSDFGLSAVADGMRRDGLFHTFCGTPAYVAPEVLSRRGYDAAGADLWSCGVVLFVLMAGYLPFQDRNLAGMYRKIHKGDFRCPKWFSPELIRLLRGVLVTNPQRRATAEGIMENEWFKIGFRRFSFRVEDDRTFTCFELDDDAAVDAPTSPPDTPRTVDSGDVGAAPTRPRKAGSLTSCDSAPSLLEGRFGLGGSSRRRSSLNAFDIISFSPGFDLSGLFDQDDGGGAGAGSIPEQQKHTARFVSAAPVEVIVATLEAAAAAAGMAVREREDGSISMEGTREGEHGALAVAAEIYELTPELVVVEVRRKAGGAAEYEEFFRARLKPSLRELVCDDRPCPEDSGELSRSL

SEQ ID NO: 4497 - protein, 570 aa, Glycine max
MVCTANDLQGWKDFPKGLRVLLLEGDSSSAAEIREQLEAMDYKVSTFYDENEALSALSSSPKGFHVAIVEVSTSCSLGGFKFLENAKDLPTIMTSKDQCLNTMMKCIALGAVEFLSKPLSEDKLKNIWQHVVHKAFNSGENVLSESLKPVKESVESMLQLQTDIGQDKSRISIDLENVSRFSDNDHEQSAVCDKYPAPSTPQLKQGTRLLDDGDCHEQTNCSTEKESGEHDRECKSVETSCGNLNAESSPQPREPDKTLIREEDDFANVSKGESAVSLNPHNKKFLSNADGNTSPNKTGVLNDSCEIKANRKKVKVDWTPELHKKFVKAVEQLGIDQAIPSRILEIMKVEGLTRHNVASHLQKYRIHKRQSAPREEDRKWHNQGDAMQRNYYMQRPIMAYPPYHSHHTLSPAPIYPMWGQPGSQTAGVQIWGHPGYPMWHPTESWHWKPYPGVHVDAWGCPLVPPPQAPCFPYNQNTPGLHNPKAVDYRFSMPRSSFEHHPAEEVVDKVVKEAISKPWLPLPLGLKPPSMDSVLAELSKQGIPSIPLGNKGSSTPKPRRDVRPTPPPGPT

SEQ ID NO: 4498 - protein, 311 aa, Capsicum chinense
MGSKYSKATNSISDASNSFESYRFPLEDLEEATNNFDDKFFIGEGAFGKVYKGVLRDGTKVALKRQNRDSRQGIEEFGTEIGILSRRSHPHLVSLIGYCDERNEMVLIYDYMENGNLKSHLTGSDLPSMSWEQRLEICIGAARGLHYLHTNGVMHRDVKSSNILLDENFVPKITDFGLSKTRPQLYQTTDVKGTFGYIDPEYFIKGRLTEKSDVYSFGVVLFEVLCARSAMVQSLPREMVNLAEWAVESHNNGQLEQIVDPNLADKIRPESLRKFGETAVKCLALSSEDRPSMGDALWKLECALRLQESVI

SEQ ID NO: 4499 - protein, 113 aa, Rickettsia monacensis
ANEAVINMLKEIGSSENIPKYIAKAKDKNDPFRLMGFGHRVYKNYDPRAAVLKETCKEVLKELEQLENNPLLQIAIELEAIALKDEYFIERKLYPNVDFYSGIIYKAMGIPSQ

SEQ ID NO: 4500 - protein, 164 aa, Saccharum hybrid cultivar CP72-2086
MAAPRRLSSCCLLFAVLLGAVLATATAFFEQAAAAGVGLGHGARFARKHGRAAAELPQPEPQPKPEPKPEPQPQPEPLPKPEPQPKPTPKPEPKPKPEPVPKPEPKPEPEPKPHPKPEPKPEPEPKPEPKPEPKPKPKPEPKPEPLPKPEPKPEPKPEPKPEPL

SEQ ID NO: 4501 - protein, 316 aa, Capsicum chinense
MGSKYSKATNSISDASNSFESYRFPLEDLEEATNNFDDKFFIGEGAFGKVYKGVLRDGAKVALKRRTPESSQGIEEFETEIETLSFCRHPHLVSLIGFCDERNEMILIYKYMENGNLKRHLYGSDLPTMSMSWEQRLEICIGAARGLHYLHTRAIIHRDIKSINILLDENFVPKITDFGISKKGTELDQTHLSTVVKGTLGYIDPEYFIKGRLTEKFDVYSFGVVLFEVLCARSAIVQSLPREMVNLAEWAVESHNNGQLEQIVDPNLADKIRPESLRKFGDTAVKCLALSSEDRPSMGDVLWKLEYALRLQESVI

SEQ ID NO: 4502 - protein, 294 aa, Sesbania rostrata
MEQYEKVEKIGEGTYGVVYKARDRVTNETIALKKIRLEQEDEGVPSTAIREISLLKEMQHRNIIRLQDVVHSEKRLYLVFEYLDLDLKKHMDSSPEFVKDPRQVKMFLYQILCGIAYCHSHRVLHRDLKPQNLLIDRRTNSLKLADFGLARAFGIPVRTFTHEVVTLWYRAPGILLGSRHYSTPVDIWSVGCIFAEMVNRRPLFPGDSEIDELFKIFRILGTPNEDTWPGVTSLPDFKSTFPKWPPKDLATVVPNLEQAGLNLLSSMLCLDPSKRITARSAVEHEYFKDIKFVP

SEQ ID NO: 4503 - protein, 206 aa, Ehrlichia sp. Belluno
AACASKITFIDGEKGILRYRGYDIEYLVNMQHSFLEIAYLLFYGVLPNKDEFENFSCNVIEEHSLPQQVYNIIQSFPRNSHPMAILSACFATLSAHYHDSEVVNDYLRCAILSVAKVPSIIAAIYRYIVNKDIILSHKSLSYSRNFANMMLLDFKNDKVNDVVAKALDVIFILHADHEQNASTASVRLAGSAGANLFACLTCWSRT

SEQ ID NO: 4504 - protein, 129 aa, Triticum aestivum
  misc_feature (88)..(88): Xaa can be any naturally occurring amino acid
  misc_feature (99)..(99): Xaa can be any naturally occurring amino acid
  misc_feature (104)..(104): Xaa can be any naturally occurring amino acid
  misc_feature (116)..(116): Xaa can be any naturally occurring amino acid
  misc_feature (122)..(122): Xaa can be any naturally occurring amino acid
PTVMASSATSVAPFQGLKSTAGLPVSRRSNGASLGSVSNGGRIRCMQVWPIEGIKKFETLSYLPPLSTEALLKQVDYLIRSKWVPCLXEFKQVGFIFRXEHNAXPGYYDGRYLDMXELPMFXGCTDPTQ

SEQ ID NO: 4505 - protein, 92 aa, Zea mays
MTMTSRFVAAASSSSSSCPLARLISRRGLAGAADGHGPAKVPLWKDPLSPSKWKEEHFVLASLSMWGALFYGGFKFFGGKKEDKIEAASGQT

SEQ ID NO: 4506 - protein, 428 aa, Shewanella oneidensis MR-1
MADLKAKLELPGNDSIELPVKQGSAGFDVIDISKLGSKGYFTFDPGFLATASCESAITYIDGDQGILLHRGYPIEQLAVDSDYLDLCYLLLYGELPTKEQYAEFVHTVKTHTMVHEQIAFFFRGFRRDAHPMAMLCGVTGALSAFYQDSLDVNDPRHREIAAYRLVSKMPTIAAMCYKYSSGQPFVYPRNDLSYAGNFLSMMFAVPCEEYKVNPIVERAMDRIFILHADHEQNASTSTVRLAGSSGANPFACIAAGIASLWGPAHGGANEACLQMLEEIGSVDRIPEFIARAKDKNDPFRLMGFGHRVYKNFDPRAKVMRETCHEVLKELKVQDPLLDVAMELERIALEDEYFISKKLYPNVDFYSGIIMKAIGIPTSMFTVLFALSRTVGWIAHWKEMLDQPGHKISRPRQLYTGETARDFVDLDKR

SEQ ID NO: 4507 - protein, 530 aa, Zea mays
MGACVSRPSACVGKPHTPRSGDASGRSGGGGGARRRRSRRVGKGRRTAPSRAASMETIQEAEVPGSSSAAAADHRTYSNPAFQVSGTGSIEEAWYDSLAMSESDAEDDFHSVQDDAFSLNGFENEAALSMRDGNGGSFNGAAQSGEQHHKKPKSSELSKGSSENGVRTSISHEDAVSFSGADNTHGGERILEVCGLLPNNCLPCIASAVGVSEKKRTLSSSPTHSMRMPSLKLSFKKKSGEAHPSSTLLSTKDFLERPLAGSQVQLCLLETNMPNSWTHIDPGTFRVRGANYFRDKKKELAPNYAAYYPFGVDVYLSPQKLNHISRFVELPDIQLSSKLPPLLVVNVQVPLYPASLFQNETDGEGMSFVLYFRLSDGYSKELPPSFIESIRRLIDDHVEKIKAFPMETTIPFRERLKILGRVANLEDLPLSAAERKLMHAYNEKPVLSRPQHEFYLGDNYFEIDIDMHRFSYISRKGFATFLDRLKACVLDVGLTIQGNKAEELPEQILCCVRLNGIDYTKYQPLLTHAA

SEQ ID NO: 4508 - protein, 365 aa, Bradyrhizobium japonicum USDA 110
MIAPALQFWGNVMQLIVLPGDGIGPEITTATSGVLRAASERFQLNLRLEEHAVGHASLKQFGTTVRPELLDIVRGADGLILGPTATFDFKDEAHGEINPSRHFRKNLDLYANVRPARTYAGRPGRLGDFDLVVVRENTEGFYADRNMEQGNGEMLVTPDVAISLRRITRACCERIAHAACRLAMKRRRHLTIVHKANVLKIGDGMFLDICRAAAKGYAGLEVDDILVDAMMAHVVRNPDRFDVIVATNMFGDILSDLTAELSGSLGLGGSLNVGDRYAMAQAAHGSAPDIAGQDVANPVSLILSTALLLAWHGERSGAVRYEEAARAIEAAVAKAIGEGRATRDVGGRLGTIAAGAAIAEILQGA

SEQ ID NO: 4509 - protein, 246 aa, Zea mays
ATNSNARGSGAEMQGGATAKLQSPVTVMRPVRGDLEEHLPKPYLARALVAPDIYHPDGTAADEHGHHHMSVLQQHVAFFDRDDNGIIYPWETYSGCRALGFNMILSLLIALVVNGTMSYATLPGWLPSPLFPIYVHNIHKSKHGSDSGTYDNEGRFMPVNFENLFSKYARTSPDRLTYRELWSMTEGFRDAFDLYGWIAAKLEWTILYVLARDDEGYLSREAMRRVYDGSLFEYVERQRAQHAKMS

SEQ ID NO: 4510 - protein, 425 aa, Lactobacillus gasseri
MATVIKNGTVYQNGRLIKADVLIEGKKIKAIGTDLDAEKIIDAQGMLVSPGLVDVHVHYRDPGQTYKEDIKTGSEAAARGGFTTVGAMPNVTPVPNTPELMKKMVEENKHKGVVHIFQYGPITNDETTDIIPDYAALKKAGAFALSNDGHGVQTAQTMYLAMQKAKENNLIIATHAQDDSLFNKGIVNEGVAAKKLDLPPVTELAETTQIARDLLLAQKTGVHYHICHVSTKTSVELVRLAKARGINVTCEVAPHHILLTDSDIPKDNGYFKMNPPLRNKEDQAALLVGLLDGTIDLIATDHAPHAKSEKQGGMKNAAFGITGSETAFSTLYTKFVKEEKVLSLEQLLALLSDKPAKVFGIENAGVLEPGKNADVAIFDIEHKNEIKEADFKSKGVNTPFTGQKVYGETVMTLVDGEVVYQRGTK

SEQ ID NO: 4511 - protein, 65 aa, Glycine max
  misc_feature (51)..(51): Xaa can be any naturally occurring amino acid
  misc_feature (54)..(54): Xaa can be any naturally occurring amino acid
FLQQATMICIDNSEWMRNGDYSPSRFQAQADAVNLICGAKTQSNPENTVGXLTXAGKGFFGPLEV

SEQ ID NO: 4512 - protein, 450 aa, Zea mays
  misc_feature (50)..(50): Xaa can be any naturally occurring amino acid
  misc_feature (60)..(60): Xaa can be any naturally occurring amino acid
  misc_feature (68)..(68): Xaa can be any naturally occurring amino acid
  misc_feature (88)..(88): Xaa can be any naturally occurring amino acid
  misc_feature (126)..(126): Xaa can be any naturally occurring amino acid
  misc_feature (153)..(153): Xaa can be any naturally occurring amino acid
  misc_feature (216)..(216): Xaa can be any naturally occurring amino acid
  misc_feature (235)..(235): Xaa can be any naturally occurring amino acid
  misc_feature (295)..(295): Xaa can be any naturally occurring amino acid
  misc_feature (321)..(321): Xaa can be any naturally occurring amino acid
PWGSTAGDVAAVVDEEACMYAMQLASSSILPMTLKNAIELGLLEVLQKEXAGGGKAALAXPEEVVARXMPAAPGDPAAAAAMVDRMLXRLLASYDVVRCQMEDRDGRYERRYSAAPVCKWLTPNEXACPWAALALMNQDKVLMESWYYLKDAXVLDGGIPFNKAYGMTAFEYHGTDSRFNRVFNEGMKNHSVIITKKLLDFYTGFEGVSTLVDRGXGGVGATLHAITSRHPHISXGVNFDLPHVISEAPPFPGVRHVGGDMFASVPAGDAILMKWILHDWSDAHCATLLKNCYDXALPENGKVIVVECVLPVNTEATPKAXQGVFHVDMIMLAHNPGGKERYEREFRELAKGAGFSGFKATYIYANAWAIEFIKWNHRRRDEMAWLPHALLAWSLYRTSPSSSSSRSRVCMYFCLIFFLHIMHSGWPRLPPIHGGHVFGTSCRALACRGF

SEQ ID NO: 4513 - protein, 173 aa, Oryza sativa (japonica cultivar-group)
MYSLRLASSGSTGLGFALGRLGGRSGGGGGGGGLAPASASSSSVVSARTRRTVSVTPNAAAPTPGEQGVAMEQGKQQHQPPPPSQPQPQQEKRGSRDDDMHKTTGDVMTHSFGEGYSTRSDEEGFGGVYGQNDPVFNPGTEVHPSHPEYDTSQGSEVKEKEKARHHKDDKHAT

SEQ ID NO: 4514 - protein, 355 aa, Trichoderma asperellum
MSRSNAPNASASRKISFNVSEQYDIQDVVGEGAYGVVCSAIHKPSGQKVAIKKITPFDHSMFCLRTLREMKLLRYFNHENIISILDIQKPRSYDSFNEVYLIQELMETDMHRVIRTQDLSDDHCQYFIYQTLRALKAMHSANVLHRDLKPSNLLLNANCDLKVCDFGLARSAASQEDNSGFMTEYVATRWYRAPEIMLTFKEYTKAIDVWSVGCILAEMLSGKPLFPGKDYHHQLTLILDVLGTPTMEDYYGIKSRRAREYIRSLPFKKKVPFRTLFPKTSDLALDLLEKLLAFNPVKRITVEDALKHPYLEPYHDPDDEPTAPPIPEEFFDFDKHKDTLSKEQLKQLIYQEIMR

SEQ ID NO: 4515 - protein, 314 aa, Capsicum chinense
MGSKYSKATNSISDASNSFESYRFPLEDLEEATNNFDDKFFIGEGAFGKVYKGVLRDGTKVALKRQNRDSRQGIEEFGTEIGILSRRSHPHLVSLIGYCDERNEMVLIYDYMENGNLKSHLTGSDLPSMSWEQRLEICIGAARGLHYLHTNGVMHRDVKSSNILLDENFVPKITDFGISKKGTELDQTHLGTVVKGTLGYIDPEYFIKGRLTEKSDVYSFGVVLFEVLCARSAIVQSLPREMVNLAEWAVESHNNGQLEQIVDPNLADKIRPESLRKFGDTAVKCLALSSEDRPSMGDVLWKLEYALRLQESVI

SEQ ID NO: 4516 - protein, 410 aa, Rickettsia sp. AT1
DSEFAELKIRGKIFKLPIFKASIGEDVIDISRVSAEADCFTYDPGFMSTASCQSTITYIDGDKGILRHRGYDIKDLAEKSDFLEVAYLLIYGELPNSEQYNNFTKQVAHHSLVNERLHYLFQTFCSSSHPMAIMLAAVGSLSAFYPDLLNFKEADYELTAIRMIAKIPTIAAMSYRYSIGQPFIYPDNSLDFTENFLHMMFATHCTKYKVNPIIKNALNKIFILHADHEQNASTSTVRIAGSSGANPFACISTGIASLWGPAHGGANEAVINMLKEIGSSENIPKYIAKAKDKNDPFRLMGFGHRVYKNYDPRAAVLKETCKEVLKELGQLENNPLLQIAIELEAIALKDEYFIERKLYPNVDFYSGIIYKAMGIPSQMFTVLFAIARTVGWMAQWKEMHEDPEQKISRP

SEQ ID NO: 4517 - protein, 316 aa, Capsicum chinense
MGSKYSKATNSINDALNSSYLVPFESYRFPLVDLEEATNNFDSKGGFGKVYRGVLRDGTKVALKRHNRDSGQSIELFRTEFEILSRRSHPHLVSLIGFCDERNEMILIYKYMENGNLKRHLYGSDLPTMSMSWEQRLEICIGAARGLHYLHTNGVMHRDVKSSNILLDENFVPKITDFGISKKGTELDQTHLSTVVKGTLGYIDPEYFIKGRLTEKSDVYSFGVVLFEVLCARSAIVQSLPREMVDLAEWAVESHNNGQLEQIVDPNLADKIRPESLRKFGDTAVKCLALSSEDRPSMGDALWKLEYALRLQESVI

SEQ ID NO: 4518 - protein, 411 aa, Rickettsia sp. DT1
DSEFAELKIRGKIFKLPILKASIGEDVIDISRVSAEADCFTYDPGFMSTASCQSTVTYIDGDKGILRHRGYDIKDLAEKSDFLEVAYLLIYGELPSGEQYNNFTKQVAHHSLVNDRLHYLFQTFCSSSHPMAIMLAAVGSLSAFYPDLLNFKEADYELTAIRMIAKIPTIAAMSYKYSIGQPFIYPDNSLDFTENFLHMMFATPYTKYTVNPIIKNALNKIFILHADHEQNASTSTVRIAGSSGANPFACISTGIASLWGPAHGGANEAVINMLKEIGSSEYIPKYIAKAKDKNDPFRLMGFGHRVYKNYDPRAAVLKETCKEVLKELGQLDNNPLLQIAIELEAIALKDEYFIERKLYPNVDFYSGIIYKAMGIPSLMFTVLFAIARTVGWMAQWKEMHEDPEQKISRPR

SEQ ID NO: 4519 - protein, 462 aa, Erwinia carotovora subsp. atroseptica SCRI1043
MRSIKRLPMPPTRGVLGHVDYLKRSDIHLQMLRWKAQYGCFFRLRLGLSSAVVIADTEWIRTIMKSRPDEFRRISSIESVFQEAGLNGVFSSEGERWELQRKLTEPMFQPAHLKYFYSSLRKVTSRLSERFTMLAETGEAIALVDEFKRYTVDITSLLAFGEDVNTLEQGDNPLSQSLRHLFPIINERCESPIPVWRYIRRARDKQFDASLNLIREYVDGFISRQRQRIQLNPQLLEAPENMLQVMLAEQQKDGTLKDDDIVANAITLLIAGEDTTANTLTWMSFLLCSAPSVEECVFQECKEAAEGVGAILPWPLPRMAWLTAVMYESMRLKPVAPLLYLEPTRDTVIDDFLIKKGTPLLLMLNASGFNDELFQQPYDFMPERWLERGKAAFSDLQPFGGGPRMCPGRSLALMEIKLGFHALCSGFHVEALQVASAVTESFAFTVTPSGFRVKLHKRELQQ

SEQ ID NO: 4520 - protein, 380 aa, Saccharomyces cerevisiae
MEFVAERAQPVGQTIQQQNVNTYGQGVLQPHHDLQQRQQQQQQRQHQQLLTSQLPQKSLVSKGKYTLHDFQIMRTLGTGSFGRVHLVRSVHNGRYYAIKVLKKQQVVKMKQVEHTNDERRMLKLVEHPFLIRMWGTFQDARNIFMVMDYIEGGELFSLLRKSQRFPNPVAKFYAAEVILALEYLHAHNIIYRDLKPENILLDRNGHIKITDFGFAKEVQTVTWTLCGTPDYIAPEVITTKPYNKSVDWWSLGVLIYEMLAGYTPFYDTTPMKTYEKILQGKVVYPPYFHPDVVDLLSKLITADLTRRIGNLQSGSRDIKAHPWFSEVVWERLLAKDIETPYEPPITSGIGDTSLFDQYPEEQLDYGIQGDDPYAEYFQDF

SEQ ID NO: 4521 - protein, 359 aa, Capsicum chinense
  misc_feature (288)..(288): Xaa can be any naturally occurring amino acid
NMSYRVPFAALLEATSNFDESLVIGIGGFGKVYKGVLYDGTKLAVKRGNPKSQQGLAEFRTEIEMLSQFRHRHLVSLMGYCDEKNEMILVYEYMENGTLKSHLYGSDLPSMSWKQRLEICIGSARGLHYLHTGYAKAVIHRDVKSANILLDESFMAKVADFGLSKTGPELDQTHVSTAVKGSFGYLDPEYFRRQQLTEKSDVYSFGVVLFEVLCARPVIDPSLPREMVNLAEWAMKWQKKGQLEQIIDPTLVGKIRPDSLRKFGETAEKCLADFGVDRPSMGDVLWNXEYALQLQEAVIQDDPEENSTLLIGELSPQVNDFSQVDAGASAALIGTPNLDDLSGVSMSRVFSQLVKSEGR

SEQ ID NO: 4522 - protein, 411 aa, Rickettsia sp. FLA1
DSEFAELKIRGKIFKLPILKASIGEDVIDISRVSAEADCFTYDPGFMSTASCQSTVTYIDGDKGILRHRGYDIKDLAEKSDFLEVAYLLIYGELPSGEQYNNFTKQVAHHSLVNDRLHYLFQTFCSSSHPMAIMLAAVGSLSAFYPDLLNFKEADYELTAIRMIAKIPTIAAMSYKYSIGQPFIYPDNSLDFTENFLHMMFATPYTKYTVNPIIKNALNKIFILHADHEQNASTSTVRIAGSSGANPFACISTGIASLWGPAHGGANEAVINMLKEIGSSEYIPKYIAKAKDKNDPFRLMGFGHRVYKNYDPRAAVLKETCKEVLKELGQLDNNPLLQIAIELEAIALKDEYFIERKLYPNVDFYSGIIYKAMGIPSQMFTVLFAIARTVGWMAQWKEMHEDPEQKISRPR

SEQ ID NO: 4523 - protein, 314 aa, Capsicum chinense
MGSKYSKATNSINDALNSSYLVPFESYRFPLVDLEEATNNFDGKGGFGKVYRGVLRDGTKVALKRHNRDSGQSIEPFRTEFEILSRRSHPHLVSLIGFCDERNEMILIYDYMENGNLKSHLYGSDLPTMSWEQRLEICIGAARGLHYLHTSAAIHRDVKSTNILLDENFVAKITDFGISKKGTDLDHTHVSTHVKGAFGYLDPEYFIKGRLTEKSDVYSFGVVLFEVLCARSAIVQSLPREMVNLAAWAVESHNNGQLEQIIDPNLVAKIRPESLGKFGETAVKCLAPSSEDRPSMGDVLWKLEYALRLQESVI

SEQ ID NO: 4524 - protein, 322 aa, Xanthomonas axonopodis pv. citri str. 306
MTASPSKLAQLRELSVVVADTGDYDAIKRLKPVDCTTNPTLVKKALDLPVYADLIERELAWGREHGGDDRTATVNEVADRLTIGVGVKLAELVPGRVSTEVDADLAHDTQATIAKARKFIAMYAERGVSKDKILIKIAATWEGIEAARQLQKEGIDCNLTLIFNRSQALACAEAGVFLISPFVGRILDYYVAQGQTPASIDEDPGVVFVRTVYNEFKQRGSSTVVMGASFRSTAQIEALAGCDRLTISPDLLEKLDAEHGELPRKLSPAQADNAQFTPIDSDSFASGLAADPMATEKLAGGIDTFAKDLHALRKTIADKLAG

SEQ ID NO: 4525 - protein, 287 aa, Zea mays
MAMSDLTATVIPKPDGADDESVEIREVWADNLEEEFALIRDIVDEYPFVAMDTEFPGIVCRPVGAFRSPADYNYATLKANVDMLHLIQLGLTFSGPRGELPALGAGRRRCVWQFNFREFDDARDIFASDSIELLRRSGIDFRRNAERGVDARRFAELLMSSGVVLNDSVYWVTFHAGYDFGYLLKILTCNSLPDTQAGFFKLMKIYFPTVYDIKHLMKFCNSLHGGLNKLAELLDVERVGESHQAGSDSLVTSCAFWKLKDSFFAGSTEKYAGVLYGLNAENGVSAH

SEQ ID NO: 4526 - protein, 70 aa, Glycine max
  misc_feature (31)..(31): Xaa can be any naturally occurring amino acid
EALLATGSNSDTGYIAHAPSESNGLSDVLIXSSPILTGVSARARGLAAAAAAAAAGGVSGFEFGVDPNLD

SEQ ID NO: 4527 - protein, 392 aa, Pseudomonas stutzeri
MLCAEQIALIKATVPLLESGGEALTTHFYKLWLDEHPEVQPLFNQAHQASGEQPRALANGVLMYAKHIDRLEALGPLVGQIINKHVALQVLPEHYPLVGSCLLRAIREVLGEEIATEAVIDAWGAAYQQLADILIGQEESLYRAKAAAEGGWRGARPFRIIRKVAESEEITSFHLQPEDGGPLMDFLPGQYIGLRLEVDGQEVRRNYSLSAASNGSEYRISVKREPGGVASNALHAMPEGAVLELFGPAGEFTLEPGNKPLVLISGGVGITPTLAMLEQALASTRPVHFIHCARNAGVHAFRCSVDTLAERHAQLKRFYCYEEHDGAGAAPDAVGRLTEQQLGEWLPEDRNVDAYFLGPKPFMAAVRRQLKSLGVPEQQTRYEFFGPASALD

SEQ ID NO: 4528 - protein, 232 aa, Zea mays
  misc_feature (193)..(193): Xaa can be any naturally occurring amino acid
MGYEDSVYLAKLAEQAERYEEMVENMKAVASADQELSVEERNLLSVAYKNVIGARRASWRIVTSIEQKEESKGNEAQVGLIKEYRQKIEAELAKICEDILECLDGHLIPSAESGESKVFYHKMKGDYHRYLAEFAVGDKRKTSADKSLEAYKAATEVAASSLAPTHPIRLGLALNFSVFYYEILNSPDQACQXGQQAFDDAIAELDTLSEESYKDSTLIMQLLRDNLTLWTS

SEQ ID NO: 4529 - protein, 147 aa, Brassica napus
MRSPISGLFSRSLSFLHRTSPLTSAARHLCAVTSPEARTKNLERIADDLLNLNRIELYDYSILFSHKLGLNRYGSAVSSPAGDLPDASASAETKTAEKTAFDVKLEKFDSASKIKVIKEIRAFTELGLKEAKDLVEKAPVVVKTGVT

SEQ ID NO: 4530 - protein, 381 aa, Lycopersicon esculentum
MGEALKYSIMDSVRSVVFKESENLEGSCTKIEGYDFNKGVNYAELIKSMVSTGFQASNLGDAIAIVNQMLDWRLSHELPTEDCSEEERDVAYRESVTCKIFLGFTSNLVSSGVRDTVRYLVQHRMVDVVVTTAGGIEEDLIKCLAPTYKGDFSLPGASLRSKGLNRIGNLLVPNDNYCKFENWIIPVFDQMYEEQINEKVLWTPSKVIARLGKEINDETSYLYWAYKNRIPVFCPGLTDGSLGDMLYFHSFKKGDPDNPDLNPGLVIDIVGDIRAMNGEAVHAGLRKTGMIILGGGLPKHHVCNANMMRNGADFAVFINTAQEFDGSDSGARPDEAVSWGKIRGGAKTVKVHCDATIAFPILVAETFAAKSKEFSQIRCQV

SEQ ID NO: 4531 - protein, 376 aa, Musa acuminata
MEGGAAGGQRDRETLDAVRSVVFKPSVSLEEKRFPRVQGYDFNRGCDLIGLLDSISSTGFQASNLGDAIDVINQMIDWRLSHDAPTEDCSEEERNLAYRQSVTCKIFLGFTSNLVSSGIREIIRFLVQHRMVEVLVTTAGGIEEDLIKCLAPTYKGDFSLPGSYLRSKGLNRIGNLLVPNDNYCKFEDWIMPILDQMLLEQTTENVVWTPSKVIARLGKEINDESSYLYWAYKNNVSVYCPALTDGSLGDMLYCHSVRNPGLLIDIVQDIRAMNGEAVHVGLRKTGVIILGGGLPKHHICNANMFRNGADYAVYVNTAQEFDGSDSGAEPDEAISWGKIKGSAKTIKVHCDATIAFPLLVAATFARKFQERNNKLA

SEQ ID NO: 4532 - protein, 290 aa, Solanum sucrense
LNSSYRVPFESFRVPFVDLQEATNNFDEKFHIGLGGFGKVYRGVLRDGTKVALKRYTPESNQGLQEFQTEIEILSFCSHPHLVSLIGYCDERNEMILVYDYMENGNLRSHLYGSDLPSMSWEQRLEICIGAARGLHYLHTSAVIHRDVKPINILLDENFVAKITDFGLSKKRTELDQTHLSTLVQGTLGYLDPEYFNRGQLTEKSDVYSFGVVLFEVLCARPAIVQTPSRGMISLAEWVVESQKKGQLEQIIDPNIVAEIRPESLRIFGETAVKCLALSGEDRPSMGDVL

SEQ ID NO: 4533 - protein, 118 aa, Glycine max
MATFMLKLVLPLLFLFMIPPKTAYAEFEQWCVADEQTTESELQAALDWACGKGGADCSKIQVNQPCYLPNTLKDHASYAFNSYYQKFKHSGGSCYSRGAAITTEVDPSHGSCHYDFIP

SEQ ID NO: 4534 - protein, 582 aa, Triticum aestivum
MDTHIGSVDGPSPAAVNGAVGCPASAPGCPIMSSHPVVFAVPGDFNLTLLDHLVDEPGLRLVGCCNELNAGYAADGYARARGVGACAVTFTVGGLSVLNAIAGAYSENLPVICIAGGPNSNDYGTNRILHHTIGIPDFSQELRCFQTVTCHQAVVTNLDDAHEQIDTAIATALRESKPVYLSISCNLPGLPHPTFTRDPVPFFLAPRMSNKMGLEAAVEATVEFLNKAVKPVLVAGPKLRVAKAGKAFVDLVDASGYAYAIMPSAKGFVPETHPHFLGTYWGAVSTAFCAEIVESADAYLFAGPIFNDYSSVGYSFLLKKDKAIIVQPERVIVGNGPAFGCVMMKEYLSALAKRVQKNTTAYENYKRIFVPEGHPLKGEANEPLRVNVLFKHIQDMLTGDSAVLAETGDSWFNCQKLKLPEGCGYEFQMQYGSIGWSVGALLGYAQGASDKRVIACIGDGSFQVTAQDVSTMLRCEQNSIIFLINNGGYTIEVEIHDGPYNVIKNWNYTALVEAIHNGEGKCWTAKVKCEEELTAAIETALGEKKDSLCFIEVIAHKDDTSKELLEWGSRVSAANSRPPNPQ

SEQ ID NO: 4535 - protein, 290 aa, Solanum sucrense
LNSSYRVPFESFRVPFVDLQEATNNFDEKFHIGLGGFGKVYRGVLRDGTKVALKRYTPESNQGLQEFQTEIEILSFCNHPHLVSLIGYCDERNEMILVYDYMENGNLRSHLYGSDLPSMSWEQRLEICIGAARGLHYLHTSAVIHRDVKPINILLDENFVAKITDFGLSKKRTELDQTHLSTFVQGTLGYLDPEYFNRGQLTEKSDVYSFGVVLFEVLCARPAIVQTPSRGMISLAEWVVESQKKGQLEQIIDPNIVAEIRPESLRIFGETAVECLALSGEDRPSMGDVL

SEQ ID NO: 4536 - protein, 331 aa, Gibberella zeae PH-1
MGIVDQPQSKGQESTPGDFAAVQKSIIDLLNQPDYDDGSAGPVLVRLAWHSSGTYDKVTDTGGSNGAGMRYEAEGGDPANAGLQNARVFLEPVKRLHPWITYSDLWTLAGVTAIHAMGGPEIDWLPGRTDFVDDSKLPPRGRLPDAAQGAEHIRHIFYRMGFNDREIVALSGAHNLGRCHTANSGFEGKWVNNPTRFSNQYFRLLLSETWTEKTIPESGLLQFSSVDQDTEEELMMLPTDIALTTDSEFSKYVQLYAKDKDVFFQDFKKAFAKLLELGIARNSEGKVINTDNQKGGYRSAPKKSDSTPATSGQPGASKTGGCPVMHHKAKL

SEQ ID NO: 4537 - protein, 290 aa, Solanum sucrense
LNSSYRVPFESFRVPFVDLQEATNNFDEKFHIGLGGFGKVYRGVLRDGTKVALKRYTPESNQGLQEFQTEIEILSFCSHPHLVSLIGYCDERNEMILVYDYMENGNLRSHLYGSDLPSMSWEQRLEICIGAARGLHYLHTSAVIHRDVKPINILLDENFGQKLLDFGLSKKRTELDQTHLSTLVQGTLGYLDPEYFNRGQLTEKSDVYSFGVVLFEVLCARPAIVQTPSRGMISLAEWVVESQKKGQLEQIIDPNIVAEIRPESLRIFGETAVKCLALSGEDRPSMGDVL

SEQ ID NO: 4538 - protein, 185 aa, Xanthomonas campestris pv. campestris str. ATCC 33913
MSLNRLLVLVFAGLFSTAAVAAGTSVLDLDYRPLAGKAPINLNRSYGGKVVMVVNTASKCGFTPQYEGLEALNQRFGSRGFTVLGFPSNDFQGQEPGSEKQIQEFCTLTYGVKFPMFEKVHVLGAQATPLYQRLTRETGVAPGWNFHKYLIGRNGHVVAQFPSKVKPDDPQVLAAIERELKAPAR

SEQ ID NO: 4539 - protein, 411 aa, Rickettsia sp. IM1
DSEFAELKIRGKIFKLPILKASIGEDVINISRVSAEADCFTYDPGFMSTASCQSTITYIDGDKGILRHRGYDIKDLAEKSDFLEVAYLLIYGELPSSEQYNNFTKQVAHHSLVNERLHYLFQTFCSSSHPMAIMLAAVGSLSAFYPDLLNCKEADYKLTAIRMIAKIPTIAAMSYKYSIGQPFIYPDNSLDFTENFLHMMFATPCTKYKVNPIIKNALNKIFILHADHEQNASTSTVRIAGSSGANPFACISTGIASLWGPAHGGANEAVINMLKEIGSSENIPKYIAKAKDKNDPFRLIGFGHRVYKNYDPRAAVLKETCKEVLKELGQLENNPLLQIAIELEAIALKDEYFIERKLYPNVDFYSGIIYKAMGIPSQMFTVLFAIARTIGWMAQWKEMHGDPEQKISRPR

SEQ ID NO: 4540 - protein, 488 aa, Gibberella zeae PH-1
MLSVGLKAVALTLLLGSRANASPNTPTASACRQIAKALGEGVFFPDDTDYSELSTINWSQTAWAQPACIVSPSNASEVSKVVKIAVAQKARFAIRSGGHSANPGYANINDGILISLDRLTKTVFDPSTSLVSIGPGNRWGEVYEHLEQFNRTMVGGRVPTVGVGGLTLGSGLSYLTDLHGLACDNVVSYEVVLSNGSIVEASATSNKDLFWGLKGGINNFGVVTEFKSRTYVLDRVWGSVSLYNASQMPEVLQAVNKYQSAPNKDLYANMHMNLAPINDSIVLTLVYLKPEPQPKAFAPFYALKPLMAQDGIMTLSQLQSLFSPGGSPRWALHVTGFKPSSAIYKKIDGIFRTAPELDDLRGITGGMMVGTVQPITANVALAGQSLGGNALGLQAVNQTWLGLSAAWWSKDDDAAAERALAAFSKRIEAAIPKNMKVPYLFMNDAGPKQEVIKSYGTDNVKRLQQVRAKYDASLVFHQLVPGGQKIPL

SEQ ID NO: 4541 - protein, 411 aa, Rickettsia sp. IO1
DSKFAELKIRGKIFKLPILKASIGEDVIDISRVSAEADCFTYDPGFMSTASCQSTITYIDGDKGILRHRGYDIKDLAEKSDFLEVAYLLIYGELPSSEQYNNFTKQVAHHSLVNERLHYLFQTFCSSSHPMAIMLAAVGSLSAFYPDLLNCKEADYKLTAIRMIAKIPTIAAMSYKYSIGQPFIYPDNSLDFTENFLHMMFAMPCTKYKVNPIIKNALNKIFILHADHEQNASTSTVRIAGSSGANPFACISTGIASLWGPAHGGANEAVINMLKEIGSSENIPKYIAKAKDKNDPFRLIGFGHRVYKNYDPRAAVLKETCKEVLKELGQLENNPLLQIAIELEAIALKDEYFIERKLYPNVDFYSGIIYKAMGIPSQMFTVLFAIARTIGWMAQWKEMHGDPEQKISRPR

SEQ ID NO: 4542 - protein, 469 aa, Bacillus sp. KSM-K16
MKLFINGEWVSEELDVFDVVNPATGEVVGSVPKGGAKEAKVAADGAYESLPAWAERSAYERSAILEAWHDLIAEQKEELARLMTMEQGKPINEARGEIAYANSFIKWYAEEGKRIYGETIPASSPDKRLFVVKQPVGVVAAITPWNFPAAMITRKVAPALAAGCTVLIKPASQTPLTALKLAELAEKAGLPKGVLHVVVGSTSDISKAWQEDERVRKLTFTGSTEIGRTLMSEAGQTVKKISLELGGHAPVLVFEDADIDNAVQETIASKFRNGGQTCVCANRIYVHESIAEAFITKMKQAVEQLKVGNGLNEETDIGPLIDEEAVDKVLTHIRDAKDKGAEVLTGGNSSDGLFIEPTVIAGVTDDMACMSEETFGPLAPISTFKTEEEVVKRANDTIYGLAAYLFTTDLSRGIRVAEKLDYGVVGLNDGGPSVAQAPFGGFKQSGIGREGGHEGLEEFLESKYVSLKM

SEQ ID NO: 4543 - protein, 236 aa, Nostoc sp. PCC 7120
MTVTADPVTLMKQEVGKAAAALVKSGSIVGLGTGSTTAYTIQYLGDRLKSGELTDIVGIPTSFQSEVLSKQYGVPLTTLDAVDHIDIAIDGADEVDPHKNLIKGGGAAHTREKVVDYLANQFIVVVDSGKLVDRLGSVFAVPVEVIPMAITPVTNAIKQLGGKPELRMGVKKAGPVITDQGNFVLDVRFDSIDDPVNLEKILNNIPGVLENGIFVNCADIVLVGEVKDGQPLVRRL

SEQ ID NO: 4544 - protein, 510 aa, Bacillus cereus G9241
MFGIDIVIPDITYLVENQERVKGLFITHGHEDHIGGIVYVLRKLSIPVYATKLTVGLIQEKLGEAGMLGRVDLKTIDSNSTVEFNTTTVSFFGTTHSIPDSVGVCFHTSKGAIVYTGDFKFDQTPIGNSGADLGKMAQIGNEGVLCLLSDSTNAERPGYTGSEKEVGVEISKVFYGAEGRIIVASFASNVHRIQQVFDAAAETGRKVAVVGRSMVKVVDIARRLGYLDVPEGMVISLKEVDNFPEKKVAILTTGSQGEPMAALSRMAKQAHKQISIRKGDTVIIAASPIPGNEISVSKIIDLLFRAGAEVVYYGERKVHVSGHGSQEELKLMLNLMKPKYFVPVHGEFRMQKAHAYLAEDVGIARENIFIVEKGDVIAFGDDEANLVGKVQAGNVLIDGLGVGDVGNIVLRDRKMLSQDGILVVVVTLGKDEKKIISGPEIISRGFVYVRESEALIDRSTEIVRMIVEQSIKEYSIEWSMLKQNIRELLGQFLYEETKRKPMILPIIMEV

SEQ ID NO: 4545 - protein, 207 aa, Lactobacillus plantarum WCFS1
MVKSDNITWHQSQVSKAERQALNHHKSVVLWFTGLSGSGKSTIANAVEKALFDQQVGSYVLDGDNMRFGLNKNLGFSAEDREENIRRIGEVAKLFVDAGVITLTAFISPYRADRDKVRANLEVDEFIEVFVDTPLEVCEQRDVKQLYAKARRGEITGFTGIDAPYEAPIDPEITIDTSKQPLTASVQQVLNYLAEHHYVSLVTANEN

SEQ ID NO: 4546 - protein, 360 aa, Halobacterium sp. NRC-1
MRGAAPDAVLDAVQSGDPLPGTGGFAGELPDGRLARDVLGRRLCYVDGDEWSHDPRDLAAPTLLPAGHVRAPGATGSGRPVWSLPEPAPTGDEPVERVRDAVAGALGGVPAGDDLAVAFSGGVDSALAAAALDAPLYVVGYADSSDIAAARESAAAMGRADDLRVHEVTLADIEAAVPTVARAIGRTNAMAVQIALPLFLVAARAAADGYSRLVVGQGADELFGGYAKVAKAPTDPRTDADTVRGARRETVQSLPAQLERDLRALRAAGVEPVTPLLHDDVVRAALALPGEWLVSGDTRKRALREAARSWLPDAVADRDKKAVQYGSLVAREVDRLARQAGFKRRMDDHVTQYVEARIEE

SEQ ID NO: 4547 - protein, 323 aa, Vicia faba
MSAQGQPQVQAQVQGIDEAVLDDIIRRLTEVRLSRPGKQVQLSEAEIKQLCLASRDIFLQQPNLLELEAPIKICGDIHGQYSDLLRLFEYGGLPPKSNYLFLGDYVDRGKQSLETICLLLAYKIKYPENFFLLRGNHECASINRIYGFYDECKRRFNVRLWKAFTDSFNCLPVAALIDDKILCMHGGLSPDLTNLDQIRILPRPVAIPDTGLLCDLLWSDPGRDVKGWGMNDRGVSYTFGPDKVAEFLSMHDLDLICRAHQVVEDGYEFFADRQLVTIFSAPNYCGEFDNAGAMMSVDENLMCSFQILKPAEKKTKFVMSNKM

SEQ ID NO: 4548 - protein, 151 aa, Brassica napus
  misc_feature (139)..(139): Xaa can be any naturally occurring amino acid
EALPESARSCDDGLYRAIDSYLKAHPTLSEHERKRLCRVMDCQKLSMDACMHAAQNERLPLRVVVQVLFSEQVKISNALANTSLKESTTLGEAMGTTYQPMIPNRKTLIEATPQSFQEGWAAAKKDINTLKFELETVKXKYVELQNEMEVM

SEQ ID NO: 4549 - protein, 582 aa, Glycine max
  misc_feature (468)..(468): Xaa can be any naturally occurring amino acid
MAASLFMPSSIVDEEARFEAEVAEVQAWWNSERFRLTKRPYTARDVVSLRGNLRQTYASNEMAKKLWCLLKNHQANGTASRTFGALDPVQVTQMAKHLDTIYVSGWQCSATHTTSNEPGPDLADYPYDTVPNKVEHLFFAQQYHDRKQREERMRMSREERARTPYVDYLRPIIADGDTGFGGTTATVKLCKLFVERGAAGIHIEDQSSVTKKCGHMAGKVLVAISEHINRLVAARLQFDVMGVETVLVARTDAEAANLIQSNIDTRDHQFILGVTNPNLKGKSLATLMQQGMAAGKNGAELQALEDEWLSKAQLKTLSEAVVEAIERQNNIGEEEKRRKLNEWMHHSSYERCLSNEEGREIAEKLGVRNLFWDWDLPRTREGFYRFKGSVTASVVRGCAFSPHADVIWMETASPNVVECTEFSEGVRSKHPQMMLGYNLSPSFNWDASGMSDEQMRDFIPKIGKHGYXAKLGYVWQFITVGGLHSNALITSTFARDFANRGMLAYVERIQREERNNGVDTLAHQKWAGANYYDRYLKTVQGGVASTAAMGKGVTEEQFKESWTRPGAVEIDRGSIVVAKARM

SEQ ID NO: 4550 - protein, 373 aa, Dianthus caryophyllus
MEDANHDSVASAHSAAFKKSENLEGKSVKIEGYDFNQGVNYSKLLQSFASNGFQASNLGDAIEVVNHMLDWSLADEAPVDDCSEEERDPKFRESVKCKVFLGFTSNLISSGVRDTIRYLVQHHMVDVIVTTTGGIEEDLIKGRSIKCLAPTFKGDFALPGAQLRSKGLNRIGNLLVPNDNYCKFEDWIIPILDKMLEEQISEKILWTPSKLIGRLGREINDESSYLYWAFKNNIPVFCPGLTDGSLGDMLYFHSFRNPGLIVDVVQDIRAVNGEAVHAAPRKTGMIILGGGLPKHHICNANMMRNGADYAVFINTAEEFDGSDSGARPDEAISWGKISGSAKTVKVHCDATIAFPLLVAETFAAKREKERKSC

SEQ ID NO: 4551 - protein, 346 aa, Chlamydomonas reinhardtii
MTRGLDYYEVMGLTRSANDIDIRRAYRRLALKYHPDINKDGAAGDEFLRICEAYEVLCDPKTKGFYDLYGEDALKDGISDGNGGLKGPMYRFNPEESPKAVFERFFGTANPYEALEALSNQFESMTSEEAPARGKNKVYPLELTLEEIFHGCLKKVAHKRKVLLFSGEYVEEERQLTVDVKPGLPTGTRFVFEGEGNKTPKKEPGPVVFVLKPKPHPRFVRRGSDLVHKVTLPLHHALIGTTLDIRTLDDRDLKVPISDIMRPGSSLTVPGEGMPLPATPSARGNLVIEIDLLFPTHLTETQKMLLRSAFFLPPPTEQNEETKKALRDYEAAFKHDLKGWAPVFKR

SEQ ID NO: 4552 - protein, 112 aa, Bartonella sp. Pm1785nv
NEACLKMLQEIGSVKRIPEFIARAKDKNDPFRLMGFGHRVYKNYDPRAKIMQKTCHEVLKELNIQDDPLLDIAIELEKIALNDEYFVEKKLYPNVDFYSGITLKALGFPTEM

SEQ ID NO: 4553 - protein, 482 aa, Shewanella oneidensis MR-1
MLLNDPSLLRQQCYINGQWCDANSKETVAITNPATGAVIACVPVMGQAETQAAIAAAEAALPAWRALTAKERGAKLRRWFELLNENSDDLALLMTSEQGKPLTEAKGEVTYAASFIEWFAEEAKRIYGDTIPGHQGDKRIMVIKQPVGVTAAITPWNFPAAMITRKAAPALAAGCTMVVKPAPQTPFTALALAVLAERAGIPAGVFSVITGDAIAIGNEMCTNPIVRKLSFTGSTNVGIKLMAQCAPTLKKLSLELGGNAPFIVFDDANIDAAVEGAMIAKYRNAGQTCVCANRIYVQAGVYDEFAEKLSMAVAKLKVGEGIIAGVTTGPLINAAAVEKVQSHLEDAIKKGATVLAGGKVHELGGNFFEPTVLTNADKSMRVAREETFGPLAPLFKFNDVDDVIKQANDTEFGLAAYFYGRDISLVWKVAESLEYGMVGVNTGLISTEVAPFGGMKSSGLGREGSKYGIEEYLEIKYICMSV

SEQ ID NO: 4554 - protein, 160 aa, Dianthus caryophyllus
MSDDDHHFESSADAGASKTYPQQAGTIRKSGHIVIKNRPCKVVEVSTSKTGKHGHAKCHFVAIDIFNGKKLEDIVPSSHNCDVPHVNRVDYQLLDITEDGFVSLLTDSGDTKDDLKLPADEALVKQMKEGFEAGKDLILSVMCAMGEEQICAVKDVSGGK

SEQ ID NO: 4555 - protein, 392 aa, Escherichia coli
KITLQNGKLNVPENPIIPYIEGDGFGVDVTPAMLKVVDAAVEKAYKGERKISWMEIYTGEKSTQVYGQDVWLPAETLDLIREYRVAIKGPLTTPVGGGIRSLNVALRQELDLYICLRPVRYYQGTPSPVKHPELTDMVIFRENSEDIYAGIEWKADSADAEKVINFLREEMGVKKIRFPEHCGIGIKPCSEEGTKRLVRAAIEYAIANDRDSVTLVHKGNIMKFTEGAFKDWGYQLAREEFGGELIDGGPWLKVKNPNTGKEIVIKDVIADAFLQQILLRPAEYDVIACMNLNGDYISDALAAQVGGIGIAPGANIGDECALFEATHGTAPKYAGQDKVNPGSIILSAEMMLRHMGWTEAADLIVKGMEGAINAKTVTYDFERLMEGAKLLK

SEQ ID NO: 4556 - protein, 113 aa, Bartonella sp. Pm1857nv
ANEACLKMLQEIGSVKRIPEFIARAKDKNDPFRLMGFGHRVYKNYDPRAKIMQKTCHEVLKELNIQDDPLLDIAIELEKIALNDEYFVEKKLYPNVDFYSGITLKALGFPTEM

SEQ ID NO: 4557 - protein, 268 aa, Oryza sativa (japonica cultivar-group)
GADGKLSRRYAAAPVCKWLTPNEDGVSMAALALMNQDKVLMESWYYLKDAVLDGGIPFNKAYGMTAFEYHGTDARFNRVFNEGMKNHSVIITKKLLDLYTGFDAASTVVDVGGGVGATVAAVVSRHPHIRGINYDLPHVISEAPPFPGVEHVGGDMFASVPRGGDAILMKWILHDWSDEHCARLLKNCYDALPEHGKVVVVECVLPESSDATAREQGVFHVDMIMLAHNPGGKERYEREFRELARAAGFTGFKATYIYANAWAIEFTK

SEQ ID NO: 4558 - protein, 503 aa, Haloarcula marismortui ATCC 43049
MPDSETRTAMRERHLQAHEDALADIVIEPWIGGTSVSGSEPIPTRDPVIDEPITAVPVCDDELVNQAVQVAWDGFETWSDRTPTDRSQRLSEWVDVLEEHLDELALLECLDTGKPLSEARGEVEGALRTLEYYAAVARTQQGSQIPAQGDLHMYTRMEPYGVVGQITPWNFPAWAAAWKFGPALAAGNCSVLKPSAYTPLTTVRMAQLSDGIFPDGVINVVTGGGSTTGATLTEHEDVRKLSFTGSGSVGQEVMQTAAARIAPVTLELGGKSPLLVFPDADMQTAVDAAAAGVYYSTGEICDALSRAIVHEDVHDEFVDRLVARAESYTLGDPLDDETTLGPLTNEDQFETVSDYVTIGRNEGATLATGGTAPDDRALADGHYVEPAVFTDVEPDMRIAREEIFGPVQTVQSFETYDEAIALANDTEFGLAGGVATESTDIAHQAAADIDAGVVYINAYGPIRPEGPYGGFKESGIGHDLGRAAVEQYQQPKTVYVNLDSPEI

SEQ ID NO: 4559 - protein, 325 aa, Glycine max
MGGRGAMRSAAKIAGIGVSKAALRPSALPTEQTVRNASRPTAVTGVSSQSAKSAEVLPTEQTVRNASRPTAVSGVSSQSAKSAEVAPLHTAAAWDDWDFAEDGELVVPRMVFGSVPTLDEATEATAELKDAIDQVYLCHESSQYSSRGGQVSALSPTGGQVSALSPTLYEPVNRSCVVDAISDSSAPKHAIQAFHLLSTSRDGVSSQNYSIRNREIFKCLLNEVLGSFIELIDSIHLFLVSTRLLWLHLLVTQMYGMQSWKILPSVVSSNHNSQWLILEQQEILRNWISSQVVLLKQLNPLKDWECQLSLTRGMGFSISWIFYRM

SEQ ID NO: 4560 - protein, 159 aa, Lycopersicon esculentum
MSDEEHHFESKADAGASKTYPQQAGTIRKGGHIVIKNRPCKVVEVSTSKTGKHGHAKCHFVAIDIFTGKKLEDIVPSSHNCDVPHVNRTDYQLIDISEDGFVSLLTENGNTKDDLRLPTDDTLLAQVKDGFAEGKDLVLSVMSAMGEEQICGIKDIGPK

SEQ ID NO: 4561 - protein, 390 aa, Burkholderia cepacia R18194
MSETKDAAAPAAAGAFKPKKSVALSGVTAGNTALCTVGKTGNDLHYRGYDILDVAESCEFEEIAHLLVHGTLPNLTELAAYKNKLRALRGLPNALKAALEQIPASAHPMDVMRTGVSVLGTVLPEKDDHNLPGARDIADRLMASLGSMLLYWYHFSHNGKRIETETDDDSIGGHFLHLLHGKTPSKSWVEAMHTSLILYAEHEFNASTFTGRVIAGTGSDIYSAITGAIGALRGPKHGGANEVAYEIQSRYSSPDDAEADIRRRVENKEVVIGFGHPVYTISDPRNKVIKGVAHKLSKEAGDLKLYNIAERLESVMWDAKKMFPNLDWFSAVSYHMMGVPTAMFTPLFVISRTSGWSAHIMEQRIDNKIIRPSANYTGPEDLQFVPIEKR

SEQ ID NO: 4562 - protein, 299 aa, Candidatus Carsonella ruddii
MNLFNFVKKKIKISIDSADLNLIKKYNFDSLTSNPSLILLSFLNNSYNKILKFFFKNNNKKILLDPDTEISFYDYLLIFVVCNLIKFIKDKISIEIPARISYNYNKIIIYSQKILFLCDQFGINKNRILIKIPATDSGIKAASKLKLSGIECNLTLIFDLNQVKKCFDNEIYIISPFVGRISDIINCNFDSGVNFVKNIYNYKKNYNYKTKIMAASFRNLNQILNLLFCDYITISPIYFEKLLNKKINFNINDFQIFKINFNLNFLNLISSKLLINGIIQFEKDHNSLIKLIYFLINNF

SEQ ID NO: 4563 - protein, 392 aa, Escherichia coli
KITLQNGKLNVPENPIIPYIEGDGFGVDVTPAMLKVVDAAVEKAYKGERKISWMEIYTGEKSTQVYGQDVWLPAETLDLIREYRVAIKGPLTTPVGGGIRSLNVALRQELDLYICLRPVRYYQGSPSPVKHPELTDMVIFRENSEDIYAGIEWKADSADAEKVINFLREEMGVKKIRFPEHCGIGIKPCSEEGTKRLVRAAIEYAIANDRDSVTLVHKGNIMKFTEGAFKDWGYQLAREEFGGELIDGGPWLKVKNPNTGKEIVIKDVIADAFLQQILLRPAEYDVIACMNLNGDYISDALAAQVGGIGIAPGANIGDECALFEATHGTAPKYAGQDKVNPGSIILSAEMMLRHMGWTEAADLIVKGMEGAINAKTVTYDFERLMEGAKLLK

SEQ ID NO: 4564 - protein, 160 aa, Lycopersicon esculentum
MSDEEHHFESKADAGASKTFPQQAGTIRKNGYIVIKGRPCKVVEVSTSKTGKHGHAKCHFVAIDIFNGKKLEDIVPSSHNCDVPHVNRTDYQLIDISEDGFVSLLTESGNTKDDLRLPTDENLLKQVKDGFQEGKDLVVSVMSAMGEEQINAVKDVGTKN

SEQ ID NO: 4565 - protein, 312 aa, Burkholderia cepacia R18194
MDTLHLVDREIRPLLVAWPTVTLSADTLAQSRERVLPLPPPDLAGSTLERRAVPGPAGAPDVPVLVYRPDAGVRPLPAIVHMHGGGYVRGAAKDLEAVHRSVVTELGCALISIDYRLAPETVFPGAIEDCYAALAWVFRQADALGIDPARIGVAGESAGGGLAAALALLARDRGEYRLAFQHLIYPMLDDRTCTRAPHPHAGEFVWHAANNRFGWSALLGHAPGLDGVSPYAAAARATQLEGLPPAFLSVGSLDLFLDENLDYAQRLLRAGVPTELHVLPGGVHGFDIVPGARVAETARRLSHDALRRFLHG

SEQ ID NO: 4566 - protein, 111 aa, Citrus limon
METSVPYENDLNLKATELRLGLPGSDENEQQTRNNKRSLPDTPDDLDTKDKSDEAASVAKAQVVGWPPIRSYRKNSLQQKKNEGECAGIYVKVSMDGAPYLRKIDLKLYNG

SEQ ID NO: 4567 - protein, 78 aa, Zea mays
MGLWTLLEGFLLLANALAILNEDRFLAPRGWSMSEVSGNGQTKSLKGQIVGLIYATQFLRMPLIALNVLIIVVKLVSG

SEQ ID NO: 4568 - protein, 476 aa, Bacillus cereus ATCC 10987
MQNKIIVMFQKDFRLYDNPALFKATQSGEVVPVYVHDETFSMGSASKWWLHHAIIDVKKQLEALGSTLIIRKGSTEEEILSLIEQLGITAVYWNICYDPDRLQFNQNMKMMLEDKGITCKEFNSHLLLEPWMIKKKDNTEYKVFTPFYNAFQKQVISKPISKVQSIKWGSSLPESLSVTELHLLPTIPWTSHIESIWDPTEEGAYKTCKKFFSSKLASYSEGRDFPNQNAHSMLAPYLSFGQISVRWMYHYLINKSTERQCSLFEKQVNSFIRQLIWREFSYYLLYHYPFTVYKPLNKNFEHFPWNNEEELLTVWQKGETGYPFIDAGMRELWQTGFMHNRARMAVASFLVKHLLIPWQEGAKWFMDTLLDADIANNTMGWQWVAGSGADASPYFRIFNPITQGEKFDKDGEYIRKWVPELKDMPNKYIHKPWEAPEHILQKANIKLGDTYPLPVVDHKAARERALCAYKSMKEFV

SEQ ID NO: 4569 - protein, 121 aa, Spinacia oleracea
MIQPQTHLNVADNSGARELMCIRIIGASNRRYARIGDVIVAVIKEAIPNTPLERSEVIRAVVVRTCKELKRDNGMIIRYDDNAAVIIDQEGNPKGTRIFGAIARELRQKFAKIVSLAPEVL

SEQ ID NO: 4570 - protein, 506 aa, Corynebacterium diphtheriae NCTC 13129
MTVYAYPGTPGAVANYKKRYDNYIGGQWVPPVGGEYLDNITPVTGEVFCQVARGTAADVEKALDAAHDAAKTWGHSSPAERALILHRIADRMEEHLEEIAVAETWDNGKAVRETLAADIPLAIDHFRYFAGAIRAQESRTSQIDHNTVAYHFHEPIGVVGQIIPWNFPLLMAAWKIAPALAAGNTIVLKPAEQTPASILFWIDIVGDLLPDGVLNIVNGLGEEAGVALSSSNRIGKIAFTGSTQVGKIINRAAADKIIPVTLELGGKSPSIFFADIMDYDDPFREKCIEGLAMFALNQGEVCTCPSRALVHESIADEFLELGVQRVKNIKLGNPLDTETMMGAQASMEQMDKISGYLDIGPKEGAEVLTGGHVNKIDGLENGYYIEPTVFKGTNDMTIFREEIFGPVLSVATFKDFDEAIRIANDTNYGLGAGVWTRHQNTAYRAGRAIQAGRVWVNQYHNYPAHAAFGGYKESGIGRENHLMMLDHYQQTKNLLVSYDENPTGLF

SEQ ID NO: 4571 - protein, 161 aa, Zea mays
MEALKYWMEQDRVLELFCRLLIAVYGILWGFSASGPGADPKVDYACTPEEVQQHFQACGTVNRVTILTDKFGQPKGFAYVEFLEQEGVQEALNLNESELHGRQIKVAPKRTNVPGMKQRPPRGYNPYHGYPYRSYGAPYFPPYGYGRAPRFRRPMRYRPYF

SEQ ID NO: 4572 - protein, 357 aa, Triticum aestivum
  misc_feature (204)..(204): Xaa can be any naturally occurring amino acid
MGSIAAGADEDACMYALQLVSSSILPMTLKNAIELGLLETLMAAGGKLLTPAEVAAKLPSAANPEAPDMVDRMLRLLASYNVVSCKTEEGKDGRLSRRYGAAPVCKYLTPNEDGVSMSALALMNQDKVLMESWYYLKDAVLDGGIPFNKAYGMSAFEYHGTDPRFNRVFNEGMKNHSIIITKKLLESYKGFEGLNTLVDVGGGXVGATVAGITAHYPTIKGINFDLPHVISRAPPFSGVTHVGGDMFQKIPSGDTILMKWILHDWSDEHCATLLKNCYDALPAHGKVVLVECILPVNPEATPEAQGGFHLDMIMLAHNPGGRERYEREFEALAKGAGFGAIKTTYIYANIWVIEFTK

SEQ ID NO: 4573 - protein, 64 aa, Glycine max
  misc_feature (4)..(4): Xaa can be any naturally occurring amino acid
  misc_feature (49)..(50): Xaa can be any naturally occurring amino acid
  misc_feature (54)..(54): Xaa can be any naturally occurring amino acid
MSGXWVFKNGVVRLVENPGGEAVEGSRGGRRKVLVHRASNEVITSYAVXXLKLXSLGWERYYFF

SEQ ID NO: 4574 - protein, 251 aa, Zea mays
  misc_feature (197)..(197): Xaa can be any naturally occurring amino acid
  misc_feature (217)..(217): Xaa can be any naturally occurring amino acid
  misc_feature (228)..(228): Xaa can be any naturally occurring amino acid
  misc_feature (237)..(237): Xaa can be any naturally occurring amino acid
  misc_feature (243)..(243): Xaa can be any naturally occurring amino acid
MGSSRPAGRSLPDFRWNPQSFSRLLLPHPFSLLFFLFIHLVLTSLNQTFHDTNDLILFIMSSALNQLKATGTTVVSDSGDFASIGKYKPQDATTNPSLILAASKKEEYAKLIDVAIDYAKQKGGSVDQQVDDALDRLLVEFGKEILKIIPGKVSTEVDARYSFDTEASVNKALHLIELYGEQGISKDRILIKIAATXEGIKAAEILQRDHGINTNLXTLMFSLVQAIXAAEAGAYLXSPFVGXILDWVQAL

SEQ ID NO: 4575 - protein, 105 aa, Glycine max
MDIRLMDLDSPLFNTLHRIMDLTEDDNVLLISGERKREEDKEKEGAKYLRMERRVGKFMRKFTLPENANTDAISAVCQDGVLTVTVNKLPPPQPKKPKTIKVKIA

SEQ ID NO: 4576 - protein, 452 aa, Triticum aestivum
  misc_feature (439)..(439): Xaa can be any naturally occurring amino acid
MQLEVMANRGKILMERYELGRLLGKGTFGKVHYARSLESNRSVAIKMLDKEKVLKVGLSEQIRREVTTMRLVAHKNIVQLHEVMATRNKIYFVMEYVKGGELFDKVAKSGKLTEGAAHKYFQQLISAVDYCHSQGVYHRDLKLENLLLDENENLKVSDFGLSALSESKRQDGLLHTTCGTPAYVAPEVISKAGYDGAKSDIWSCGVILFVLVAGYLPFQGQNLIEMYRKIEKGDFRCPGWVSQKLQKLLYKIMDPDPNKRISIQKIKESTWFRKGPGENLTVKERLPSENANTDAVPTLGVRRRKNSHEDAKPLAVTNLNAFEIISFSTGFDLSGLFVEKESKKEARFTSEQPASAIVSKLEAVAKTLNLRVRKKDNGVVKMQVRKEGRNGVLQFDSEIFEISPSYHLIEMKQTSGDSLEYQKLLEEGIRPALKDICLXAWHGADGQQEHQG

SEQ ID NO: 4577 - protein, 127 aa, Brassica napus
MAETLKEDSIMIREVWNDNLLEEFALIREIVDKYTFIAMDTEFPGVVLKPVETFKYNNDLNYRTLKENVDLLKLIQLGLTFSDEDGNLPTCGTDKFCVWQFNFREFNIGEDIYASESIELLRQCGID

SEQ ID NO: 4578 - protein, 120 aa, Zea mays
MAMEARMKGTVKWFNDTKGFGFISPDDGSEDLFVHQSSIKADGFRSLAEGEVVEFAVSEGDDGRTKAVDVTGPDGSFVQGGAGGGGGGGGFGSRGGGGSRGGGGFGGRGGDGSGGYGGGY

SEQ ID NO: 4579 - protein, 251 aa, Zea mays
MAAKCYPTVSDEYLAAVAKAKRKLRGFIAEKNCAPLMLRLAWHSAGTFDVATKTGGPFGTMKCPAELAHGANAGLDIAVRLLEPIKEQFPILSYADFYQLAGVVAVEVTGGPEVPFHPGRQDKPEPPPEGRLPDATQGSDHLRQVFSTQMGLSDQDIVALSGGHTLGRCHKERSGFEGAWTANPLIFDNSYFTELLSGEKEGLLQLPTDKALLTDPSFRPLVDKYAADEDAFFADYAEAHLKLSELGFAEA

SEQ ID NO: 4580 - protein, 451 aa, Zea mays
  misc_feature (231)..(231): Xaa can be any naturally occurring amino acid
MAGAGAGGWKKRVGRYEVGRTIGRGTFAKVKFAVDADTGAAFAIKVLDKETIFTHRMLHQIKREISIMKIVRHPNIVRLNEVLAGKTKIYIVLELVTGGELFDRIVRHGKLRENEARKYFQQLIDAIDYCHNKGVYHRDLKPQNLLLDSRGNLKLSDFGLSTLSQNGVGLVHTTCGTPNYVAPEVLSSNGYDGSAADIWSCGVILYVLMAGYLPFEENDLPHLYEKITAAXYSCPYWFSPGAKSLIQRILDPNPRARITIEEIREDPWFKKNYVTIRCGEDENVSLDDVQAIFDNIEDKYVSDEVTHKDGGPLMMNAFEMIALSQGLDLSALFDRQQEFVKRQTRFVSRKPAKTVVATIEVVAESMGLKVHSRNYKVRLEGPASNRASQFAVVLEVFEVAPSLFMVDVRKVAGDTPEYHRFYENLCSKLGSIIWRPTEVSAKSTPLRTTTC

SEQ ID NO: 4581 - protein, 159 aa, Lycopersicon esculentum
MSDEEHQFESKADAGASKTYPQQAGTIRKNGYIVIKGRPCKVVEVSTSKTGKHGHAKCHFVAIDIFTGKKLEDIVPSSHNCDVPHVNRTDYQLIDISEDGFVSLLTDNGNTKDDLRLPTDENLLSLIKDGFAEGKDLVVSVMSAMGEEQINALKDIGPK

SEQ ID NO: 4582 - protein, 399 aa, Desulfitobacterium hafniense DCB-2
MCEKTHTMIQRGQEVVMNTYGRLPMAIVKGKGTTVWDIEGKQYLDFVTGLAVSSLGHSHPAVVEAIQKQAEEILHTSNLYWIPNQIALAEKLVEHSFADQVFFCNSGAEANEAAIKIARKYAKEHYSEDKYEILTLVNSFHGRTLATLTATGQTKYQKGYAPLPEGFTYVPINDLAQLEEKMNPKVAAVMLEPIQGEGGVFPLEVEFLAKARKLCDDYGALLIFDEIQVGLGRTGKLFAYEWSNVVPDIMTLAKALGGGVPIGVMLAKEKVASTFKPGDHASTFGGNPLATAVGCAVMDVLTEEGFLEDVQKRAQYFKQELQKLADKYQTGTEIRGQGFILGWPLDRLGAEIVEGAREKGLLINFVGGKALRFLPPLNVSYQEIDEAITILDQIFAECW

SEQ ID NO: 4583 - protein, 160 aa, Lycopersicon esculentum
MSDEEHHFESKADAGASKTYPQQAGTIRKNGYIVIKGRPCKVVEVSTSKTGKHGHAKCHFVAIDIFNAKKLEDIVPSSHNCDVPHVNRTDYQLIDISEDGFVSLLTENGNTKDDLRLPTDDTLLNQVKGGFEEGKDLVLSVMSAMGEEQICAVKDIGTKT

SEQ ID NO: 4584 - protein, 160 aa, Xylella fastidiosa Temecula1
MNVVRYTPWPGQAALQNEIKQVFDRFFEHNGDTDESAVVTAQWVPRVDIKEEPNQFVLYADLPGIDPADIEVQMDKGILSIKGERKTESSSQTEHFSRIERRYGSFHRRFALPDSADADGITASGSHGVLRILIPKQAATTPRRIQVGNAVSSDVALQSM

SEQ ID NO: 4585 - protein, 392 aa, Escherichia coli
KITLQNGKLNVPENPIIPYIEGDGIGVNVTPAMLKVVDAAVEKAYKGERKISWMEIYTGEKSTQVYGQDVWLPAETLDLIREYRVAIKGPLTTPVGGGIRSLNVALRQELDLYICLRPVRYYQGTPSPVKHPELTDMVIFRENSEDIYAGIEWKADSADAEKVIKFLREEMGVKKIRFPEHCGIGIKPCSEEGTKRLVRAAIEYAIANDRDSVTLVHKGNIMKFTEGAFKDWGYELAREEFGGELIDGGPWLKVKNPNTGKEIVIKDVIADAFLQQILLRPAEYDVIACMNLNGDYISDALAAQVGGIGIAPGANIGDECALFEATHGTAPKYAGQDKVNPGSIILSAEMMLRHMGWTEAADLIVKGMEGAINAKTVTYDFERLMEGAKLLK

SEQ ID NO: 4586 - protein, 297 aa, Candidatus Carsonella ruddii
MNLLNYLYINKKISIDSADLNLIKKYKFNSITSNPTLILKSFLNKTYNLLLNLFFYKNNKKILLDSDIQISLYDKILILIVGNLIPFINDKISIEIPARISFNYNLIIIYSKKIIFLCNKYGINIKKILIKIPGTDSGIKAAKKLKEIGIETNITLIFDINQVKKCLDYGVYIISPFVGRISDSIFCKYDSGVNFVKNIFIYKNNNNYKTKIMAASFRNINQILNLTFCDCLTISPIYFSKLLKFNLKLLFTNNIKKSIKINFLNKHSSKLIINGINIFDKDHKKFINIISTIINNL

SEQ ID NO: 4587 - protein, 473 aa, Oryza sativa (japonica cultivar-group)
MDMAAAAAEVSTPPSLVKMTEKALDEMPQWSWQSVVDAVRQCQRLLPTADATGVFDRVVGALVSHVAVSPGDATPTSSSPESSAFRFSCDTKSSCLSARCTSRTWWFEDLAVVLGPGMVERVAGALLARGTDHGVVSRFLFYYLKCRVAGAATADDKRAMLEAAIAAMSGLDRSSVSCRGLFGILRISSPLKLPTSCHDSLVAMIGAKLDHATLDNLLVPAPPGTTSSLYDVTLVLRFLDAFLHHAAATGARGETPRLKKVGKLVDLYLAEVAPDPSLRPAMFVELATALPAAARDCHDALYRAIDVYFQVHTRLTEEEKMRICKGINYEKLSPECCKHLARNAGFPTRAAVQALASQHTVLKSLLRGGGPDEHLRPVSAAKHRAGGEDHDDLVAAGGQVVLYAGRLDLSLESQNLRSLLDGMHWRVMELEKVCSRMKTQMSKMKAARRATGGGGGAAAGRRAASRSLPRMCS

SEQ ID NO: 4588 - protein, 392 aa, Escherichia coli
KITLQNGKLNVPENPIIPYIEGDGIGVDVTPAMLKVVDAAVEKAYKGERKISWMEIYTGEKSTQVYGQDVWLPAETLDLIREYRVAIKGPLTTPVGGGIRSLNVALRQELDLYICLRPVRYYQGTPSPVKHPELTDMVIFRENSEDIYAGIEWKADSADAEKVIKFLREEMGVKKIRFPEHCGIGIKPCSEEGTKRLVRAAIEYAIANDRDSVTLVHKGNIMKFTEGAFKDWGYELAREEFGGELIDGGPWLKVKNPNTGKEIVIKDVIADAFLQQILLRPAEYDVIACMNLNGDYISDALAAQVGGIGIAPGANIGDECALFEATHGTAPKYAGQDKVNPGSIILSAEMMLRHMGWTEAADLIVKGMEGAINAKTVTYDFERLMEGAKLLK

SEQ ID NO: 4589 - protein, 187 aa, Zea mays
  misc_feature (152)..(152): Xaa can be any naturally occurring amino acid
WVPRGRPGIISKLLEVYRGFEGVDVLVDVGGGTGSTLRMVTAKYKHLRGVNYDLPHVIAQAPPVQGVEHVGGSMFEYIPSGNAILLKWILHLWRDEECIKILKNCHRALPANGKVIVVECVLPASPEPTQVAQGALLLDVVMLNRLRGAKEXRTEREFAELAAEAGFSGGCRATYVFTGAWALEFTK

SEQ ID NO: 4590 - protein, 429 aa, Xanthomonas axonopodis pv. citri str. 306
MSDLDQVTLNAGDKSVVLPVLKPTLGNDCVDISKLTKETGLFTYDSGFTATASCKSAITYIDGDNGVLLYRGYPIEQLAEKSSFLEVSYLLMNGELPTADEFKKFDHEVTHHTMMHESLKNFLGGFRHDAHPMAMLAGSVASLSAFYHDTLDLNDPEQRRQAAIRLIAKVPTLAAAAYRYSIGWPIRYPRNNLNYVDRFLHMMFEVPSEPLEINPVVAKALDLLFILHADHEQNASTSTVRLVGSTGANPYASVAAGITALWGPAHGGANEAVLKMLEEIGTADNVESAVAKAKDKNSSFRLMGFGHRVYKNFDPRAKIIREMTHKVLGELGVNDPLLEVALKLEEAALKDDYFVQRKLYPNVDFYSGIIYKALNIPVEMFTVMFAIARTAGWVSHWLEQQVDPEMKIGRPRQIYTGYDKRDYTDSAKR

SEQ ID NO: 4591 - protein, 297 aa, Saccharomyces cerevisiae
MSGPPPPYEEQSSHLYGQPASSQDGNAFIPEDFKYSTVVISCEPIIRQRFMHKVYSLLSCQLLASLSFCYWASVSTSLQNFIMSHIALFYICMVVSLVSCIWLAVSPRPEDYEASVPEPLLTGSSEEPAQEQRRLPWYVLSSYKQKLTLLSIFTLSEAYCLSLVTLAYDKDTVLSALLITTIVVVGVSLTALSERFENVLNSATSIYYWLNWGLWIMIGMGLTALLFGWNTHSSKFNLLYGWLGAILFTAYLFIDTQLIFRKVYPDEEVRCAMMLYLDIVNLFLSILRILANSNDDN

SEQ ID NO: 4592 - protein, 238 aa, Petunia x hybrida
MGRGKIVIQRIDNTTSRQVTFSKRRSGLLKKAKELSILCDAQVGLIIFSSTGKLYEFASNSMRSVIERYYKMKEEHHLMSPMSEVKYWQREVASLRQQLHYLQENHRQLLGEKLSGLGIKDLTHLENKLEMSLKGVRKQKEQILTDEIKEITRKGNLIHQENIELYKKVNLIRQENTDLQKKVYEKGCGSEPNEGVQATFAISNGYDLHAPIYLQLRPPQTQKNQTSTSVMQFGLQLH

SEQ ID NO: 4593 - protein, 194 aa, Saccharomyces cerevisiae
MVTSNVVLVSGEGERFTVDKKIAERSLLLKNYLNDMHDSNLQNNSDSDSDSDSETNHKSKDNNNGDDDDEDDDEIVMPVPNVRSSVLQKVIEWAEHHRDSNFPDEDDDDSRKSAPVDSWDREFLKVDQEMLYEIILAANYLNIKPLLDAGCKVVAEMIRGRSPEEIRRTFNIVNDFTPEEEAAIRRENEWAEDR

SEQ ID NO: 4594 - protein, 72 aa, Brassica napus
  misc_feature (63)..(63): Xaa can be any naturally occurring amino acid
MADGRCCTFLEILFAIILPPLGVFLRFGCCRIEFCICLLLTILGYVPGIIYAIYVLVALDSDXHEREYYTLA

SEQ ID NO: 4595 - protein, 292 aa, Rubrivivax gelatinosus PM1
MPVDAHAQGLLDALKAQGLKSFEQMTIAEARGAIETFVGLQAPPEEVKQVHDLTVKGPAGELQYRIFVPAGPTPMPVLVYFHGGGWVGGSLAVVDEPCRAIANRCGAVVIAASYRLSPEARFPAATDDAYAAVQWASANAATYGGDASRLGVMGDSAGANLAAVVSMMARDRKGPAIKAQILTYPVIQRDGDFASRKANEEGYLLTSAGVAWFWKQYLASDADAVNPYASPIMAKDLTGLPPALVMTAEFDPARDEGEAYGKALAKAGVPVTVRRFEGLIHGVFGSADQPAS

SEQ ID NO: 4596 - protein, 359 aa, Triticum aestivum
  misc_feature (203)..(203): Xaa can be any naturally occurring amino acid
  misc_feature (223)..(223): Xaa can be any naturally occurring amino acid
MGSMAAEMTAVEEEACIYAMQLSSTAVLPLTLKNAIELGMLEVLMGAGGKMLSPSEVAARLPPTATNPDAPAMVDRMLHLLASYKVVSCEVEEGTHARRYGPTPVCKWFTPNQDGISMAPLLLLTNDKVPMESLYHLKDAVLDGGLPFHKAHGMTMYEYTKTDARLNRVFNEAMKGYTTIVTGKLVDLYTGFQDVATLVDVGXGGIGATIQAITSKYPHIKGXINFDLAHVIAEAPHSPGVEHVAGDMFKNVPSGDAIVLKWILHNWTDEHCTTLLRNCYDALPAHGKVVVVEGILPVKPEATSRGQQASLSDMIMLTHTAGGKERNQREFEELAKAAGFTGVKTAYIYSNTWVIEFTK

SEQ ID NO: 4597 - protein, 282 aa, Tropheryma whipplei TW08/27
MVFVLTYVPSVLLGDGVSIPQFGLGTYELPPNETSSVVQSAIELGYRHIDTASLYANEREVGRAIASSGIKREEFFVTTKLWNSDQPKPREAFERSLDLLSLDYVDLYLIHWPCPPSELYINVWEVLLELKESGRAKSVGVSNFLSEHINKIKEAGFPLPSVNQIELHPWLQQRELVLSCRNYGIQIESWGPFARFSKDLDAFPELTRPAKEYGKTPAQVILRWHIQKGYVVFPKTVHAERLRQNIDIFDFDLTPDEISGIDSLDAGFRTGPDPSSFRAGLD

SEQ ID NO: 4598 - protein, 429 aa, Acidithiobacillus thiooxidans
MTTHIQKPATGSPLTLLNGVLQVPDQPIIPFIEGDGIGCDVTPAMRSVVDAAVAKVYGGQRQIAWMELFAGQKAVQLYGEGQYLPDETMAAIREYKVAIKGPLETPVGGGIRSLNVAMRQDLDLYVCLRPVRYFEGTPSPMRHPEKVDMVIFRENSEDIYAGIEWPAGSPEAEKIIRFLREEMGVTKIRFPDSSAIGIKPVSTEGSERLIRRTIQYALEHGKPSVSLVHKGNIMKFTEGGFRDWGYALAEREFAGRVFTWRQKAAISKAEGKAAGQKAEQQAIADGKLIIKDVIADNFLQQILLRPEDYSVVATLNLNGDYVSDALAAEVGGIGMAPGANLSDTHAIFEATHGTAPDIAGQGKANPSSLILSAVMMLEHLGWGEAAQAIVAAMNATIAAGEVTGDLAALRGDVPALSTTEFTAALIRRF

SEQ ID NO: 4599 - protein, 202 aa, Bacillus halodurans C-125
MGTSNQPHIVWHEASVSKEERQKRNRLKSCVVWFTGLSGSGKSTLANALDRKLFEEGIHSYVLDGDNIRHGLNAGLGFSEEDRKENIRRIGEVAKLFVDAGVVTSTAFISPFREDRDNVRGILDDGEFIEVYVRCPLETCEKRDPKGLYKKARSGDIPEFTGISSPYEEPVNPELIIDTDQLAVEEAVEKIYAYLHAQESGK

SEQ ID NO: 4600 - protein, 399 aa, Bacillus cereus ATCC 14579
MLANQINERSLLLHKELVGKIEITSKVEVNSADDLSLTYTPGVAESCKAIAADEETVYDYTARGNMVAVVSDGTAVLGLGNIGPKAAMPVMEGKSILFKKFANVDAFPLCLGTTDVDEIVTLVKNLEPTFAGINLEDIAAPRCFEIEKRLKEETNIPVFHDDQHGTAIVVLAAVINALKVVSKQMDNVKIVINGAGSAGIAIGKLLLKAGAKHITLVSLEGIVCEGETWMNEAQIEVSKKTNREHVRGTLKEAIHQADIFIGVSAPNVLTKELVQTMNEKAIVFAMANPIPEIFPEDALEAGAAVVGTGRSDYANQVNNVLAFPGIFRGALDVRATDITEEMKLAAAYGIANIITDEERNANYVIPNPLDKRVVPSVAEAVAKAAIDSGVAQITKIPRY

SEQ ID NO: 4601 - protein, 321 aa, Ralstonia metallidurans CH34
MPAQPLDSQVAQLLDLIARAKRPAIHTMDPVDAKIAYEKSAPILDLSPAPVHGVEDFQVTARDGHAIPVRLYSPREASWADPLPLLVYFHGGGFTVGSVNSHDSLCRMFCNGAECLVLSVDYRLGPEWKFPVAANDAFDVLHWVFEEAARIGADATRIALGGDSAGGTLAAACAVEARDHGLAPVLQMLIYPGTCARQDTPSHRALAEGYLLTAEMIQWFFSQYLDVDASRDDWRFAPLDGGGEGADVRGCCPAWIAVAGYDPLHDEGVAYAAKLEAAGVVASLTDYPSMIHDFFKLGRFIGAVAGAHADATAALRRAFGI

SEQ ID NO: 4602 - protein, 294 aa, Brucella melitensis 16M
MWWPAPRKTAQKISGKGYIMTVPTVKLNDGNHIPQLGYGVWQISNDEAVSAVSEALKAGYRHIDTATIYGNEEGVGKAINGSGIARADIFLTTKLWNSDQGYESTLKAFDTSLKKLGTDYVDLYLIHWPMPSKDLFMETWRAFIKLKEEGRVKSIGVSNFRTADLERLIKESGVTPVLNQIELHPQFQQDELRLFHGKHDIATEAWSPLGQGKLLEDPTLKSIAEKHAKSVAQIILRWHIETGNIVIPKSITPARIKENFDIFDFTLNGTDHDAITKLDMADGRIGPNPSVFSA

SEQ ID NO: 4603 - protein, 471 aa, Oryza sativa (japonica cultivar-group)
MESTDEHAMESDTDLISVLPGEVLQHILSFSRIRAIVRMRRLSRRWMRVIECLQFICLDYRDFKHWKVEKFARFVDNLLLIRSKVDLHTFQLYWFHYLPLNCNDLRKWILYAVKHNVKVLDVELDMYDKTALPSRIFTCRSVEELSLQMGEAPDEDLEHVGLVLPDIIQLPSLKKLTLSDVEVDQLSLNQFIGRSPNLEDLHLINSATYLDLIASKVLKRLTLDGFMHGPKRFTISAPHLVHFECQGCALQDVSWGEKPSLESAHIDTWGKKYDGESEFIGVLLSAKTLALFGSDVKVMLEKELPACPVFERLTTLEIGKWCLTEDFYTVLRFLQLSPRLGELTLMQEELPHAARKGAETDAMPIDGMTFQCPFLETVIIQCSKGDDGINKLVNVLAANGINPKKIQVNFYEDIEEMERAENRRIIEEREKELCNFEKMAKKNPEWVDESRYADSNPETDSDEYDDDYDDF

SEQ ID NO: 4604 - protein, 413 aa, Sulfolobus solfataricus P2
MMQKIPEDGEVIKFENGKWIVPKKPIILYVEGDGIGHEITHAAMKVINKAVEKAYGSDREIKWVEVLAGDKAEKLTGNRFPKESEELIEKYRVLLKGPLETPIGKGWKSINVAIRLMLDLYANIRPVKYIPGIESPIKNADKIDLIIFRENTDDLYRGIEYPYDSEQAKKIRDFLRKELGVEVEDDTGIGIKLISRFKTQRIARMAIKYAIDHKRKKVTIMHKGNVMKYTEGAFREWSYEVATKEFRDYIVTEEEVTKNYNGVPPSGKVIINDRIADNMFQQIIIRPDEYDIILAPNVNGDYISDAAGALVGNIGMLGGANIGDTGGMFEAIHGTAPKYAGKNVANPTGIIKGGELMLRFMGWDKAAELIDSAIMESIRQKKVTQDLARFMGVRALSTTEYTDELIAIIDTLS

SEQ ID NO: 4605 - protein, 214 aa, Desulfitobacterium hafniense DCB-2
MEPIKGEQRDGQSEIRKLAILTGGGDCPGLNAVIRAAVKTACHRGIAVVGIQDGFRGAVEGDFRPLELKDVSGILPRGGTILGTTNRDNPFAYPTQVGEERQVQDRSAEVLDRFKAEGIDALIAIGGDGSLSIAWEFAKQGLKVVGVPKTIDNDLMCTDLTFGFQTAVATAQDALDRLHTTAESHHRIMILEVMGRYAGWIALYAGVAGERMSS

SEQ ID NO: 4606 - protein, 322 aa, Fusobacterium nucleatum subsp. nucleatum
MEKKLAILTSGGDAPGMNAAIRATAKIAEYYGFEVYGIRRGYLGMLNDEIFPMTGRFVSGIIDKGGTVLLTARSEEFKEARFREIAANNLKKKGINYLVVIGGDGSYRGANLLYKEHGIKVVGIPGTIDNDICGTDFTLGFDTCLNTILDAMSKIRDTATSHERTILIQVMGRRAGDLALHACIAGGGDGIMIPEMDNPIEMLALQLKERRKNGKLHDIVLVAEGVGNVLDIEEKLKGHINSEIRSVVLGHIQRGGTPSGFDRVLASRMAAKAVEVLNKGEAGVMVGIEKNEMVTHPLEEACSVDKRKSIEKDYELALLLSK

SEQ ID NO: 4607 - protein, 297 aa, Candidatus Carsonella ruddii
MNIINYLYNNKKISIDSADLNLIKNFKFNSITSNPTLILKSFLNKTYNKILNLFFIKNNKKKIIDSDKEISLYDKILIFIVGNLIPYINDKISIEIPSRISFNYNLIIIYSKKIIYLCEKYGINKSFILIKIPGTDSGIKAAKKLKEIGIEVNITLIFDINQVKKCFDYGIYLISPFVGRISDNIFCKYDSGVNFVKNIFIYKNNNNYKTKIMAASFRNINQIINLRFCDCLTISPIYFNKLSKYNLKILLNNNFNNLVKFNFYNKHSSKLIIEGLKSFDKDHKRLINLLSTIINNL

SEQ ID NO: 4608 - protein, 392 aa, Escherichia coli
KITLQNGKLNVPENPIIPYIEGDGIGVNVTPAMLKVVDAAVEKAYKGERKISWMEIYTGEKSTQVYGQDVWLPAETLDLIREYRVAIKGPLTTPVGGGIRSLNVALRQELDLYICLRPVRYYQGTPSPVKHPELTDMVIFRENSEDIYAGIEWKADSADAEKVIKFLREEMGVKKIRFPEHCGIGIKPCSEEGTKRLVRAAIEYAIANDRDSVTLVHKGNIMKFTEGAFKDWGYQLAREEFGGELIDGGPWLKVKNPNTGKEIVIKDVIADAFLQQILLRPAEYDVIACMNLNGDYISDALAAQVGGIGIAPGANIGDECALFEATHGTAPKYAGQDKVNPGSIILSAEMMLRHMGWTEAADLIVKGMEGAINAKTVTYDFERLMEGAKLLK

SEQ ID NO: 4609 - protein, 297 aa, Candidatus Carsonella ruddii
MNLLNYLYKNKKISIDSADLNLIKNYKFNSITSNPTLILKSFLNKTYNLLLNFFFYKNNKKILLDSDIQISLYDKILIFIVGNLIPFINDKISIEIPARISFNYNLIIIYSKKIIFLCNKYGININKVLIKIPGTDSGIKAAKKLKEIGIETNITLIFDINQVKKCLDFGVYIISPFIGRISDSIYCKYDSGVNFVKNIYTYKNNNNYKIKIMAASFRNINQIINLTFCDCLTISPIYFLELLKFNLKLLFKNKIKKTLKINFFNKYSSKLIIEGIKSFDKDHKKLINIISTIINNL

SEQ ID NO: 4610 - protein, 290 aa, Solanum tuberosum
LNSSYRVPFESFRVPFVDLQEATNNFDEKFHIGLGGFGKVYRGVLRDGTKVALKRCKRESSQGIEEFRTEIEILSFCSHPHLVSLIGYCDETNEMILVYDYIENGNLRSHLYGPDLPTMSWEQRLEICIGAARGLHYLHTSAVIHRDVKSINILLDENFVAKITDFGISKKGTELDQTHLSTLVQGTIGYLDPEYFIRGQLTEKSDVYSFGVVLFEVLCARPAIVQSLPREMVNLAEWAVDSHNKGHLEQIIDPDLAAKIRPESLRKFGETAVKCLALSSEDRPSMGDVL

SEQ ID NO: 4611 - protein, 446 aa, Lycopersicon esculentum
MKKVKRKLGKYEVGRTIGEGTFAKVKFARNTETGENVAIKVLAKSTILKHRMVEQIKREISIMKIVRHPCIVRLHEVLASQTKIYIVQEFVTGGELFDKIVHLGRLSEDEARRYFQELIDAIAHCHSKGVYHRDLKPENLLLDFQGNLKISDFGLSALPQQGVELLYTTCGTPNYVAPEVLGNRGYDGAAADVWSCGIILYVLMAGYLPFDETDLPTLYTKIKAAEFSCPFWFSPGATSLIQKIIDPNPQTRIKIDGIKRDPWFRKNYRAVKAKADEVVNLDDIHAVFDDIEDAFVSEKSEDSESGPLVMNAFEMITLSQGLNLSALFDRRQDYVKRQTRFISRQPAKVVIETIEAAAESLGLKVHTRDYKTRIEGVTANRAGQFAVVLEVFQVAPSLFMVDVRKAAGDTLEYHKFYKTFCTKIDDVIWKPKEGMSNAVLLRTRTR

SEQ ID NO: 4612 - protein, 493 aa, Oryza sativa (japonica cultivar-group)
MTRVIHDSGEGMQKEALAMVSSDVNFPKGHFPDYKIGPNNQIIDPEEIHEAVPLKEIVAKETAQLLEQRRRLSVRDLKEKFEKGLSGASKLSEEAKRREAASLDRQVLLKKLRDVLDTLKGRVAGRNRDDADEAISLVEALAVQLTQREGELIYEKAEVKKLASFLKQATEDARKVAEEERALALAEIEKARTAIAIVEKGLQEHDAASSSREKEEIEGLRKEVREARRIKMLHQPSKVMDMEFELKALRTLIAEKNQLCNQLMKELAMIKRLEEDSSDLYDLEGSDILGSQFCIIPRFDDAPDISSCPTQWYRVISGGNRNLILGATKPTYAPEPFDVGRLLQAEIVLNAEKVTIQTMGPINPAAGLEHYVESLMKRADVEFNVVVTQMNGNDYSSNSVHAFHIGKMRIKLRKGWSTKARESYSTTMKLCGSRGGGNAAATAVFWQARKGLSYTLAFETDRDRNAAIMLARKFASNCNITLTGPGDEVHAGS

SEQ ID NO: 4613 - protein, 161 aa, Nostoc punctiforme PCC 73102
MSNTISDIAVKTINGEDKQLKDYTGKVLLIVNVASYCGYTSQYEGLEKLNQKYREQGLRILGFPCNDFGAQEPGSNEEIVQFCTSKYSVTFELFDKIHAKGPQQHPLYERLTKAVEPTGTIAWNFEKFLVNKKGEVTARFNSSVQPNSPELIAIIEKELAK

SEQ ID NO: 4614 - protein, 344 aa, Arabidopsis thaliana
MATISFSHNHQSSDNRRGGSHHHRHGPVVEEIEGLIKVFNDGCVERPPIVPIVSPTIHPSSKATAFDIKLSNDTWTRVYIPDAAAASPSVTLPLLVYFHGGGFCVGSAAWSCYHDFLTSLAVKARCVIVSVNYRLAPEHRLPAAYDDGVNVVSWLIKQHISTGGGYPSWVSKCNLSNVFLAGDSAGANIAYQVAVRIMASGKYANTLHLKGIILIHPFFGGESRTSSEKQQHHTKSSALTLSASDAYWRLALPRGASRDHPWCNPLMSSAGAKLPTTMVFMAEFDILKERNLEMCKVMRSHGKRVEGIVHGGVGHAFHILDNSSVSRDRIHDMMCRLHNFIHLS

SEQ ID NO: 4615 - protein, 157 aa, Brassica napus
MADSDNDSGGHKDGGGASSREQDRFLPIANVSRIMKKALPANAKISKDAKETVQECVSELISFVTGEASDKCQREKRKTINGDDLLWAMTTLGFEDYVEPLKVYLQKYREVEGERMTPGGRQGDKEGGGGSGGMYGGVVTMGHHHHQRHVYGGSGMN

SEQ ID NO: 4616 - protein, 290 aa, Solanum tuberosum
LNSSYRVPFESFRVPFVDLQEATNNFDEKFHIGLGGFGKVYRGVLRDGTKVALKRCKRESSQGIEEFRTEIEILSFCSHPHLVSLIGYCDETNVMILVYDYIENGNLRSHLYGPDLPTMSWEQGLEICIGAARGLHYLHTSAVIHRDVKSINILLDENFVAKITDFGISKKGTELDQTHLSTLVQGTIGYLDPEYFLRGQLTEKSDVYSFGVVLFEVLFARPAIVQSLPREMVSLAEWAVDSHNKGQLEQIVDPDLAAKIRPESLRKFGETAVKCLALSSEDRPSMGDVL

SEQ ID NO: 4617 - protein, 486 aa, Nostoc punctiforme PCC 73102
MNKHIRPWQRLLALAIGSMVFAVFAPTIVQATDPPTVQSLSETTTKLQISIDTIWVLITGFLVFFMQTGFAMLEAGLNRQRGVVNALLENFINAAVTILVWWGIGFGIAFGTSAGGLVGIDTFFLSQLPGADGSYILAAPGSTAAINTYTLFFFQFAFAATATTIATGSMAGRTDFIGDLIYSAIMGAIAYPIVVHWVWNSDGWLSKLSYHDFAGSSVVHTVGGWTALVGAYLLGSRPGRPAWGTLPPAHNLGLATLGTMILWFGWYGFNPGSTLSTGNTGLIGLVTVNTTLSAGAGALSAIIFQYTRKGKWDLVYSLNGSLAGLVAITAPCAYVAPWASVLIGLTSGILVTVGMDLIESVHIDDPVGAFAVHGINGMMGTLSVGFLGQAELTLNQKAGLFLGGGFELLGIQLLGVVAIAVFTVAFSFLMFGGLKAVGHLRVNSEADRIGIDAYEHGASVWSDVYAIEKKEINCAETTEIEALDSE

SEQ ID NO: 4618 - protein, 363 aa, Corynebacterium diphtheriae NCTC 13129
MKAARYYDQKDIRIEEISEQPLLPGTARIKVAWCGICGTDLHEFLEGPLFVPEHHHPHPVSGEDSPVTLGHEMSGVITEVAEDVTDLAVGDHVVVEPYLIHDDVDTSEANPFYHLSRDMNFIGLAGGGGGLSENIVVKRRWIHKISPDLPLDEAALIEPLSVGYHAVERAGFASEEAAKGKVALVGGAGPIGLLTASVLKAFGATVVISELSPLRRKKALDSGAADYALNPAEVDVVEEIAKLTDGKGADVAFECTSVQVVLDTLMDAVRPGAVIVVVSIWSKRSNFDIHKLVMKEIDLRGTIAYSHAHPNTIKLVESGKINLKPFITGKIALQDIVDKGFDTLINHNETAVKILVSPSGVGL

SEQ ID NO: 4619 - protein, 290 aa, Glycine max
  misc_feature (11)..(11): Xaa can be any naturally occurring amino acid
ALTKQGADLLXTTCGTPNYVAPEVLSNRGYDGAAADVWSCGVILYVLMAGYLPFEEADLPTLYRRINAAEFVCPFWFSADTKSFIQKILDPNPKTRVKIEEIRKEPWFKKNYFPVKLGEDEQVNLDDVRAVFDDIEDQYVAERSEITEGGPLIMNAFEMIALSQGLNLSPLFDRHQDYVKRQTRFVSRKPAKVIISSIEAVAESMGLKVHSRNYKVRLEGVSANRVGQFAVVLEVFEVAPSLFMVDVRKATGDTFDYHKFYKNFCGKLGNIIWRPAGTMPNSNLRKQMTL

SEQ ID NO: 4620 - protein, 328 aa, Triticum aestivum
MKTLLILTIIAVALTTTTANIQVDPSGQVQWPQQQQPCSNPQQPFSQPQQPFSQQPQQIFPQPQQTFPHQPQQAFPQPQQTFPHQPQQQFPQPQQPQQQFPQPQQPQQPFPQQPQQQFPRPQQPQQPFPQPQQPQLPFPQQPQQPFPQPQQPQQPFSQLQQPQQPLPQPQQSQQPFSQQQQSLIQPYLQQQMNPCKNYLLQQCNPVSLVSSLVSMILPRSDCQVMRQQCCQQLAQIPQQLQCAAIHGVVHSIIMQQEQQQQQGIQIMRPLFQLIQGQGIIQPQQPAQLEVIRSLVLGTLPTMCNVFVPPECSTTKAPFASIVADIGGQ

SEQ ID NO: 4621 - protein, 222 aa, Glycine max
  misc_feature (26)..(26): Xaa can be any naturally occurring amino acid
  misc_feature (30)..(30): Xaa can be any naturally occurring amino acid
  misc_feature (40)..(40): Xaa can be any naturally occurring amino acid
  misc_feature (148)..(148): Xaa can be any naturally occurring amino acid
  misc_feature (188)..(188): Xaa can be any naturally occurring amino acid
  misc_feature (206)..(206): Xaa can be any naturally occurring amino acid
SGYNKVMVTVEDGRNFVADAAIITVXIGIXKANLIQFEPXLPDWKVSAISDLGVGNENKIALRFDKVFWPNVELLGTVAPTSYTCGYFLNLHKATGHPVLVYMVAGRFAYDIEKLSDEAAANFVMQQLKKMFPNSSKPVSPPLMLSSXIAHHLLKVRVQYLVSRWGTDPNSLGCYSYDLVGKPLDVYXKLRAPLGNLFFGGEAVSXDNQGSVHGATQRGQAQ

SEQ ID NO: 4622 - protein, 288 aa, Glycine max
SSQLRRPPPPRDELRNNQTKRWQAIGTLKHVLYFVNLPWELKKHAIDFLLSITDEGVSRNYNEERSEWSSYVPSLFSALQAVKMVIMYAPEPELRKKSFTVLKGVLADIPNSQRFDIMKALITNTDSSSMIAIFIDLVRKEMHTAICSSRSIVKDAPQIDNKAFPDTSFWNPGILELVELVLRPPQGGPPSLPEQSDAVLSALNLYRFVLMTESAEKTNITGVLSRNNLLKAYNEWLLPLRTLVTGIMAESHSDYDEFAVDTVCTLNPLELVLYRCIELVDEKLKQST

SEQ ID NO: 4623 - protein, 99 aa, Glycine max
NFLYQWAFAIAAAGITSGSIAERTQFVAYLIYSSFLTGFVYPVVSHWFWSADGWASAISPGDRLFSTGVIDFAGSGVVHMVGGVAGFWGALIEGPRIGR

SEQ ID NO: 4624 - protein, 197 aa, Glycine max
  misc_feature (59)..(59): Xaa can be any naturally occurring amino acid
MEGVGARLGRSSTRYGPATVFTGPVRKWKKKWIHVSPSSASSNSNANNHASNASHLLLXSGPHNHASHASHLLLYKWTPLTHSQNTATTNNANAKDSPPEPPEEPPRRKFKYVPVALLEEQKNEGAEIEGTEKVDEESKPIDADSGAAEATHKNETLDEKPDINDVPMEESQVNLCMSLLFTSCFLTFSSIFPKCIV

SEQ ID NO: 4625 - protein, 123 aa, Triticum aestivum
  misc_feature (76)..(76): Xaa can be any naturally occurring amino acid
  misc_feature (91)..(91): Xaa can be any naturally occurring amino acid
  misc_feature (95)..(95): Xaa can be any naturally occurring amino acid
  misc_feature (101)..(101): Xaa can be any naturally occurring amino acid
  misc_feature (107)..(107): Xaa can be any naturally occurring amino acid
MAPTVMASSATSVAPFQGLKSTAGLPVSRRSNGASLGSVSNGGRIRCMQVLAHRGHQEFETLSYLPPLSTEALLKXVDYLIRSKWVPCLQXNKVXFIFREXNASPGXYNGRIGMWKLLMFGVH

SEQ ID NO: 4626 - protein, 486 aa, Pseudomonas aeruginosa PAO1
MIKHWINGREVESKDVFENYNPATGELIGEVASGGAAEIDAAVAAAREAFPKWANTPAKERARLMRRLGELIDRNVPHLAELETLDTGLPIHQTKNVLIPRASHNFEFFAEVCTRMNGHSYPVDDQMLNYTLYQPVGVCGLVSPWNVPFMTATWKTAPCLALGNTAVLKMSELSPLTANELGRLVHEAGIPPGVFNVVQGYGASAGDALVRHRDVRAVSFTGGTATGRRIMEAAGIKKYSMELGGKSPVLVFEDADLERALDAALFTIFSLNGERCTAGSRIFVQESVYPQFVAEFAARARRLIVGDPQDPKTQVGSMITQAHYDKVTGYIRIGLEEGATLVAGGLERPAGLPAHLSKGQFIQPTVFADVDNRMRIAQEEIFGPVVCLIPFKDEAEALRLANDVEYGLASYIWTQDIGKAHRLARGIEAGMVFINSQNVRDLRQPFGGVKASGTGREGGEYSFEVFAEIKNVCISMGSHHIPRWGV

SEQ ID NO: 4627 - protein, 503 aa, Zea mays
MDRADPARGRLAVLSSHLRGAGAEEAAGLERSPVSAPAPGPRAGALAVVDGRTGKRHEVKVSEDGTVRATDFKKITTGKDDKGLKIYDPGYLNTAPVRSSICYIDGDEGILRYRGYPIEELAESSSFVEVAYLLMYGNLPTQSQLAGWEFAISQHSAVPQGLLDIIQSMPHDAHPMGVLASAMSTLSVFHPDANPALQGQDLYKSKQVRDKQIVRVLGKAPTIAAAAYLRLAGRPPVLPLNTLSYSENFLYMLDSLGDRTYKPNPRLARALDILFILHAEHEMNCSTAAVRHLASSGVDVFTALSGGVGALYGPLHGGANEAVLKMLNEIGSMENIPDFIVGVKNRKRKMSGFGHRVYKNYDPRAKVIRKLADEVFSIVGRDPLIEVAIALEKAALSDEYFIKRKLYPNVDFYSGLIYRAMGFPTEFFPVLFAIPRMGGWLAHWKESLDDPDTKIIRPQQVYTGFWLRHYTPVRERVLSSQSEELGQVATSNATRRRRAGSAL

SEQ ID NO: 4628 - protein, 440 aa, Glycine max
  misc_feature (53)..(53): Xaa can be any naturally occurring amino acid
  misc_feature (200)..(200): Xaa can be any naturally occurring amino acid
MEQKGGVLMQRYELGRLLGQGTFAKVYHARNIITGMSVAIKITDKDKILKVGXVMRLIRHPHVVELYEVMASKTKIYFVMEYVKGGELFNKVSKGKLKQDDARRYFQQLISAVDYCHSRGVCHRDLKPENLLLDENGNLKVTDFGLSTLAETKHQDGLLHTTCGTPAYVAPEVINRRGYDGAKADIWSCGVILYVLLAGXEFKFPNWIAPDLRRLLSKILDPNPKTRISMAKIMESSWFKRGLEKPTITRNEDQELAPLDADGVFGACENGDPIEPAKDSKRCNNLNAFDIISYSSGFDLSGLFEETNRKKEARFTSDKPASIIISKLEEICIRLGLKVKKKDGGLFKLEGSKEGRKGSLGIDAEIFEITPVFHLVELKKSSGDTLEYQKLLKQEVRPALKDIVWNWQGEQPQQLQHGVVQKEEQPSYPGISDVAPPQTA

SEQ ID NO: 4629 - protein, 481 aa, Rubrobacter xylanophilus DSM 9941
MAQLLVGGERVSARGGGEMPVVNPATEEVVDTVPKGTAEDVEAAVAAAKGALAEWSGKDPDERAAIMRAGIGAVKERGREIAELLVREQGKPLSEAMGELHHFIHGMDFYADLASKVRGAYAPLPSSLGKSYGMVIKRPVGVCAAIVPFNFPLTLMGTKVGPALAGGNTVVVKPAETTPLATLRVAELFAEAGLPAGVFNVVTGEGPEVGEALVAHPDVRRVAFTGSTEVGRRIMELAGPQFKRVSVELGGSDPVIVCPDADVDAAVKGVNIGRFFNAGQACLAAKRVYVFDEVYDEFMEGLIKRVSRYELGDGLTKAEKPKIRMGPMNSARYRDQVASQLEEALGRGARVVYQGEWGGEKGYFFPPAVIEGAPHDSRVVREETFGPLLPVFRVGDLDEALRLANDSRYGLGSSIWTRNIRWIHRAAQEIEAGMTWVNQLHYGYDELPFGGVKDSGVGREHGPEALEYYLESKSVVIGGLD

SEQ ID NO: 4630 - protein, 510 aa, Eustoma grandiflorum
MAVGNGVLLHIAASLMLFFHVQKLVQYLWMNSRRHRLPPGPIGWPVLGALRLLGTMPHVALANMAKKYGPVMYLKVGSCGLAVASTPEAAKAFLKTLDMNFSNRPPNAGATHLAYNAQDMVFADYGPRWKLLRKLSNIHILGGKALQGWEEVRKKELGYMLYAMAESGRHGQPVVVSEMLTYAMANMLGQVMLSKRVFGSQGSESNEFKDMVVELMTVAGYFNIGDFIPSIAWMDLQGIQGGMKRLHKKFDALLTRLLEEHTASAHERKGSPDFLDFVVANGDNSEGERLQTVNIKALLLNMFTAGTDTSSSVIEWALAELLKNPIILRRAQEEMDGVIGRDRRFLEADISKLPYLQAICKEAFRKHPSTPLNLPRIASQACEVNGHYIPKGTRLSVNIWAIGRDPSVWENPNEFNPDRFLERKNAKIDPRGNDFELIPFGAGRRICAGTRLGILLVEYILGTLVHSFVWELPSSVIELNMDESFGLALQKAVPLAAMVTPRLPLHIYSP

SEQ ID NO: 4631 - protein, 301 aa, Arabidopsis thaliana
MKLNEEYVKFLGEGAYSFVDLFKYTKSDGSSFHAAVKSSDDENSLLKEFHILSELKGCPRIIQCFGNDLEEGFDDKGNRVYKLLLEYASEGSLSDFMNNCVDRKLPDLMIRDFTRMILQGLVSIHSHGYVHCDLKPENVLVFPCGDSYEVKISDFGLSLQVGEVPDHWKIEYPFVGTLNYMPPESLHDGVANKTLDLWSLGCLVLEMYVCKKPWIGFIPEDFVYILSNGNPPEIPESLPCDARAFIQKCFSRNPKERGTASELLSHRFLRQEKSKLKMISPFNLLKFKKFLNKLLRLKNFL

SEQ ID NO: 4632 - protein, 156 aa, Zea mays
MLLLLCRVDVMCGILVGLGCSHWAQAKRARILVWSGRVKHRGPDWWCLYHDDGNFLAQQRLADCSPLSGDQLLFNEDRTDVVVVNGEIYNHKNVRKQFAGTHDYRRCSDCGVIMPLHDNYSENFENMMDRPFVFVLYHIRDRTNGVESDAIVDEPL

SEQ ID NO: 4633 - protein, 457 aa, Staphylococcus aureus subsp. aureus Mu50
MAIAVLLNRMFRMEHNPLFEYIYQQKEDIDACYFIIPEEDMSSASDLKAQFYRGTLQRFYQSLHAEKLTPYVMSYDDIISFCKENNISEVVIAGDIMSYHLEEYDILHQRSLFNEARIAVTLIRGNHYFKASKTMNQQGEPYKVFTSFYRKWRPYLRHRDVYHYDLKSFEDFVIASPDDLVFDDIAFGSSQVIEQNKWQHFLDQDIQNYESGRDYLPEVLTSQLSVALAYGLLDIIEIFNDLLARYDEDEANHEAFIRELIFREFYYVLMTQYPETSYQAFKPKYRQIKWSQNEANFNAWCEGQTGFPIIDAAIMELTQTGFMHNRMRMVVSQFLTKDLFIDWTWGEKFFRKHLIDYDAASNIHGWQWSASTGTDAVPYFRMFNPIRQSERFDAKALYIKTYLPIFNQIDAKYLHDTQRNESNLFEQGIELGSHYPRQMVDHQEKRTQVLATFKALD

SEQ ID NO: 4634 - protein, 457 aa, Staphylococcus aureus subsp. aureus MSSA476
MAIAVLLNRMFRMEHNPLFEYIYQQKEDIDACYFIIPEEDMSSASDLKAQFYRGTLQRFYQSLHAEKLTPYVMSYDDIISFCKENNISEVVTAGDIMSYHLEEYDILHQRSLFNEARIAVTLIRGNHYFKASKTMNQQGEPYKVFTSFYKKWRPYLRHRDVYHYDLKSFEDFVIASPDDLVFDDIAFGSSQIIEQNKWQHFLDQDIQNYESGRDYLPEVLTSQLSVALAYGLLDIIEIFNDLLARYDEDEANYEAFIRELIFREFYYVLMTQYPETSYQAFKPKYRQIKWSQNEADFNAWCEGQTGFPIIDAAIMELTQTGFMHNRMRMVVSQFLTKDLFIDWTWGEKFFRKHLIDYDAASNIHGWQWSASTGTDAVPYFRMFNPIRQSERFDAKALYIKTYLPIFNQIDAKYLHDTQRNESNLFEQGIELGSHYPRQMVDHQEKRTQVLATFKALD

SEQ ID NO: 4635 - protein, 153 aa, Nicotiana benthamiana
MKMIVLRSSDGETFEVEESVALESQTIKHMIEDDCADTSIPLPNVTSKILAKVIEYCKRHVDAASKTEDKAVEDDLKAFDADFVKVDQSTLFDLILAANYLNIKRLLDLTCQTVADMIKGKTPEEIRKTFNIKNDFTPEEEEEVRRENAWAFE

SEQ ID NO: 4636 - protein, 297 aa, Candidatus Carsonella ruddii
MKFFDFIKNKTKISIDSADINFIKNKLFNAATTNPSLILKSILSKVYNKLLYAFLLKNFKKKIIDSDYNISLYDKLLVNIIANIIPYIEEKISIEIPARISFNYNKIIFYSYKIIYLCEKIGINLKKILIKIPATNSGIKAAKQLKNNNINSNLTLIFNLTQAKKCFDSGIYIISPFVGRVSDSIYCKYDSGVNFVKNLVNLKNNNNYSTKIMAASFRNINQIINLTCCDFITISPIYYNKLKNINYKNSVLNYKSNIDFCNNENYNSIKLLNNGIKQFDIDHNRLIKLISNLINNL

SEQ ID NO: 4637 - protein, 182 aa, Glycine max
MASKIFYLLSLLLLAHLLQPHVFVKGDGSLIEKTCKNTKYYNLCFSSLKSNPSSANADPKGLAVIMVGIGMANATSTSLYLSSKMLGTANNNDSTFKRVLKECAEKYKYASDALQASAQDLVNEAYDYASMHIIAAYDYSNVCHNLFKLYSGLVYPSELAPREDGLKCLCDVALGIVENLNR

SEQ ID NO: 4638 - protein, 153 aa, Zea mays
  misc_feature (25)..(25): Xaa can be any naturally occurring amino acid
  misc_feature (28)..(28): Xaa can be any naturally occurring amino acid
  misc_feature (33)..(34): Xaa can be any naturally occurring amino acid
  misc_feature (44)..(44): Xaa can be any naturally occurring amino acid
  misc_feature (47)..(47): Xaa can be any naturally occurring amino acid
  misc_feature (52)..(52): Xaa can be any naturally occurring amino acid
  misc_feature (59)..(59): Xaa can be any naturally occurring amino acid
MCGILAVLGCADEAKGSSKKSPVLXLSXRLKHXXPDWSALRAVXDCXLSPQXLGIIDRXSGEQPSTGPRGAPPNGKIKTPWTSGAPSRGKAKFKNRREVEEFPNLSKRWEKNFGKFGRGVLPFGGGETPPGGTAREKKFFRGGRQPPRGGPPL

SEQ ID NO: 4639 - protein, 314 aa, Zea mays
MSATGRAPCGLPRIGLGTAVQGPRPDPVRAAVLRAIQLGYRHFDTAAHYATEAPIGEAAAEAVRTGLVASREDLFVTSKVWCADAHRDRVLPALRRTLSNLQMEYVDLYMVHWPVTMKAGRFTAPFTPEDYEPFDMRAVWEAMEECHRLGLAKAIGVCNFSCKKLETLLSFATIPPVVNQVEINPVWQQRKLREFCRAKGIQLCAYSPLGAKGTHWGSDSVMDSGVLHEIAMSKGKTVAQVCLRWVYEQGDCLIVKSFDEGRMKENLDIVDWELSEEERQRISKIPQRKINQGRRYVSEHGPYKSFEELWDGEI

SEQ ID NO: 4640 - protein, 385 aa, Triticum aestivum
IDPDCSWVEQWVHRAGPRKDIYYEPNEVKAAIVTCGGLCPGLNDVIRQVVFTLETYGVKNIVGIPFGFRGFFEKGLKEMPLSRNLVENINLAGGSFLGVSRGGAKTSEIVDSIQARRIDMLFVLGGNGTHAGANAIHDECRKRKLKVSVVAVPKTIDNDIPLMDKTFGFDTAVEEAQRAINSAYIEARSAYHGIGLVKLMGRSSGFIAMHASLSSGQVDVCLIPEVSFALDGEYGVLQHLEQLIKNKGFCVVCVAEAAGQELLQNSGATDASGNAILSDIGVHMQQKIKTHFKGIGVHADIKYIDPTYMVRACRANASDAILCTVLGQNAVHGAFAGFSGITSCICNTHYVYLPVTQVITAPKRVNHKGRMWHRCLTSTGQPDFR

SEQ ID NO: 4641 - protein, 392 aa, Escherichia coli
KITLQNGKLNVPENPIIPYIEGDGIGVDVTPAMLKVVDAAVEKAYKGERKISWMEIYTGEKSTQVYGQDVWLPAETLDLIREYRVAIKGPLTTPVGGGIRSLNVALRQELDLYICLRPVRYYQGTPSPVKHPELTDMVIFRENSEDIYAGIEWKADSADAEKVIKFLREEMGVKKIRFPEHCGIGIKPCSEEGSKRLVRAAIEYAIANDRDSVTLVHKGNIMKFTEGAFKDWGYQLAREEFGGELIDGGPWLKVKNPNTGKEIVIKDVIADAFLQQILLRPAEYDVIACMNLNGDYISDALAAQVGGIGIAPGANIGDECALFEATHGTAPKYAGQDKVNPGSIILSAEMMLRHMGWTEAADLIVKGMEGAINAKTVTYDFERLMEGAKLLK

SEQ ID NO: 4642 - protein, 384 aa, Glycine max
  misc_feature (259)..(259): Xaa can be any naturally occurring amino acid
  misc_feature (308)..(308): Xaa can be any naturally occurring amino acid
  misc_feature (338)..(338): Xaa can be any naturally occurring amino acid
PRVRLSPEIIETCLMWYARVDPPAVSRSNRKPLPSSSSSSSVATEAEQKEILETLVSNLPLEKSSKAATATRFLFGLLRTTNILNASEACRDALEKKIGLQLEEATLDDLLVPSYSYLNETLYDVDCVERILSQFLEGLEARTAAETTEDAAATRSPALMLVGKLIDGYLSEIASDANLKPEKFYNFAISLPDEARLFDDGLYRAVDVYLKAHPWVLEEEREKICGLLDCQKLTLEACTHAAQNERLPLRSVDQELFFXQLQLPQAIAGNFDGGGSRRETGKAINGAGAESGGQKKIKIRDRARAGTXGTWRVAMKDNQVLRLDMDSMKTHVHQLKRXCSSMKRVIFKINKFATYLGGWKATHDLKYPCKFKTQVCESQQSTDR

SEQ ID NO: 4643 - protein, 369 aa, Glycine max
MSSNSRESQVHPEIAKVEDPYLSAVLLCFSRVLPAVLNAAIDLNLFDIIAKAQSSCDSSFSASEIASLLPNQHPQLANRLERILPLLASYSLLNCSIRTNEDGKRERVYALSPVGAYFAFDKDEGSSLAPLSSLIHRGFHDMWKDVKDAIVDPNNNNHFENVHGIPPYDYMEKNAELNDIFYKAVIHAAPLELKRALKLYKGFEGVSTLVDVGGGAGETLKQILPKYPSMKGINFDLPLVIQKAPPHPGIEQIAGDMFESVPTGDAILVKFVCHNWADEDCIKFLRNFHKALPQHGKVIVFEYIIPEVPNPSYISKHTCTLDNVMFLAHGGRERTQKEFENLCKSSGFSKFHVASSDISSTLGVMEFYK

SEQ ID NO: 4644 - protein, 178 aa, Glycine max
  misc_feature (62)..(62): Xaa can be any naturally occurring amino acid
  misc_feature (75)..(75): Xaa can be any naturally occurring amino acid
  misc_feature (122)..(122): Xaa can be any naturally occurring amino acid
  misc_feature (125)..(125): Xaa can be any naturally occurring amino acid
MASSMISSPAVTTVNRAGADMVAPFTDLKSMAGFPDQKTNNDITSIASNGGRVQCMQVWPPXGKKKFETLSYLPXLNNTQLAKEVEYLLRKGWIPCLKFKLKHGFIYQEHNKSPKYYNGHYXTMXKLPMFDCTDASQVLKELQEAKTAYPNNFIHIIKFHNIHQMQYISFITYEPPSF

SEQ ID NO: 4645 - protein, 487 aa, Acinetobacter sp. ADP1
MNARFQELLPELALYAGSKKLDVNQTFQDINPCDEILIAHIPKASVEDLNAIVAVAKQGLNSTAWHEVTPLQRENLIRCFADAIEKDSTRLAQLESIDAGKPISITQTVDIPAVVAWLKYYAGWASKIMGSAGELSNVAGSFHAYSRRQPVGVVAAITPWNFPSVLSMWKIAPALAAGCCIVLKPASDTPLTALRLAEIAREIGFPEGVFNVVTGNSDIGHALATHPDIAKVAFTGSTQTGRSILQASIADFKRVTLELGGKSPVILHKDADLDKAIPTIAMGCFFNTGQVCYAGTRLYVHHDIYDEVLARLAAFTKTLKIGSSDDPNTQLGPVVNARQQHSIQEFLNKAEQQGIESLDLSAMTLPEHGFYVRPAILKNVPAHAAIMKEEVFGPVLATAAYQSLDEAIQLSNDSIYGLAAHLWTQDLSIAHQVSAALDAGTVFVNCALLADPNFPFGGFKQSGIGRENGQEVLDAYLESKSVIMALS

SEQ ID NO: 4646 - protein, 228 aa, Desulfovibrio vulgaris subsp. vulgaris str. Hildenborough
MPCYPTYPTDGQDMKSCNTFFCDGRIRRPDRERLNGHPARAFWFTGLPSAGKSTLAHIAEEVLHQRGIRTYVFDGDNVRHGLCGDLGFSEHDRKENVRRIAETVRLFLDAGILCLCAFVSPLRANRQAVRDIIGPCDFFEVYVKCPVTVCESRDVKGLYGKARQGLVENYTGISAPYEEPESPDIVVDTSRNTIEESVQSLTDFILQVMTVPCAQKDAQAPGKAVRFP

SEQ ID NO: 4647 - protein, 429 aa, Mesorhizobium loti MAFF303099
MTDFYNLVPSAPEGRFDGIERPYSPEDVKRLRGSVQIRQSLAEMGANRLWKLIHEEDFVNALGAMSGNQAMQQVRAGLKAIYLSGWQVAADANTASAMYPDQSLYPANAAPELVKRINRTLQRADQIETSEGNGLSVETWFAPIVADAEAGFGGPLNAFEIMKAFIEAGAAGVHYEDQLASEKKCGHLGGKVLIPTAAHIRNLNAARLAADVMGTPTLVVARTDAEAAKLLTSDIDERDQPFVDYDAGRTVEGFYQVRNGIEPCIARAVAYAPHADLIWCETSKPDLAQAKKFAEGVRRHHPGKLLAYNCSPSFNWKKNLDDATIAKFQRELGAMGYKFQFITLAGFHQLNYGMFELARGYKERQMAAYSELQEAEFAAEANGYTATKHQREVGTGYFDAVSMAITGGKSSTTAMHESTEHAQFRPAAE

SEQ ID NO: 4648 - protein, 306 aa, Lycopersicon esculentum
MPSHADVDRQIEQLMECKPLSEAEVKTLCEQARAILVEEWNVQPVKCPVTVCGDIHGQFYDLIELFRIGGNVLITNYLFMGDYVDRGYYSVETVSLLVALKVRYRDRITILRGNHESRQITQVYGFYDECLRKYGNANVWKYFTDLFDYLPLTALIESQIFCLHGGLSPSLDTLDNIRALDRIQEVPHEGPMCDLLWSDPDDRCGWGISPRGAGYTFGQDIASQFNHTNGLSLISRAHQLVMEGFNWCQDKNVVTVFSAPNYCYRCGNMAAILEISENMEQNFLQFDPAPRQIEPDTTRKTPDYFL

SEQ ID NO: 4649 - protein, 270 aa, Triticum aestivum subsp. macha
GTANMQVDPSSQVQWPQQQPVPQPHQPFSQQPQQTFPQPQQTFPHQPQQQFPQPQQPQQQFLQPQQPFPQQPQQPYPQQPQQPFPQTQQPQQLFPQSQQPQQQFSQPQQQFPQPQQPQQSFPQQQPPFIQPSLQQQVNPCKNFLLQQCKPVSLVSSLWSMIWPQSDCQVMRQQCCQQLAQIPQQLQCAAIHTIIHSIIMQQEQQEQQQGMHILLPLYQQQQVGQGTLVQGQGIIQPQQPAQLEAIRSLVLQTLPTMCNVYVPPECSIIKA

SEQ ID NO: 4650 - protein, 306 aa, Lycopersicon esculentum
MPSHADLDRQIEQLMECKPLSEADVKTLCDQARAILVEEWNVQPVKCPVTVCGDIHGQFYDLIELFRIGGNAPDTNYLFMGDYVDRGYYSVETVTLLVALKVRYRDRITILRGNHESRQITQVYGFYDECLRKYGNANVWKYFTDLFDYLPLTALIESQIFCLHGGLSPSLDTLDNIRALDRIQEVPHEGPMCDLLWSDPDDRCGWGISPRGAGYTFGQDIASQFNHTNGLTLISRAHQLVMEGFNWCQDKNVVTVFSAPNYCYRCGNMAAILEIGENMEQNFLQFDPAPRQIEPDTTRKTPDYFL

SEQ ID NO: 4651 - protein, 344 aa, Burkholderia cepacia R1808
MKIVKPLLIAAVVAATWSGASAATAASAQAVRPDTATSAFLAVLNGQKGPGLETLSPEKARQVLVDAQSGVKVDLSGIDVSNRTIEQDGLSVPITIVRPQQVSGTPPVFMFFHGGGWILGDFPTHERLVRDLVVQSGAVAVFVNYTPSPEAHYPVAINQAYAATKWVAAHGAEIGVDGSRLAVVGNSVGGNMAAVVALMAKDKGGPAIRFQGLLWPVTDHDFNTGSYGAYAQGHFLTRPLMKWFWNAYTKNEAQRDEIYASPLRASVAQLKGLPPALIQVAQFDVLRDEGEAYGRKLDAAGVDATTTRYDGTIHDFGLLNALANDAPTKAAMKAMGNEIAARLK

SEQ ID NO: 4652 - protein, 202 aa, Rubrivivax gelatinosus PM1
MLRNTYALLSMTLLFSAAIAAASVTFQLPAPGILLTLGGYFGLLFAVYKFKNSGWALPAVFALTGFMGYSLGPVLAKSLALPGGAQVVTMALAATGATFLALSAWVLTTRRDFSFMGGFLFAGMVIALIAGLGAVFLQVPALGLAVAAMVALLSAGLILYETSRIVTGGETNYVLATVGLYVSIFNLFTSLLSLFGFGNSDE

SEQ ID NO: 4653 - protein, 109 aa, Nicotiana benthamiana
MPSHGDLDQQIAQLMECKPLSEAEVKTLCDQARAILVEEWNVQPVKCPVTVCGDIHGQFYDLIELFRIGGNAPDTNYLFMGDYVDRGYYSVETVTLLVALQVRYRDRIT

SEQ ID NO: 4654 - protein, 259 aa, Triticum aestivum subsp. spelta
QVDPSSQVQWPQQQPVPQPHQPFSQQPQQTFPQPQQTFPHQPQQQFPQPQQPQQQFLQPQQPFPQQPQQPYPQQPQQPFPQTQQPQQLFPQSQQPQQQFSQPQQQFPQPQQPQQSFPQQQPPFIQPSLQQQVNPCKNFLLQQCKPVSLVSSLWSMIWPQSDCQVMRQQCCQQLAQIPQQLQCAAIHTVIHSIIMQQEQQQGMHILLPLYQQQQVGQGTLVQGQGIIQPQQPAQLEAIRSLVLQTLPTMCNVYVPPECSI

SEQ ID NO: 4655 - protein, 132 aa, Lotus corniculatus var. japonicus
ALYQWAFAIAAAGITSGSIAERTQFVAYLIYSSFLTGLVYPIVAHWFWSSDGWGSPARTENLLFGSGVIDFAGSGVVHLVGAVAGFWGAFIEGPRMGRFDHAGKPVPLRGHSGTLVVLGTFLLWFGWYGFNP

SEQ ID NO: 4656 - protein, 119 aa, Nicotiana benthamiana
MSSSDLVAASTPGNLDEQISQLMQCKPLSKPDVRALCEKAKEILMEESNVQPVKSPVTICGDIHGQFHDLAELFRIGGQCPDTNYLFMGDYVDRGYYSVETVTLLVALKVRYPQRLTIL

SEQ ID NO: 4657 - protein, 168 aa, Setaria italica
  misc_feature (159)..(159): Xaa can be any naturally occurring amino acid
MAAASSTTSVHDFTVKDASGKDVDLSTYKGKVLLIVNVASQCGLTNSNYTELAQLYEKYKDQGFEILAFPCNQFGGQEPGTNEEIVQFACTRFKAEYPIFDKVDVNGNNAAPIYKFLKSSKGGLFGDSIKWNFSKFLVDKEGRVVDRYAPTTSPLSIEXDIKKLLGSS

SEQ ID NO: 4658 - protein, 158 aa, Chromobacterium violaceum ATCC 12472
MSIYDFSFRRLDGSEQAMADYRGSVLLLVNTASRCGFTSQYAGLEALHRRFGPQGLAIIGFPCNQFGAQEPGDAGEIGAFCQKNYGVDFAMADKVDVNGANAHPLWQYLKRQKRGLLGQAIRWNFSKFLVDRQGRVVARFAPFTRPEKLAARIEALLK

SEQ ID NO: 4659 - protein, 445 aa, Vibrio parahaemolyticus RIMD 2210633
MKKKIGLYWFTFDLRLHDNSLLVDASSFLDELVCLYCRPSVTPFLHHFAQEVTLGRARQKFIDASLCELNDALGQLGQRLWTLDLPPYQALKYAIQYLSVTHLYSDAMAGSDEQSILHKLQDEYPHLVIVQHSVRSLFDESKLPFTLPDLPETFTQFRKCVEGIDIAHPIDAPSRLPPMPKGAQLPTLSSFYFDESALFSGGEWSGLAHCRRYFFSGLASSYKETRNGLDGMAYSTKFSPWLALGCVSPRMIHAMLKQYEQTQGANDSTYWIYFELLWREYFYWYARCYQQRLFRFGGIRNQPPLTSFYAHRFQQWKNGTTPYPIVNACMHQLNHTGYMSNRGRQLVASCLVHELGLDWRYGAAYFETQLIDYDVGSNWGNWQYLAGVGADPRGSRQFNLEKQTQMYDPNHEFIERWQGRDSRAQQDVVDMVGWPITTQQENGDK

SEQ ID NO: 4660 - protein, 177 aa, Triticum aestivum
  misc_feature (146)..(146): Xaa can be any naturally occurring amino acid
  misc_feature (170)..(170): Xaa can be any naturally occurring amino acid
MAPTVMASSATSVAPFQGLKSTAGLPVSRRSNGASLGSVSNGGRIRCMQVWPIEGIKKFETLSYLPPLSTEALLKQVDYLIRSKWVPCLEFSKVGFIFREHNASPGYYDGRYWTMWKLPMFGCTDATQVINEVEEVKKEYPDAYVXRIIGFDNMRQVQCVSFIAFKPPGXCEESGKA

SEQ ID NO: 4661 - protein, 278 aa, Bacteroides thetaiotaomicron VPI-5482
METVRLNNGVEMPILGYGVYQVTPEECERCVLDAISVGYRSIDTAQAYYNEEGVGNAVRKCGVPREELFITTKVWISNGGYEKAKASIDESLRKLQSDYVDLLLIHQPFNDYYGTYRAMEEAYKAGKARAIGVSNFYPDRFIDLAEFCEIKPAVNQVETHVFNQQVKPQEIMKKYDTKVMSWGPFAEGRNNFFSNEVLKAIGEQYGKSVAQVALRFLIQRDIIVIPKSTRKERMIENFDVFDFTLSVKDMEEIAGLDKKESLFFSHYDPEMVNFLINL

SEQ ID NO: 4662 - protein, 392 aa, Escherichia coli
KITLQNGKLNVPENPIIPYIEGDGFGVDVTPAMLKVVDAAVEKAYKGERKISWMEIYTGEKSTQVYGQDVWLPAETLDLIREYRVAIKGPLTTPVGGGIRSLNVALRQELDLYICLRPVRYYQGTPSPVKHPELTDMVIFRENSEDIYAGIEWKADSADAEKVIKFLREEMGVKKIRFPEHCGIGIKPCSEEGTKRLVRAAIEYAIANDRDSVTLVHKGNIMKFTEGAFKDWGYQLAREEFGGELIDGGPWLKVKNPNTGKEIVIKDVIADAFLQQILLRPAEYDVIACMNLNGDYISDALAAQVGGIGIAPGANIGDECALFEATHGTAPKYAGQDKVNPGSIILSAEMMLRHMGWTEAADLIVKGMEGAINAKTVTYDFERLMEGAKLLK

SEQ ID NO: 4663 - protein, 357 aa, Oryza sativa (japonica cultivar-group)
MVVPDESTIWDEVLEEADELAYVHKVPPSISFLSAGTGKRRKGEHRLKFSIRGSSSVSLNVKTENPYIGEQEVSSVMPTNRAPETMMAEQLENIKEETEDLPSEFACSTKKANVSISELLDSLQDRSASSAGTPFLLHQHTRPKEEKPKVPTSVKRTLALLGQRNLETENPLEHVIGETSSEEEDDAQNNLALINKDVKGQTMADIFQQVFNATSMDCFTLPVRSYGSGYYGRMQQILQMEKDRHAEFLRQYNREQDYLGDPKGVTVQILSRSLEGKLTICRCLFMEKSNLATTGEVSTDLDMDNSSVKRTIIFSPKICDNVDLLAGNIIHIFPPWKEVKVKEETVILCTYFSHRGV

SEQ ID NO: 4664 - protein, 279 aa, Staphylococcus aureus subsp. aureus Mu50
MLNEIQILNNGYPMPSVGLGVYKISDEDMTKVVNAAIDAGYRAFDTAYFYDNEASLGRALKDNGVDREDLFITTKLWNDYQGYEKTFEYFNKSIENLQTDYLDLFLIHWPCEADGLFLETYKAMEELYEQGKVKAIGVCNFNVHHLEKLMAQSSIKPMVNQIEVHPYFNQQELQEFCDRHDIKVTAWMPLMRNRGLLDNPVIVKIAEKYHKTPAQVVLRWHLAHNRIIIPKSQTPKRIQENIDILDFNLELTEVAEIDALDRNARQGKNPDDVKIGDLK

SEQ ID NO: 4665 - protein, 392 aa, Escherichia coli
KITLQNGKLNVPENPIIPYIEGDGIGVDVTPAMLKVVDAAVEKAYKGERKISWMEIYTGEKSTQVYGQDVWLPAETLDLIREYRVAIKGPLTTPVGGGIRSLNVALRQELDLYICLRPVRYYQGTPSPVKHPELTDMVIFRENSEDIYAGIEWKADSADAEKVIKFLREEMGVKKIRFPEHCGIGIKPCSEEGTKRLVRAAIEYAIANDRDSVTLVHKGNIMKFTEGAFKDWGYQLAREEFGGELIDGGPWLKVKNPNTGKEIVIKDVIADAFLQQILLRPAEYDVIACMNLNGDYISDALAAQVGGIGIAPGANIGDECALFEATHGTAPKYAGQDKVNPGSIILSAEMMLRHMGWTEAADLIVKGMEGAINAKTVTYDFERLMEGAKLLK

SEQ ID NO: 4666 - protein, 410 aa, Rickettsia rickettsii
DSEFAELKIRGKIFKLPILKASIGEDVIDISRVSAEADCFTYDPGFMSTASCQSTITYIDGDKGILRHRGYDIKDLAEKSDFLEVAYLLIYGELPSGEQYNNFTKQVAHHSLVNERLHYLFQTFCSSSHPMAIMLAAVGSLAAFYPDLLNFKEADYELTAIRMIAKIPTIAAMSYKYSIGQPFIYPDNSLDFTENFLHMMFATPCTKYTVNPIIKNALNKIFILHADHEQNASTSTVRIAGSSGANPFACISTGIASLWGPAHGGANEAVINMLKEIGSSEYIPKYIAKAKDKNDPFRLMGFGHRVYKNYDPRAVVLKETCKEVLKELGQLDNNLLQIAIELEAIALKDEYFIERKLYPNVDFYSGIIYKAMGIPSQMFTVLFAIARTVGWMAQWKEMHEDPEQKISRPR

SEQ ID NO: 4667 - protein, 279 aa, Staphylococcus aureus subsp. aureus MSSA476
MLNEIQILNNGYPMPSVGLGVYKISDEDMTKVVNAAIDAGYRAFDTAYFYDNEASLGRALKDNGVDREDLFITTKLWNDYQGYEKTFEYFNKSIENLQTDYLDLFLIHWPCEADGLFLETYKAMEELYEQGKVKAIGVCNFNVHHLEKLMAQSSIKPMVNQIEVHPYFNQQELQEFCDRHDIKVTAWMPLMRNRGLLDNPVIVKIAEKYHKTPAQVVLRWHLAHNRIIIPKSQTPKRIQENIDILDFNLELTEVAEIDALNRNARQGKNPDDVKIGDLK

SEQ ID NO: 4668 - protein, 191 aa, Triticum aestivum
  misc_feature (107)..(107): Xaa can be any naturally occurring amino acid
  misc_feature (156)..(156): Xaa can be any naturally occurring amino acid
  misc_feature (162)..(162): Xaa can be any naturally occurring amino acid
  misc_feature (164)..(164): Xaa can be any naturally occurring amino acid
  misc_feature (176)..(176): Xaa can be any naturally occurring amino acid
MAPTVMASSATSVAPFQGLKSTAGLPVSRRSNGASLGSVSNGGRIRCMQVWPIEGIKKFETLSYLPPLSTEALLKQVDYLIRSKWVPCLEFSKVGFIFREHNASPGXYYDGRYWTMWKLPMFGCTDATQVINEVEEVKKEYPDAYVRIIGFDNMRXVQCVSXIXFKPPGCEESGKXTGSHGPHIKPLRFQL

SEQ ID NO: 4669 - protein, 411 aa, Rickettsia sp.
DSEFAELKIRGKIFKLPILKASIGEDVIDISRVSAEADCFTYDPGFMSTASCRSTITYIDGDKGILRYRGYDIKDLAEKSDFLEVAYLLIYGELPSSEQYNNFTKKVAVHSLVNERLHYLFQTFCSSSHPMAIMLAAVGSLSAFYPDLLNFKEADYELTAIRMIAKIPTIAAMSYKYSIGQPFIYPDNALDFTENFLHMMFATPCEKYKVNPIIKNALNKIFILHADHEQNASTSTVRIAGSSGANPFACVSTGIASLWGPAHGGANEAVINMLKEIGSSENIPKYIAKAKDKNDPFRLMGFGHRVYKNYDLRAAVLKETCKEVLKELGQLDGNPLLQIAIELEAIALKDEYFIERKLYPNVDFYSGIIYKAMGIPSQMFTVLFAIARTVGWMAQWKEMHEDPEQKISRPR

SEQ ID NO: 4670 - protein, 459 aa, Mycobacterium leprae TN
MVSVQESALVVYTSGVKRLVASYRSIPATSPVRLAKPTSNLFRTRAKRDAPGLDASGLTGVIGIDTEARTADVAGMCTYEDLVAATLPYGLLPLVVPQLKTITLGGAVTGLGIESASFRNGLPHESVLEMDILTGAGELLTVSANQHGDLYRAFPNSYGTLGYSTRFRISLEPVTPFVALRHIRFHLLTEMVTAMENIIDTGGHDGVPVDYLDGVVFSANESYLCIGKRTTTPGPVSDYTGQHIYYRSIQHDNEVKEDRLTIHDYVWRWDTDWFWCSRAFGAQNQQLRRWWPRRYRRSSVYWKLMAADRRFGIVDRIEARNGRPLRERVVQDVELPIERTCEFLEWFLGSVPIAPIWLCPLRLRDHNSWPLYPIQPDHSYVNVGFWSSVPAGATEGETNRTIEAKVSALDGHKSLYSDSFYTREEFNELYGGESYNAVKKIYDPDSRLLDLYAKVVQRR

SEQ ID NO: 4671 - protein, 177 aa, Triticum aestivum
  misc_feature (30)..(30): Xaa can be any naturally occurring amino acid
  misc_feature (171)..(171): Xaa can be any naturally occurring amino acid
MAPTVMALVGPPPSLPFQGLKSTVGLPVSXGSNGASLGSVSNGGRIRCMQVWPIEGIKKFETLSYLPPLSTEALLKQVDYLIRSKWVPCLEFSKVGFIFREHNASPGYYDGRYWTMWKLPMFGCTDATQVINEVEEVKKEYPDAYVRIIGFDNMRQVQCVSFIAFKPPGCXEESGKA

SEQ ID NO: 4672 - protein, 130 aa, Triticum aestivum
MAMEARMKGTVKWFNDTKGFGFISPADGSEDLFVHQSSIKADGFRSLAEGEEVEFAVSEGDDGRTKAVDVTGPDGSFVQGGAGGGGGGGGFGSRGGGGSRGGGGFGARGGDGSGGYGGGYGGGGGGGWGR

SEQ ID NO: 4673 - protein, 363 aa, Oryza sativa (japonica cultivar-group)
MSFCERDMNKESMYQERDDMAGIRFATPPLPQQQQQQQLVECFSDEVDSRGSGGEMKDAVGSGSGQLVVVGGGDGASIEVAKKRRGRPPGSKNKPKPPVVITREAEPAAAMRPHVIEIPGGRDVAEALARFSSRRNLGICVLAGTGAVANVSLRHPSPGVPGSAPAAIVFHGRYEILSLSATFLPPAMSSVAPQAAVAAAGLSISLAGPHGQIVGGAVAGPLYAATTVVVVAAAFTNPTFHRLPADDDASVSVSVSLSGSGDADEHRGHQHKPEPQEPRQLRRPPPHLSAAAAVSAAQPVEPCGAPMYACHPQPQEVMWPPPARTPHPPPPPPWGEQEKGGEGDERGRDGVVEGRVAAAGDVE

SEQ ID NO: 4674 - protein, 411 aa, Rickettsia sp.
DSEFAELKIRGKIFKLPILKASIGEDVIDISRVSAEADCFTYDPGFMSTASCQSTITYIDGDKGILRHRGYDIKDLAEKSDFLEVAYLLIYGELPNGEQYNNFTKQVAHHSLVNERLHYLFQTFCSSSHPMAIMLAAVGSLSAFYPDLLNFKEADYELTAIRMIAKIPTIAAMSYKYSIGQPFIYPDNSLDFTENFLHMMFATPCTKYKVNPIIKNALNKIFILHADHEQNASTSTVRIAGSSGANPFACISTGIASLWGPAHGGANEVVINMLKEIGSSEYIPKYIAKAKDKNDPFRLMGFGHRVYKNYDPRAAVLKETCKEVLKELGQLDNNPLLQIAIELEAIALKDEYFIERKLYPNVDFYSGIIYKAMGIPSQMFTVLFAIARTVGWMAQWKEMHEDPEQKISRPR

SEQ ID NO: 4675 - protein, 492 aa, Oryza sativa (japonica cultivar-group)
MVPREQAEEAIVADSNGKEEEVGVMGVSAGEHGADDHHGGGGKFSMKNLLWHGGSVWDAWFSCASNQVAQVLLTLPYSFSQLGMLSGVLLQLFYGFMGSWTAYLISVLYVEYRSRKEKEGVSFKNHVIQWFEVLDGLLGPYWKAAGLAFNCTFLLFGSVIQLIACASNIYYINDRLDKRTWTYIFGACCATTVFIPSFHNYRIWSFLGLGMTTYTAWYLAIAALLNGQAEGITHTGPTKLVLYFTGATNILYTFGGHAVTVEIMHAMWKPAKFKYIYLLATLYVFTLTLPSASAMYWAFGDELLTHSNAFSLLPKTGWRDAAVILMLIHQFITFGFACTPLYFVWEKVIGMHDTKSICLRALARLPIVVPIWFLAIIFPFFGPINSAVGALLVSFTVYIIPALAHILTYRTASARMNAAEKPPFFLPSWTGMFVLNMFIVVWVLVVGFGLGGWASMVNFIRQIDTFGLFAKCYQCPKPAPALAQSPVPLPHH

SEQ ID NO: 4676 - protein, 158 aa, Glycine max
MDIRLMDLDSPLFNTLHRIMDLTEDAEKNLNAPTRTYVRDAKAMAATPADVKEYPNYYVFVIDMPGLKSGDIKVQVEDDNVLLISGERKREEDKEKEGAKYLRMERRVGKFMRKFTLPENANTDAISAVCQDGVLTVTVNKLPPPQPKKPKTIEVKIA

SEQ ID NO: 4677 - protein, 286 aa, Arabidopsis thaliana
MSQAPNPEEEDDTIEIREVWNHNLEQEMALIEQSIDDFPYVAMDTEFPGIVCKTVTANPNPNPYSIHYEYNYDTLKANVNMLKLIQLGLTLSDEKGNLPTCGTNKQCIWQFNFREFNVISDMFALDSIELLRKSAIDLEKNNECGVDAKRFAELLMGSGVVLNDKIHWVTFHCGYDFGYLLKLLSGKELPEEISDFFDQMEKFFPVVYDIKYLMGFCTNLYGGLEKIAELLGVKRVGISHQAGSDSLLTLRTFIKMKEFFFTGSLLKYSGFLFGLDNPRLLTGSKN

SEQ ID NO: 4678 - protein, 479 aa, Aspergillus nidulans FGSC A4
MSSQIDTTHYPGNIINNQFVPSARTRHSTNPSTGEPLYEVPWATEEDVDRAVEHARTAFKSWSRLPFQERSRLLVAYADAVEAERAPLAKLLVLEQGKPLSLAQTELDMSVQWLRTFVTMEVKDELLDDNEERSITQTFPPLGVCCGIVPWNWPVLLALGKVGPALITGNTMIIKPSPYTPYCDLKLGEIGMRIFPPGVLQVLSGGDELGPILTQHPGIDKITFTGSSATGKLVMQSCAKTLKRVTLELGGNDPAIICEDVDIDAIVPKITSLAFLNSGQICMLIKRVYIHESIYDAFRDAMVAFAKSIKTADGFEPDAFVGPIQNSMQYEKVKDMYSEIGKRNWKQALEGKVFENSKGYYISPAIIDNPPEDSRIVLEEPFGPIVPLLKWSDEEDVIARANSLKDGLGASVWSKDLDRAERIGRQLSAGSVWLNSHFDVAPNVPFGGHKWSGLGSEWGMTGLKQYCNSTSLWKWKKVM

SEQ ID NO: 4679 - protein, 313 aa, Triticum aestivum
  misc_feature (31)..(31): Xaa can be any naturally occurring amino acid
MQVDPSGQVQWPQQQLVPQPQQPLSQQPQQXLPQPQQTFPHQPQQQVPQPQQPQQPFLQPQQAFPQQPQQPFPQTQQPQQPFPQQPQQPFPQTQQPQQPFPQQPQQPFPQQSQQPFPQTQQPQQPFPQQPQQPFPQTQQPQQPFPQFQQPHQPFPQPQQQFPQPQQPQQSFPQQQRPFIQPSLQQRLNPCKNILLQQCKPASLVSSLWSIIWPQSDCQVMQQQCCQELAQIPQQLQCAAIHSVVHSIIQQQQQQQQQQQQQGMHILLPLSQQQQLGQELCLSFIPKLELALVGVTHDGARHFICHRYIDWCIC

SEQ ID NO: 4680 - protein, 120 aa, Nicotiana benthamiana
MSSSDLVAASTPGNLDERISQLMQCKPLSEPDVRALCEKAKEILMEESNVQPVKSPVTICGDIHGQFHDLAELFRIGGQCPDTNYLFMGDYVDRGYYSVETVTLLVALKVRYPQRLTILR

SEQ ID NO: 4681 - protein, 244 aa, Triticum aestivum subsp. sphaerococcum
PQQQPVPQPHQPFSQQPQQTFPQPQQTFPHQPQQQFPQPQQPQQQFLQPQQPFPQQPQQPYPQQPQQPFPQTQQPQQLFPQSQQPQQQFSQPQQQFPQPQQPQQSFPQQQPPFIQPSLQQQVNPCKNFLLQQCKPVSLVSSLWSMIWPQSDCQVMRQQCCQQLAQIPQQLQCAAIHTVIHSIIMQQEQQQGMHILLPLYQQQQVGQGTLVQGQGIIQPQQPAQLEAIRSLVLQTLPTMCNVYVP

SEQ ID NO: 4682 - protein, 498 aa, Mesorhizobium loti MAFF303099
MTLSFDPRAKATTLYHGEFRPMFIGGKWVAAQSGQEMQALNPATGEVLTTVPRGGAADVDAAVAAARAAFEGPWSKFSPYERQCVLLRIADLFETHWEELSVSDTLDMGLPITRTLANRRRVIGMLRFYGGMATALHGEAIDNSIPGEIVSFTRREPVGVVGAIIPWNAPTAASIWKIAPALATGCTIVLKPSEEASLTPLLIARLMQEAGVPDGVVNIVTGTGAEAGARLAEHPDVNKIVFTGSTLTGQAIARAGVTNLKRVSLELGGKSPIIVCRDADIDKAVPVAAMAVFVHSGQICIAGSRLFVAREIHDEFVRRVAEFAGRLRIGHGIEAETEIGPLINARQAGKVEGYIKAGSDEGAKLVAGGSRLTGALYDGGNFIAPTVFGSVSDKMTIAREEIFGPVISAMPFDTLDEVVARANATPYGLAAGIFTTHLGTAHKLARRIRAGSVWVNMYHAIDPAVPFGGMKMSGYGREGGIEHLHEYLETKSVWIQTD

SEQ ID NO: 4683 - protein, 355 aa, Spirulina platensis
MTQNYRITLLSGDGIGPEIMAVAVDVLKAVGKQLDLNFEFKEALMGGVAIDATGEPLPEESLQACRDSDAVLLAAIGGYKWDNLPRPERPETGLLALRAGLGLFANRARLLFCPHVLDASSLKREVVEGVDIMVVRELTGGIYFGQPKGIFETETGKNEGSNTMAYGESEIDRIGRVGFETAKKRQGRLCSVDKANVLDVSQLWRDRIMALAADYPEVELSHLYVDNAAMQLVRWPKQFDTIVTGNLFGDILSDAAAMLTGSIGMLPSASLGASGPGVFEPVHGSAPDIAGQDKANPLAQVLSAAMMLRYGLDEPAASDPVEKAVLKVLDWGYPTGDIMSEGMKAVGCRKWGICY

SEQ ID NO: 4684 - protein, 1085 aa, Candida albicans
MYATAHTIKQQQQQHPPPPPLNGGLHASGAPPNSHEAAAIAQQQQQQQQHHNGPGMIVAAAAASANQQAVQARAQQQQQQQQQQRLPSSAALNETTVSTWLAIGSLAESLGDIERATASYNSALRHSPNNPDILVKIANTYRSKDQFLKAAELYEQALNFHVENGETWGLLGHCYLMLDDLQRAYAAYQRALFYLENPNVPKLWHGIGILYDRYGSLEYAEEAFVRVLDLDPNFDKANEIYFRLGIIYKHQGKLQPALECFQYILNNPPHPLTQPDVWFQIGSVYEQQKDWNGAKDAYEKVLQINPHHAKVLQQLGCLYSQAESNPPTPANGAAQPHKPFQQDLTIALKYLKQSLEVDQSDAHSWYYLGRVEMIRGDFTAAYEAFQQAVNRDARNPTFWCSIGVLYYQISQYRDALDAYTRAIRLNPYISEVWYDLGTLYETCNNQISDALDALDAYRQAERLDPNNPHIKARLEQLTKYQQEGNTHPPQPPPSSQQPRLPQGMVLESTQQQQQQQQQQPPPPPPPPQQLQHQSQSQSQPQPQQPPQIQSQPSLLQHQSSLPPQQIQPLHQQAAKPLVNQQQSPPPPHLMNLGQPGQQPRQLPPHLPPHTQQPSQIQEKPPTQEQPHHQPPPPPQHQQQSQSQPQPPHQPQHTQNQSPQLAQLPPHHSNPPANPHGAPQQRTGLPDLLHNSANIIIAPSQVPQPQQQYQQPHIAPVRQEQVNHVPSIYSAPRPTETTLPQINNPNESTTTQVPQLKKEEPKPEATVSAPVPEAIKVQDQVTIQESAPAAAAVSAPASAPVGDIKTDTVSTTTPATSTTADAVPVSVSQVGEAPNVVQEKKVPDTEQIVSQVEKPVESQPEVTPAPTPAPALATAPTEPAPTDKDVVMAPSKSATPIPQSIVEQNTRVSEATKAPESNGKHDLEDKNDEEKILKRPTVETTTESVPVNQPVEKENEKVEVPPPPEQPSSEKREKEVNGSIKKPLENESKVDIPQFSSNITAQNEEAKSGEETKKDTTKTSPAKQGEVKEVIPSSTETVSKPDVEKDNKEKDKDEDEVMADEDDVKKDENPEPPMRKIEEDENYDDE

SEQ ID NO: 4685 - protein, 267 aa, Triticum aestivum subsp. sphaerococcum
GTANMQVDPSSQVQWPQQQPVPQPHQPFSQQPQQTFPQPQQTFPHQPQQQFPQPQQPQQQFLQPQQPFPQQPQQPYPQQPQQPFPQTQQPQQLFPQSQQPQQQFSQPQQQFPQPQQPQQSFPQQQPPFIQPSLQQQVNPCKNFLLQQCKPVSLVSSLWSMIWPQSDCQVMRQQCCQQLAQIPQQLQCAAIHTVIHSIIMQQEQQQGMHILLPLYQQQQVGQGTLVQGQGIIQPQQPAQLEAIRSLVLQTLPTMCNVYVPPECSIIKA

SEQ ID NO: 4686 - protein, 474 aa, Synechococcus elongatus PCC 6301
AAPILFWHRRDLRLSDNIGLAAARAQSAQLIGLFCLDPQILQSADMAPARVAYLQGCLQELQQRYQQAGSRLLLLQGDPQHLIPQLAQQLQAEAVYWNQDIEPYGRDRDGQVAAALKTAGIRAVQLWDQLLHSPDQILSGSGNPYSVYGPFWKNWQAQPKPTPVATPTELVDLSPEQLTAIAPLLLSELPTLKQLGFDWDGGFPVEPGETAAIARLQEFCDRAIADYDPQRNFPAEAGTSGLSPALKFGAIGIRQAWQAASAAHALSRSDEARNSIRVWQQELAWREFYQHALYHFPSLADGPYRSLWQQFPWENREALFTAWTQAQTGYPIVDAAMRQLTETGWMHNRCRMIVASFLTKDLIIDWRRGEQFFMQHLVDGDLAANNGGWQWSASSGMDPKPLRIFNPASQAKKFDATATYIKRWLPELRHVHPKDLISGEITPIERRGYPAPIVNHNLRQKQFKALYNQLKAAI

SEQ ID NO: 4687 - protein, 120 aa, Brassica napus
MSSEEFRLVSPTIDNEGKLPRKYTKGGQGVKKNISPPLEWYNVPQGTKSLALVVEDIDAPDPSGPLVPWTVWVVVDIPPDMKGLPEGFSGNDEQVAGIREGNNDHKIPGWRGPLMPSHGH

SEQ ID NO: 4688 - protein, 197 aa, Oryza sativa (japonica cultivar-group)
THAFARVQLHVGDAVDFLRNAPEGKYDAIIVDSSDPIGPAQELVEKPFFQTIARALKPAGVLCNQAESMWLHTHLIQDMLSICRETFKGAVHYAWTSVPTYPSGVIGFLLCAKEGPAVNFLSPVNPIEKLEGAMEAGREIRFYNSEVHRAAFVLPTFVRRELESHNTCAEKDKSETKPVAKPKKMKIMPNSAIPTAS

SEQ ID NO: 4689 - protein, 504 aa, Arabidopsis thaliana
MASALSCSASDLIPLLSGGANATAAAAAAEYICGRFDTVAGKFTDAAYAIDNTYLLFSAYLVFAMQLGFAMLCAGSVRAKNTMNIMLTNVIDAAAGGLFYYLFGFAFAFGSPSNGFIGKHFFGMYDFPQPTFDYPYFLYQWTFAIAAAGITSGSIAERTQFVAYLIYSSFLTGLVYPIVSHWFWSSDGWASPARSENLLFQSGVIDFAGSGVVHMVGGIAGLWGALIEGPRIGRFGVGGKPVTLRGHSATLVVLGTFLLWFGWYGFNPGSFATIFKAYGETPGSSFYGQWSAVGRTAVTTTLAGCTAALTTLFGKRLIDGYWNVTDVCNGLLGGFAAITSGCSVVEPWAALVCGFVAAWVLMGCNRLAEKLQFDDPLEAAQLHGGCGAWGIIFTGLFAEKRYIAEIFGGDPNRPFGLLMGGGGRLLAAHVVQILVITGWVSVTMGTLFFILHKLKLLRIPAEDEIAGVDPTSHGGLAYMYTEDEIRNGIMVRRVGGDNDPNVGV

SEQ ID NO: 4690 - protein, 167 aa, Triticum aestivum
  misc_feature (90)..(90): Xaa can be any naturally occurring amino acid
  misc_feature (97)..(97): Xaa can be any naturally occurring amino acid
ARAKLVYAPEPHDVGRYLQAEVNLGGQTSVAKTAGPLDPAPGLVDYVETLVRNPETDYNVVVLQLNGIDQPADSIHVLCVGKLRMRLAQXETTVVAXESYSAPTLLAGAGRGGGAAPQPLPPPPRVGLGLPLGFDPARGPIAPPRLPRGFAIARSFILPPPGDPPPW

SEQ ID NO: 4691 - protein, 317 aa, Triticum aestivum
TGPEFRVDPASGDMLERRVASRLPDAAVDDLLIPSYSYLVETLYDVECVERIVRHFLEGRGGVEEVDEEGSEAETPGREASRRAMLAVSRLMDAYLGEIAADPRLRTDKFCDLAWALPDGARVYDDGLYRAVDIYIKAHPALREEEKEKVSGVVDGRKLTLEACTHAAQNERLPLRTVVQVLFFDQLQLRRAIARTIVANEGGAAGQGEEDGDSDGGRTWRVATRGNQMLRLDMDSMRNRVQELERECTTMRKAIQKIDRRGGGAAGDKGAAAPAAEGRWGSMVTKRFGCKFPAQVCQSQPRSVVARPRRARIEQSP

SEQ ID NO: 4692 - protein, 75 aa, Glycine max
MADSDRSSSEVSTHSTDSGKRGSSKVEFSEDEETLIIRMYKLVGERWSLIAGRIPGRTAEEIEKYWTSRFSGSSE

SEQ ID NO: 4693 - protein, 143 aa, Glycine max
  misc_feature (87)..(87): Xaa can be any naturally occurring amino acid
  misc_feature (113)..(113): Xaa can be any naturally occurring amino acid
MGGGKRNTVETFLLATLILWLASLCSQIFFNKRWELLSVIAGCFFYQTSNCLILLFLSTHKDPLFVNTSVFLLHSFLTSASVIFILXHRVIQCALWTVAHSNLVDNVLPLLTXALTSSSAYFVFDQWDFVSALLSNGRISSLL

SEQ ID NO: 4694 - protein, 215 aa, Vibrio cholerae O1 biovar eltor str. N16961
MSKQADSLGFEQDAKPENVVWHRHAVDKAQRATLKQQRPAVLWFTGLSGAGKSTVAGALENRLAALGYHTYLLDGDNVRHGLCSDLGFSEQDRRENIRRIGELAKLMSDAGLIVLTAFISPHRAERQMVRDLLPNGEFLEVYVNTSLDVCEARDPKGLYKKARAGEIRQFTGIDSAYEAPLNPDIDLPAGEKSVDELVAQCLQALAERHIIQRWV

SEQ ID NO: 4695 - protein, 159 aa, Arabidopsis thaliana
MDPMDIVGRSKEDASLPKATMTKIIKEMLPPDVRVARDAQDLLIECCVEFINLVSSESNDVCNKEDKRTIAPEHVLKALQVLGFGEYIEEVYAAYEQHKYETMQDTQRSVKWNPGAQMTEEEAAAEQQRMFAEARARMNGGVSVPQPEHPETDQRSPQS

SEQ ID NO: 4696 - protein, 491 aa, Synechococcus sp. WH 8102
MSSLQIVWFKRDLRVDDHRPLLEAAARGPVLPLYVVEPELWQQPDASERQWLFCRESLLELRQALAELGQPLVVRSGDVVQVLERARRQFGVDGLWSHEETGNGWTYQRDKRVGAWARAHGIQWGEIRQFGVTRRMRSRNGWAKRWEEQMAEPITPAPAGVPALEEIDPGVIPERPCPELLPDDCSQRQTGGRSIGLGELRDFLQHRAPCYQRAMSSPKSAFTGCSRLSAYLAWGCLSMREVLQTSRHHSGRGVSSFESRLHWHCHFIQKLEDQPEIEFSDFHPYMRGIRETNAERLAAWTEGRTGVPFVDACMRALKAHGWINFRMRAMLMSFASYNLWLPWRDSGLHLARQFVDYEPGIHWSQCQMQSGSTSINTIRIYNPIKQGMDHDPQGVFIRQWCPELKDVSTIHIHEPWMLGGGRSAPIVDVTTSMQLAKDRIWEIRRSAGFDRHADAIQRMHGSRKAGLKPTASRRRQKRSNDNGVRQLSLEL

SEQ ID NO: 4697 - protein, 411 aa, Rickettsia sp.
DSEFAELKIRGKIFKLPILKASIGEDVIDISRVSAEADCFTYDPGFMSTASCQSTITYIDGDKGILRHRGYDIKDLAEKSDFLEVAYLLIYGELPSGEQYNNFTKQVAHHSLVNERLHYLFQTFGSSSHPMAIMLAAVGSLSAFYPDLLNFKEADYELTAIRMIAKIPTIAAMSYKYSIGQPFIYPDNSLDFTENFLHMMFATPCTKYTVNPIIKNALNKIFILHADHEQNASTSTVRIAGSSGANPFACISTGIASLWGPAHGGANEAVINMLKEIGSSEYIPKYIAKAKDKNDPFRLMGFGHRVYKNYDPRAAVLKETCKEVLKELGQLDNNPLLQIAIELEAIALKDEYFIERKLYPNVDFYSGIIYKAMGIPSQMFTVLFAIARTVGWMAQWKEMHEDPEQKISRPR

SEQ ID NO: 4698 - protein, 411 aa, Rickettsia sibirica
DSEFAELKIRGKIFKLPILKASIGEDVIDISRVSAEADCFTYDPGFMSTASCQSTITYIDGDKGILRHRGYDIKDLAEKSDFLEVAYLLIYGELPSGEQYNNFTKQVAHHSLVNERLHYLFQTFCSSSHPMAIMLAAVGSLSAFYPDLLNFKEADYELTAIRMIAKIPTIAAMSYKYSIGQPFIYPDNSLDFTENFLHMMFATPCTKYTVNPIIKNALNKIFILHADHEQNASTSTVRIAGSSGANPFACISTGIASLWGPAHGGANEAVINMLKEIGSSEYIPKYIAKAKDKNDPFRLMGFGHRVYKNYDPRAAVLKETCKEVLKELGQLDNNPLLQIAIELEAIALKDEYFIERKLYPNVDFYSGIIYKAMGIPSQMFTVLFAIARTVGWMAQWKEMHEDPEQKISRPR

SEQ ID NO: 4699 - protein, 341 aa, Mycobacterium sp. S65
MEAIVLNGTNDVGLTSVPDPAPQDGEVIIEVAATGLCGTDLHEYVAGPTFSQPPVVLGHEVSGRIVEVGAGVDQSRIGEGAAVIPMDFCGSCHYCHRSLYHLCQRPGWIGFTRNGGLANYVAVPSRLAVRVPDVVDLEEAALTEPTAVAFHAVRRAELLLGETVMVLGAGALGLTVIQCARAAGAARIFVTEPSGVRASLARDLGATLVLDPHDPGTTACILEETRGVGVDVVFHVAGSAEAFTQGLDCLRKQGRFMEMSSWAGAASLDVNRHLLKEIQLRMVFGYDMFDDFPAVLALIADGKLALAPQITARVPLDRAVKEGLGGLLEGREGLVKVLVKP

SEQ ID NO: 4700 - protein, 411 aa, Rickettsia sp.
DSEFAELKIRGKIFKLPILKASIGEDVIDISRVSAEADCFTYDPGFMSTASCQSTITYIDGDKGILRHRGYDIKDLAEKSDFLEVAYLLIYGELPSGEQYNNFTKQVAHHSLVNERLHYLFQTFCSSSHPMAIMLAAVGSLSAFYPDLLNFKEADYELTAIRMIAKIPTIAAMSYKYSIGQPFIYPDNSLDFTENFLHMMFATPCTKYTVNPIIKNALNKIFILHADHEQNASTSTVRIAGSSGANPFACISTGIASLWGPAHGGANEAVINMLKEIGSSEYIPKYIAKAKDKNDPFRLMGFGHRVYKNYDPRAAVLKETCKEVLKELGQLDNNPLLQIAIELEAIALKDEYFIERKLYPNVDFYSGIIYKAMGIPSQMFTVLFVIARTVGWMAQWKEMHEDPEQKISRPR

SEQ ID NO: 4701 - protein, 477 aa, Comamonas testosteroni
MSTVLYRCPELLIGGEWRPGRHEQRLVVRNPATGEPLDELRLASADDLQLALQTTQQAFEHWRQVPAHERCARLERGVARLRENTERIAHLLTLEQGKTLAEARMECAMAADLIKWYAEEARRVYGRVIPARLPNSRMEVFKFPVGPVAAFSPWNFPLVLSARKLGGAIAAGCSIVLKAAEETPASVAAMVDCLNQELPPGVVQLLYGVPAEVSQALIASPVVRKVTFTGSVPVGRHLAELSARHLKRITLELGGHAPVIVCGDADIARTVNLMVQHKFRNAGQACLAPTRFFVDRRIYGDFVDAFGAATQALRVGAGMAAETQMGPVASARRQAAVQDLIARSVAAGARPVASAVPEAGYFVAPTLLADVPLDAPVMSEEPFGPVACAVPFDSLDQAIAQANHNPYGLAGYLFTDSAKAILAVSERLEVGSLAVNGMGVSVPEAPFGGVKDSGYGSESGTEGMEAFLDTKFMHYVA

SEQ ID NO: 4702 - protein, 411 aa, Rickettsia typhi
NLEFAELKIRGKMFKLPILKASIGKDVIDISRVSAEADCFTYDPGFMSTASCQSTITYIDGDKGILWHRGYDIKDLAEKSDFLEVAYLMIYGELPSSEQYHNFTTKIAHHALVNERLHYLFQTFCSSSHPMAIMLAAVGSLSAFYPDLLNFNETDYELTAIRMIAKIPTIAAMSYKYSIGQPFIYPDNSLDFTENFLHMMFATPCTKYKVNPIIKNALNKIFILHADHEQNASTSTVRIAGSSGANPFACISTGIASLWGPAHGGANEAVINMLKEIGSSENIPKYVAKAKDKNDPFRLMGFGHRVYKSYDPRAAVLKETCKEVLNELGQLENNPLLQIAIELEALALKDEYFIERKLYPNVDFYSGIIYKAMGIPSQMFTVLFAIARTVGWMAQWKEMHEDPEQKISRPR

SEQ ID NO: 4703 - protein, 411 aa, Rickettsia honei
GSEFAELKIRGKIFKLPILKASVGEDVIDISMVSAEADCFTYDPGFMSTASCQSTITYIDGDKGILRHRGYDIKDLAEKSDFLEVAYLLIYGELPSGEQYNNFTKQVAHHSLVNERLHYLFQTFCSSSHPMAIMLAAVGSLSAFYPDLLNFKEADYELTAIRMIAKIPTIAAMSYKYSIGQPFIYPDNALDFTENFLHMMFATPCTKYTVNPIIKNALNKIFILHADHEQNASTSTVRIAGSSGANPFACISTGIASLWGPAHGGANEAVINMLKEIGSSEYIPKYIAKAKDKNDPFRLMGFGHRVYKNYDPRAAVLKETCKEVLKELGQLDNNPLLQIAIELEAIALKDEYFIERKLYPNVDFYSGIIYKAMGIPSQMFTVLFAIARTVGWMAQWKEMHEDPEQKISRPR

SEQ ID NO: 4704 - protein, 239 aa, Glycine max
  misc_feature (217)..(217): Xaa can be any naturally occurring amino acid
KSLGVKMVISGEGSDEIFGGYLYFHKAPNKEEFHQETCRKIKALHKYDCLRANKSTFAWGLEARVPFLDKEFIRVAMNIDPECKMIKKEEGRIEKWALRRAFDDEEHPYLPKHILYRQKEQFSDGVGYGWIDGLKAHAEKHVTDRMMLNAANIFPFNTPTTKEAYHYRMIFERFFPQNSARLTVPGGPSVACSTAKAVEWDAAWSNNLDPSGRAALXVHASAYGNQVKAVEPGEIIPKE

SEQ ID NO: 4705 - protein, 258 aa, Oryza sativa (japonica cultivar-group)
MDAVAGASVSSSSARLRPCPRPRRIGNVAPATVRRRSRRRAVTCAAAADADVVGLFDAAKLTVDRFVESGMVVGLGSGPASGLAIQYLGTRLRRGSLTGILGIPSSTISASEAVKAGIQVSSYEEGTQIDFAFTDADIIEEDTMTAVIGRRKTESGEPSFMVEKGIVKSADKLAFIIGHEKYVKGIEGSIPVLVKSVWRRPSIGTAGPLGGDFPLVTKEGHHVLDVIFTTPIPDLGKVAESLEKIAGVVDHGIVSSIP

SEQ ID NO: 4706 - protein, 57 aa, Triticum aestivum
  misc_feature (10)..(10): Xaa can be any naturally occurring amino acid
  misc_feature (31)..(31): Xaa can be any naturally occurring amino acid
  misc_feature (34)..(34): Xaa can be any naturally occurring amino acid
  misc_feature (39)..(39): Xaa can be any naturally occurring amino acid
  misc_feature (46)..(46): Xaa can be any naturally occurring amino acid
  misc_feature (53)..(53): Xaa can be any naturally occurring amino acid
  misc_feature (56)..(56): Xaa can be any naturally occurring amino acid
MEDGTANCIXIILAIILPPLGVFFKFACGIXFWXCLLLXFFGYLPXIIYAVWXIIXV

SEQ ID NO: 4707 - protein, 341 aa, Mycobacterium sp. S65
MDAIVLKGTNDVGLTSVPDPAPQPGEVIIEVAATGLCGTDLHEYVAGPTFSQPPVVLGHEVSGRIVEVGAGIDRCRIGEGAAVIPMDFCGSCHYCHRSLYHLCQRPGWIGLTRNGGLASHVAVPSRLAVRVPDAVDLQEAALTEPTAVAFHAVRRAELLLGETVLVLGAGALGLTVIQCARAAGAARIYVTEPSRVRGNLARDLGATLVLDPHEPGTTARILEETRGVGVDVVFHVAGSVEAFTQGLDCLRKQGRFMEMSSWAGPASLDVNRHLLKETQLRMVFGYDMFDDFPAVLALMADGKIALTPQITTRIPLDSAVEEGLNGLLEAREGLIKVLVRP

SEQ ID NO: 4708 - protein, 214 aa, Helianthus annuus
MERGGGFHGYHRLPIHPTSGMQQPDMKQKQPDTTNTTFTEDNECIVREQDRFMPIANVIRIMRKILPPHAKISDDAKETIQECVSEYISFVTGEANDRCQREQRKTITAEDVLWAMSKLGFDDYIEPLTVYLHRYREFDGGERGSIRGEPLVKRAAATADPGPFGMGPFVPGFHMGHHNGFFGPASIAGFFKDPSSAAGQSGPAGFEPYAQCKD

SEQ ID NO: 4709 - protein, 465 aa, Burkholderia cepacia R1808
MNGIDVGLEADLQALGKRHLLMHFTHADAYRDQALTVFDRGEGCWLVDRNGKRYFDGLAGLYCVQLGYSHGAEIGDAMREQMGRLPFATNWGYGHEPAIRLAHKLATLAPDGLNRVFFTSSGSESNESAIKLVRQYHQARGEPQRRKFIARRVAYHGTSFGALALNGMTNFRKHFEPLMAGVRHVSNTKRYGRPDGETEAQFTRHLLDEIESLIVQEGPDTVAAIVVEPLQNAGGSLTPPAGYAQGLRALCDRHGVLLVADEVICGFGRLGEWFGSTRYGLQPDLITFAKGIASGYVPLGGVIASDAVVDTVLAGPQQMFLHGATYGGHPVACTAALANLAIMERERVLENVGGNQAVFRRTLDGLLELPCVGDVRGDGYHYSLELVTDKAARRWAAGIGAQAFVSTLLAPAIFEAGLLCRAGVDHEGTPIVQFSPPLVMSRDEIVWFVAKIRDILADTYARAMR

SEQ ID NO: 4710 - protein, 481 aa, Burkholderia cepacia R1808
MLTQEHSMRTSEQSYIAGQWLDPADARAIDVIDPATARPYARLAIGSAADVDRAVGAAKQAFDAYSRWSVDARVALLQRVLDIYQRRYDEVARTISQEMGAPLAFARAAQAAVGTAHLEQTIRALRAFRFSTQVDSLLVSYEPIGVCALITPWNWPINQIVCKVAPALAAGCTMVLKPSEIAPFSAILFAEILDEAGVPPGVFNLVHGYGHEVGDALSRHPDVDMVSFTGSTRAGVEVAKAAADTVKRVHQELGSKSPNLILPDADIDAAVTLGARSCFSNSGQSCNAPTRMFVHVDQLAAAEAAARREAARTVVGDPRSPETEIGPVVSRTQFDRIQQLIQRGIDEGATLVAGGLGRPDGLGDGFYVKPTVFSNVTPDMTIAREEIFGPVLSILTYRTEDEAVALANDSVYGLAAYVQTKDLERARRIAARLRVGNVHINYPAWNPAAPFGGYKRSGNGREYAEFGLVEYLETKGTTGYA

SEQ ID NO: 4711 - protein, 411 aa, Arabidopsis thaliana
MDNINGLPDDLLVKILSFVPTYVAVSTCVLSKRWEFLWMWLPNLEFVSPWDSRPGIVDFINKKLPIHRAPVIERLCIHINSNPHIKPEYIKRWIEIAVSHYVRELQIDYHSKTKITLQLEAESYFIDGKYLQQLISGCPVLEDLSLRFCCNDNLREFTVIIPSLQSLSLFLFGNSNLNRYKIDTPSLKYLKLEDWNDPEHYSWTNMPKLREAYVDVESSNHLKTLIGSITSVKHLTICCLEDYLYGDGFIFNHLEHLKLCMCPFDSSNLLGQLLKGSPNLQVLDIFEMKVSFDNKKKKCFVFLVPNMVFNLILLLGLIDDERNDIVCWNQPSSVLECLLSSLKILNWSAYFGRPQDRDIAVYILKNACHLKTATFLTDKRINDVRRLKMIKELRLSPRASSTCQLVFGEDF

SEQ ID NO: 4712 - protein, 362 aa, Glycine max
MEDGAGRGLECPKTMDGKASNGNGLEKEIPSCCLKAKASIPESEAKCHSTVVSGWFSASQTCSGKSGKAVYFNNPMWPGEAHSIKVEKILYKEKSEYQEVLVFESSMYGNVLVLDGIVQLTERDECAYQEMIAHLPLCSIHSPKNVLVVGGGDGGVLREVARHSSVEHIDICEIDKMVIDVSRKFFPQLAVGFEDSRVHLHVGDAVDFLKSAPEGKYDAIIVDSSDPVGPAQELVEKPFFDTIARALRPGGVLCNMAESMWLHTHLIQDMISICRETFKGSVRYAWASVPTYPSGMIGFILCATEGPPVDFVNPINPIEKLEGANEHKRELQFYNSEMHSAAFALPAFLKREVSLLRDLSLQ

SEQ ID NO: 4713 - protein, 410 aa, Arabidopsis thaliana
MDKINGLPDDLLVKILSYVPTDIAVSTSILSKRWEFLWMWLPNLDYTSRWCRKPGDVGLRDFIHKNLPLHRAPVIESLRFHSNSPDIKPEDIRRWIEIAVSRHVHDLDIDHFSENENIFLSSFFACKSLVTLKLRSVTLRDIPSMVCLPSLKTLLLDNVSFVEGKSLQELLSICPVLEDLSVYCDDYENTKELTIVVPSLLSLSLYIPDEWLLDGYWIDTPSLEYLKLEDWNSCDHLSLIKNMPKLREAYVDAKCFLPKSVIESITSVKHLTICSKDGYGDGFVFNQLEHLTLCVCRGDSPSLLGQLLKDSPNLRILEISVMEDHVDDVGISLDGWNQPSSVPECLLSSLQIFKWPQYLGRPEDRDIAVYILKNARHLKKTTILADRCERFVTQRRMIKELLQALPARIC

SEQ ID NO: 4714 - protein, 130 aa, Arabidopsis thaliana
MIREISNLQKDIINIQDSYSNNRVMDVGRNNRKNMSFRSSPEKSKQELRRSFSAQKRMMIPANYFSLESLFLLVGLTASLLILPLVLPPLPPPPFMLLLVPIGIMVLLVVLAFMPSSHSNANTDVTCNFM

SEQ ID NO: 4715 - protein, 467 aa, Listeria innocua Clip11262
MTSVMWFRRDLRVNDNKALYHACKEEDLILLFQVNPEQFIKGSPSHQAFFASVAHFQQELNKNTHLQIMFGEPIELLKQLKEKIPTWDKVFFNRDETGYGASRDEAARAFFADKEITVHSYHDSYLHSAEEVKKSATEYYKIFTPYYKKWREEIKEMPLKVTLKPEKIRKESLFPNYEEQFRELIQDLPAFDSGEKAANTRLANFVKEDLADYDKARDVPALDKTSHLSRYLRTGEISIRTVWQALQKEEATEGRATFEKELCWRDFYNMIYVSFPKQKNEPIQENYRFIEWENNREFFKKWQDGQTGFPLVDAAMRQLKETGWMHNRLRMITASFLTKDLLIDWRFGEKYFQQMLIDYDPASNIGGWQWAASTGTDAVPYFRIFNPTTQSEKFDPDGTFIRKYVKELRDLPDKFIHQPEKMSETEQKEHGLILGKDYPLPIIDHKERRKLAIARYEFSKEHSRGNI

SEQ ID NO: 4716 - protein, 334 aa, Pisum sativum
MAAPENTLHSTDSPLKRQREDEVNGVSDTLSKEPQPNGLSSVIPGWFSEISPMWPGEAHSLKVEKILFQGKSDYQDVMVFQSATYGKVLILDGVIQLTERDECAYQEMITHLPLCSIPNPKKVLVIGGGDGGVLREVARHSSVEKIDICEIDKMVVDVSKEYFPDIAVGFADPRVTLNIGDGVAFLKAAPEGTYDAVIVDSSDPIGPAQELFEKPFFESVARALRPGGVVCTQAESIWLHMHIIEDIVVNCRQVFKGSVNYAWTTVPTYPSGMIGFMLCSTEGPSVDFKHPVNPIDENDSQQAARPLKFYNREIHSAAFCLPSFAKRAIASKEN

SEQ ID NO: 4717 - protein, 550 aa, Zea mays
MAATVRRAASSVLSRFLLTKPSPSPASAAGNNSALLGSGAAALHRFSTAPASAAAAAEEPIQPAVEVKHTQLLINGNFVDAASGKTFPTLDPRTGEVIARVAEGDSEDIDRAVAAARRAFDEGPWPRMTAYERCRVLLRFADLIERHAEEVAALETWDNGKTLAQAAGAEVPMVARCVRYYAGWADKIHGLVAPADGAHHVQVLHEPVGVAGQIIPWNFPLLMFAWKVGPALACGNTVVLKTAEQTPLSALYVANLLHEAGLPEGVLNVVSGFGPTAGAALSSHMGVDKLAFTGSTGTGQIVLELAARSNLKPVTLELGGKSPFIVMDDADVDQAVELAHQAVFFNQGQCCCAGSRTFVHERVYDEFVEKSKARALKRVVGDPFRDGVEQGPQIDGEQFNKILRYVQSGVDSGATLVAGGDRVGDRGFYIQPTVFADAKDEMKIAREEIFGPVQTILKFSGVEEVIRRANATPYGLAAGVFTRSLDAANTLSRALRAGTVWVNCYDVFDATIPFGGYKMSGVGREKGIYALRNYLQTKAVVTPIKNPAWL

SEQ ID NO: 4718 - protein, 480 aa, Halobacterium sp. NRC-1
MEQNAIQRRERPFVAGEWVSDGEPLPVSDLADGGTFASVAAADTSDAERALSAATGVHADLRETTVPERVEWLESIADGIRRREDELAEVIVREAGKPISSARGEVQSAAERFDRAVGELRHLTGEYRTGTTAGHEDWQAIVKHEPMGTVLCITPYNYPLSTMALQVAPAIAAGNAVIVKPASKTPISGAILADIAADAGLPDGAYNFVPGESSVIGDPLASDARVDAIAMTGSSGAGEHVARQSGITRLHMELGGNAPAIVFEDADLDAAADAATAGSLKYAGQRCSAVSRVLAHESVHDELVSRIDDAMAEWSIGDLFDTDTTLGPLVSADQADWVAELVDDAVDRGATVVRGGERHVEDGVHYYEPTLLADVPRDARIVDEEQFGPVCAVTTVTDEDDAVRTANGSELALDAAVFTADHDRAMRVAERVNAGAVRINGAPSHGLGDVPFGGNDASGIGREGLDSTIHEFVREKSIIL

SEQ ID NO: 4719 - protein, 342 aa, Pisum sativum
MAAESTVELESSMKEHRDDDEKSNGFSVSAVSMDVEGGDKDPSGNGVSSVIPGWFSEISPMWPGEAHSLKIEKILFQGKSEYQKVMVFQSSTYGKVLVLDGVIQLTERDECAYQEMITHLPLCSIPNPKKVLVIGGGDGGVLREVARHSSIEKIDICEIDNMVVEVSKQFFPEVAVGFNDPRVTLRIGDGVAFLKAAPEGTYDAVIVDSSDPIGPAQELFEKPFFQSVARALRPGGVMCTQAESIWLHMDIIEDIVSNCRHIFKGSVNYAWTTVPTYPSGMIGFMLCSTEGPLVDFKHPVNPIDQKDCQKSVRPLKFYNSEIHTAAFCLPSFAKRKIGSKET

SEQ ID NO: 4720 - protein, 341 aa, Photorhabdus luminescens subsp. laumondii TTO1
MKALSKLKAEEGIWMIDVPEPELGHNDVMIKIRKTAICGTDVHIYNWDDWSQKTIPVPMVVGHEYVGEVVAIGQEVKGFKIGDRVSGEGHITCGYCRNCRGGRTHLCRNTIGVGVNRAGCFAQYLVIPAFNAFKIPDNISDELAAIFDPFGNAVHTALSFDLVGEDVLVSGAGPIGIMAAAVCKHVGARHVVITDVNEYRLELARKMGVTRAVNVSQENLTDVMAELGMTEGFDVGLEMSGAPAAFRTLLNTMNHGGRVALLGIPPSDMAIDWNQVIFKGLFIKGIYGREMFETWYKMATLIQSGLDLTPIITHRFSIDDFQKGFDIMRSGQSGKVILNWD

SEQ ID NO: 4721 - protein, 401 aa, Zea mays
MVLEATMICIDNSEWMRNGDYAPSRFQAQADAVNLICGAKTQSNPENTVGVMTMAGKGVRVLVTPTSDLGKILACMHGLEVGAEANLAAAIQVAQLALKHRQNKRQQQRIIAFIGSPVKYDKKILETIGKKLKKNNVALDIVDFGESDDEKPEKLEALIAAVNSSDSSHIVHVPPGENALSDVLLSTPIFTGEEGGSGFAASAAAAVATGASGFEFGVDPNVDPELALALRLSMEEERARQEAIAKKAAEDTSNTENINASSSNSDSVMAEAELASNAAAGDKQEQPKDDDDLLQQALAMSMEGGASGSAAVTDSAMAEAGAVDPDLALALQMSVQDANMSSDTDMSKVFEDRTFVSSILNSLPGVDPNDPSVKDLLASLHSQGEQEKKEDKSDKTEDEKN

SEQ ID NO: 4722 - protein, 363 aa, Pseudomonas aeruginosa PAO1
MNSSPQANAAMRAAVWHGRHDIRVEDVPLPAEPPPGWVQIRVHWCGICGSDLHEYLAGPVFIPVEAPHPLTGLKDQCILGHEFSGEIVRLGNGVTGFAVGQAVAADACQHCGTCYYCRHGLYNICENLAFTGLMNNGAFAEYVNVPANLLYALPAGFPSEAGALIEPLAVGMHAVKKAGSLLGQNVVVVGAGTIGLSTIMCARAAGAAQVIALEMSSARKAKALEVGASQVLDPSRCDALGEIRALTGGLGADVSFECIGNKHTAKLAIDAIRKAGKCVLVGIFEEPSEFNFFELVSTEKQLLGALAYNGEFADVIAFIADGRLDIAPLVTGRIGLEEIVERGFEELVNNKEHNVKIIVSPGG

SEQ ID NO: 4723 - protein, 175 aa, Secale cereale
  misc_feature (168)..(168): Xaa can be any naturally occurring amino acid
MAPAVMASSATTVAPFQGLKSTAGLPVGRRSGSAGLSSVSNGGRIRCMQVWPIEGIKKFETLSYLPPLSTEALLKQVDYLIRSKWVPCLEFSKVGFVFREHNNSPGYYDGRYWTMWKLPMFGCTDATQVLNEVEEVKKEYPDAYVRVIGFDNMRQVQCVSFIAFRPPXCEESGKA

SEQ ID NO: 4724 - protein, 285 aa, Xanthomonas axonopodis pv. citri str. 306
MSANDNWYIEHFQPTGSAIGFRISGKLDEVQSPFQKIEIYQTTDWGKLMLIDGAVMLTSRDNFFYHEMISHPALFTHPAPKRVVIIGGGDCGTLREVLKHPGVESATQCDIDEQVTRMSEKYFPELCDSNHDARAELLFDDGVAYMANCQAGSVDIVIVDSTDPVGPAEGLFNKAFYESCFKALKDDGILVQQSESPLALLDLINEMRTEMGKAGFQSFKTLPFPQPCYPTGWWSVTMASKQAKADFAFRQDAAQAKGFDTLYYTAHLHTGVLVAPPFVAKALGE

SEQ ID NO: 4725 - protein, 175 aa, Secale cereale
MAPTVMASSATSVAPFQGLKSTAGLPVSRRSNGASLGSVSNGGRIRCMQVWPIEGIKKFETLSYLPPLTTEALLKQVDYLIRSKWVPCLEFSKVGFIFREHNASPGYYDGRYWTMWKLPMFGCTDATQVINEVEEVKKEYPDAYVRIIGFDNMRQVQCVSFIAFKPPGCEESGKA

SEQ ID NO: 4726 - protein, 225 aa, Zea mays
  misc_feature (71)..(71): Xaa can be any naturally occurring amino acid
RYYLKDAVLDGGVPFNKAYGMTAFEYHGTDARFNRVFNEGMKNHSVIITKKLLDFYTGFEGVSTLVDVGGXGVGATLHAITSRHPHISGVNFDLPHVISEAPPFPGVRHVGGDMFASVPAGDAILMKWILHDWSDAHCATLLKNCYDALPENGKVIVVECVLPVNTEATPKAQGVFHVDMIMLAHNPGGKERYEREFRELAKGAGFSGFKATYIYANAWAIEFIK

SEQ ID NO: 4727 - protein, 192 aa, Chara globularis
MGRAKIEIKRIDNATSRQVTFSKRRNGLLKKAYELSVLCDADIAVIMFSPTGKLFEYANSSMKEILDRYHSCPPEQREKRKFDNTDYLSKEAKRLRHEVELAKQENRHLSGEDLNAVQMPELDGLELKLEDALRKIRFRKREVMQMEIDRLQQKVWTSSPQFLLAWRSCHPAVVQIIIFCSHPAFVPKFILQ

SEQ ID NO: 4728 - protein, 469 aa, Glycine max
  misc_feature (80)..(80): Xaa can be any naturally occurring amino acid
MASEEAECISNLFKPIYLKEVAELRQYVPNLQSRPNPLDHNPYFDTRQLQQQQGFYLTESDVLLRQIGNDLSPYTLCFFXCHHSPRFAYHRAGPRKNIYFDPSIVRVAIVTCGGLCPGLNTVIRELVVGLWQLYGVRHIFGITAGYRGFYSSVPLPLNPKLVHHWHNVGGTLLQTSRGGFDLHNIVDAIQTHAFNQVYIIGGDGTMRGAVKIFDEIKHRKLEVAVVGIPKTVDNDVGIIDRSFGFQTAVEMAQEAISAAHVEAESAVNGIGLVKLMGRSTGHIALHATLSSRDVDCCLIPEIDFFLEGKGGLLEFLGQRLKENGHAVLVVAEGAGQDIIPRTDSQKDERDESGNPVFLDVGVWLKSELNKWWKREHPNELFTVKYIDPTYMIRAVHANATDNLYCTLLAHSAIHGVMAGYTGFVAGPINGNYAYIPLEDVARANNPVDTQDHKWSWVRSVTNQPDFVRR

SEQ ID NO: 4729 - protein, 289 aa, Salmonella typhimurium LT2
MEYSILSNNLKMPMVGFGVFKVTDKEECQQSVLSAIRSGYRLIDTAAVYGNEDAVGDAVREAIATGLCTREELFITSKLWVQDMANYDLAKAGIEASLKKSGLDYFDLYLLHQAMGDYFSAWRALEDAYEAGKLKAIGVSNFYAHVLANFCETVRITPMVNQVELHPYFAQPAALETMKHYNVQPEAWAPLGGGRHKPYENVMLQGIADAHQKTIAQVVLRWNVQRGVTVIPKSTRQERIEENFAIWDFSLTDNEMAQINALDLGYVGEAVKHFNPEFVRGCLGVKIHD

SEQ ID NO: 4730 - protein, 336 aa, Coleochaete scutata
MGRGKIEIRRIENATSRQVTFSKRRNGLLKKAYELSVLCDVDIAVIVFSPTGKLFQYASSSMKEILERYEQVPPEQKEKGSQRLDNMDYLNREVAKLRNEVEHKYHEARQLEGEDLDRLGVYELEQLEQKLSNSMRRIRGRKDELMKAELEGLRKQVADMETALVGAASFDGRPLSGSSNYLLQSIPGIRTMPPSSLGGMNPASTSLQLGSDRLFGNRGVELHDRSASDESPVMTNRMSVDFAQAPREMSGVDLSGSPVPPWKSQAAAAAQQEWKNQASSPTDWKVTNTEHLDSWPKAPAPTPEWKSTSVQPEWKNQSSPSSEWKPLDWMYHGPQD

SEQ ID NO: 4731 - protein, 187 aa, Triticum aestivum
  misc_feature (122)..(122): Xaa can be any naturally occurring amino acid
  misc_feature (162)..(162): Xaa can be any naturally occurring amino acid
QQPFAQPQQLFPELEQPIPYQPLHPFTLQPQQPFPLQPQQPFPQQPQQPFPQQPQQSFPQQPQQPFPQQPQQPFPQQPQQPFPQQPQQPFPLRPQQPFPQQPQQSQQSFPQPQPQQRPTTIXLQPQQPLPQQPQQPFQQPQQQLSQQPEQTISQQPQQPFPXQPHQPQQPYPQQQPYGSSLTSIGGQ

SEQ ID NO: 4732 - protein, 321 aa, Mucor mucedo
MSTDYLTLNRTGDKMPIRGFGCWKIDTKDCEETVYQAIKTGYRLFDGACDYGNEVEVGRGINKAINEGLVKREDLFIVTKLWNTFHSKKHVRALFDRQLKDTGLEYFDLYLIHFPVPLQYVDPATVYPPGWYVGDAKSLQFEQSPIHECWAELEKIVDAGLARNIGVANFNCQAILDLLTYARIKPAVLQIELHPYLPQERLVKWVKEQGIQITAYSSFGPTSYVDLTESGKTYTSLLEHASVKSVADKHNVSTGQVLLRWALDREFAVIPKSVNAGRMKANLEILDIKLDAEDNKTLDSLKTNQRFNDPMTYGFGLPLFD

SEQ ID NO: 4733 - protein, 813 aa, Zea mays
  misc_feature (678)..(678): Xaa can be any naturally occurring amino acid
MAQILLHGTLHATIFEAESLSNPHRATGGAPKFIRKPDYWIEDTVGIGKGTTKIYATVDLEKARVGRTRMVSNEPVNPRWYESFHIYCAHMAADVVFTVKIDNPIGASLIGRAYLPVEDILGGDEIDKWLEICDEKREPIGDSKIHVKLQYFDVGKDRTGARGVRSTKYPGVPYTFFSQRQGCKGTLYQDAHVPDNFVPRIPLADGKNYEPHRCWEDIFDAISKAQHLIYITGWSVYTEITLVRDTSRPKPGGDVTLGELLKRKASEGVRVLMLVWDDRTSVGLLKKDGLMATHDEETANYFHGTDVNCVLCPRNPDDSGSFVQDLQISTMFTHHQKIVVVDHELPNEGSQQRRIVSFVGGIDLCDGRYDTQYHSLFRTLDTVHHDDFHQPNFEGGSIKKGGPREPWHDIHSRLEGPIAWDVLYNFEQRWRKQGGKDLLVRLRDLSDIIIPPSPVMFPEDRDTWNVQLFRSIDGGAAFGFPETPDEAARAGLVSGKDQIIDRSIQDAYINAIRRAKNFIYIENQYFLGSSYDWKPEGIKPEDIDCLHLIPKELSLKIVSKIEAGERFTVYVVVPMWPEGVPESASVQAILDWQRRTMDMMYTDITQALEANGIQTNPKDYLTFFCLGNREVKQEGEYQPEEHPEPGTDYIRAQEARRFMIYVHAKMMIVDDEYIIIGXSANINQRSMDGARDSEIAMGAYQPYHLATRQPARGQIHGFRMSLWYEHLGMLDDVFQRPESVECVQKVNKIAEKYWDLYSSDDLEQDLPGHLLSYPIGVTADGTVTELPGMENFPDTRARVLGNKSDYLPPILTT

SEQ ID NO: 4734 - protein, 304 aa, Zea mays
MAGLSLEHPWAFAFGLLGNVISFMTFLAPIPTFYRIYKSKSTEGFQSVPYVVALFSAMLWIFYALIKSNETFLITINAAGCVIETIYIVMYFVYAPKKAKLFTAKIMALVNGGVFGVILLLTLLLFKGSKRVVLLGWICVGFSVSVFVAPLSIMRRVIQTKSVEYMPFSLSLSLTLSAVVWFLYGLLIKDKYVALPNILGFTFGVVQMVLYVLYMNKTPVAVAEGKDAGGKLPSAADEHVLVNIAKLSPALPERSSGVHPVVAQMAAVPNRSCAAEAAAPPAMLPNRDVVDVFVSRHSPAVHVV

SEQ ID NO: 4735 - protein, 427 aa, Shigella flexneri 2a str. 301
MADTKAKLNLNGDTAVELDVLKGTLGQDVIDIRTLGSKGVFTFDPGFTSTASCESKITFIDGDEGILLHRGFPIDQLATDSNYLEVCYILLNGEKPTQEQYDEFKTTVTRHTMIHEQITRLFHAFRRDSHPMAVMCGITGALAAFYHDSLDVNNPRHREIAAFRLLSKMPTMAAMCYKYSIGQPFVYPRNDLSYAGNFLNMMFSTPCEPYEVNPILERAMDRILILHADHEQNASTSTVRTAGSSGANPFACIAAGIASLWGPAHGGANEAALKMLEEISSVKHIPEFVRRAKDKNDSFRLMGFGHRVYKNYDPRATVMRETCHEVLKELGTKDDLLEVAMELENIALNDPYFIEKKLYPNVDFYSGIILKAMGIPSSMFTVIFAMARTVGWIAHWSEMHSYGMKIARPRQLYTGYEKRDFKSDIKR

SEQ ID NO: 4736 - protein, 347 aa, Nostoc punctiforme PCC 73102
MFQTQLQHPTSKDEMQTTQTLKQIIAGAWITQGIYVVAQLGIADLLKDGSKSYDELATKTGVDARSLYRLLRALASVGIFAEGNSGYFELTPVAESLQSDRTDSLRGYAIKSGQAWEWQPWGHLLESIKTGKPVFKNIFGMERFDYLATDPSASKIYTQAISSISGEQDAAIAAGYDFSFIHNLVEVGGGNGTLIASILKSNLTMQGILFDLPHVVADAKPVIEDLELQDRCQLVGGNFFESVPTSGDAYLLRYIIHDWDDERAIAILKNCYQAMQPDGRLLLVEMVIPQGNEPFFGKLLDLQMLVNYGGRERTQAEYQVLLKTAGFSLTKIYPVAPPISIIEAIRL

SEQ ID NO: 4737 - protein, 276 aa, Fusobacterium nucleatum subsp. vincentii ATCC 49256
MKNVKLLNGVEMPILGFGVYQIPDLEECERVVSEAIGVGYRLIDTAQIYRNEKAVGNAIKKSGVDRKEFFITTKVWITNSGYEKAKTSIEESLKKLQTDYIDLLLIHQPFGDYYGTYRAMEEYYKAGKLRAIGVSNFYPDRFIDIAHFFEIKPMVNQVETHVFNQQIIPQGIMKEYGTQIESWGPFAEGKNNLFTNETLVEVGKKYNKTAAQVALRYLIQRDVVVIPKTVRKERMIQNFDIFNFELSETDMKEILKLDKKESLFLSHYETLKQLTI

SEQ ID NO: 4738 - protein, 216 aa, Phaseolus coccineus
MESGGFHGYRKLPNTTSPGLKLSVSDMNNVNTSRQVAGDNNHTADESNECTVREQDRFMPIANVIRIMRKILPPHAKISGDAKETIQECVSEYISFITGEANERCQREQRKTITAEDVLWAMSKLGFDDYMEPLTMYLHRYRELEGDRTSMRGESLGKRTIEYAPMGVGVATAFVPPQFHPNGYYGPAMGAYVAPPNAASSHHHGMPNTEPNARSM

SEQ ID NO: 4739 - protein, 293 aa, Arabidopsis thaliana
TRPWFSEISPMWPGEAHSLKVEKILFQGKSDYQDVIVFQSATYGKVLVLDGVIQLTERDECAYQEMITHLPLCSISNPKKVLVIGGGDGGVLREVARHSSVEQIDICEIDKMVVDVAKQYFPNVAVGYEDPRVNLIIGDGVAFLKNAAEGTYDAVIVDSSDPIGPAKELFEKPFFESVNRALRPGGVVCTQAESLWLHMDIIEDIVSNCRDIFKGSVNYAWTSVPTYPSGVIGFMLCSSEGPQVDFKKPVSLIDTDESSIKSHCPLKYYNAEIHSAAFCLPSFAKKVIDSKAN

SEQ ID NO: 4740 - protein, 197 aa, Zea mays
MATSFQGTTTKCTACDKTVYLVDKLTADNRIYHKACFRCHHCKGTLKLANYNSFEGVLYCRPHFDQLFKRTGSLDKSFEGTPKVVKPERNVGNENATKVSSAFAGTREKCVGCSKTVYPTERVTVNNTMYHKSCFKCCHGGCTISPSNYIAHEGKLYCKHHHIQLIKERGTSASLRMTTRRHHRLGHWRRMNMSIDH

SEQ ID NO: 4741 - protein, 334 aa, Triticum aestivum
  misc_feature (38)..(38): Xaa can be any naturally occurring amino acid
MASSSPPHVVEDVPPFLQLLSDGTVIRFTDAYPLPIPXSPPGQPVVDWKDVLYDASHGLKLRIYRPAAASSSGNKLPVIVYFHGGGYSIGSFDMPNFHACCVRLAGELPALVLSADYRLAPEHRFPAGLDDAANVVSWVRAQAAAVGDNADPWLSETANFGRVFVAGDSAGGGVVHHTAVRLASGRLGPLDPVRVAGCAMLCPMFGGEERTASEAEFPPGPFLSLPAVDQAWRLVLPPGSTRDHPLANPFGPDSPALDGVALPPMLVVAAARDLLRDRAADYAARLKAMGKPVELVEFEGQHHGFFAVEPYGDAGSEVVRLVKRFVYGNGGASD

SEQ ID NO: 4742 - protein, 308 aa, Neurospora crassa
MADHTEVDLDSIIDRLLEVRGSRPGKQVQLLEAEIRYLCTKAREIFISQPILLELEAPIKICGDIHGQYYDLLRLFEYGGFPPEANYLFLGDYVDRGKQSLETICLLLAYKIKYPENFFILRGNHECASINRIYGFYDECKRRYNIKLWKTFTECFNCLPIAAIIDEKIFTMHGGLSPDLNSMEQIRRVMRPTDIPDCGLLCDLLWSDPDKDITGWSENDRGVSFTFGPDVVSRFLQKHDMDLICRAHQVVEDGYEFFSKRQLVTLFSAPNYCGEFDNAGAMMSVDESLLCSFQILKPAEKKQKFGRR

SEQ ID NO: 4743 - protein, 214 aa, Zea mays
  misc_feature (14)..(14): Xaa can be any naturally occurring amino acid
MAAVEVCVKAATGXPDTLGDCPFSQRVLLTLEEKKVPYEVKLVDLDNKPEWFLKISPEGKVPVFNGGDGECIADSDVITQTIEEKFPTPSLVTPVEYASVGSKIFPAFITFLKSKDASDGSEKALLDELQALDEHLKAHGPYINGDNVSAADLSLAPKLFHLQVALEHFKGWKIPENLTNVHAYTKALFTRESFVKTKPSEEHVIAGWAPKVNA

SEQ ID NO: 4744 - protein, 322 aa, Xanthomonas axonopodis pv. citri str. 306
MSFDPDVVRLFAQLQEAAQPPMDTLPIEGARAMMRAVGAQFGFQRLEMAEVRDLQADAATGAVPLRVYRPTGLATGPAPTCLYVHGGGGLVGDLESHDDVCRQLAARAGCQVLAIHYRLAPEHPAPAGVEDVIATLHWLVAHPDTVGADVQRLAVCGDSIGGAMAAVAALAARDAGIALRCQLLVYPLTDARQDSGLYPSRSLNAGLPPLTAAAVEFFNRHLLPDMAVANDWRVSPMLAPDVAGVAPALVVVCDRDMLYDEGRAYAERLRAAGVEVTLHSFPGMIHGFINMGSVLRAAGETLDLAALTLRQRLLPAIERRAA

SEQ ID NO: 4745 - protein, 309 aa, Burkholderia cepacia R18194
MPMPLDPQIAAILKTLEAAPPMESLSVDALRNSLAYPPLERRTVVGEVVDFDMPLEGRVLAARLYRPKLAQSDGVTVFFHGGGFVIGNLDTHDHVCRDLCAESGAAVIAVDYRLAPEHPFPAAVDDCFDAVRWIAEHADTLSFDPSRIVVAGDSAGGNLAAVTALKIRDEGGPTLRAQVLVYPVTDYHTPPTRSYIENQSGYSLTRAAMIRFWNDYVANEREALHPHACPLRAKSLAGLPRALVITAGFDPLRDEGEAYANRLFDAGVPVTFRRHDDMIHGFFRMGPACAAAQEGLLRAAAWIRDVMAR

SEQ ID NO: 4746 - protein, 307 aa, Triticum aestivum
  misc_feature (239)..(239): Xaa can be any naturally occurring amino acid
MEAVARASIAAGSHARVPLCRRPRPRHAVRCLRGRPSVACAAAADADVVRLFDAAKLTVGRVGERAAWWSGVGSGAASGLAVPVPPDAPPQNLGNRLRRGTLTGIVGIQSSVIKPGEASEATRKVPKFILLALIDFAFTDADVIEEGTLAAVIGRGKTESGQPSFIQEKGIVESADKVAFIIDNDKYVNGIEGSIPVLVKSGNWIDTAEEIDDLFLGDAEVWRRPSIGTAGPSGGDFPXLVTKEGHHILDVIFTTPIQDLGKVAEDLEKIVGVVDHGIICNTMPYAVIASKGEVQVLDRKSSVIPNT

SEQ ID NO: 4747 - protein, 135 aa, Mycobacterium tuberculosis H37Rv
MPTGKVKWYDPDKGFGFLSQEGGEDVYVRSSALPTGVEALKAGQRVEFGIASGRRGPQALSLRLIEPPPSLSRPRREPAAEHKHSPDELHGMVEDMITLLESTVQPELRKGRYPDRKTARRVAEVVRAVAREFES

SEQ ID NO: 4748 - protein, 245 aa, Lycopersicon esculentum
MATNSSSHSPRTVEEIFKDFSARHAAVLRALTTDVEDFYSQCDPERDNLCLYGHPNESWEVAVPAEEVPPELPEPVLGINFARDGMERRDWLSLVAMHTDSWLLSVAFYFGARLNRNERSRVFTLINDLPTVFEAVTGRKPLKDKPSVDSGKKSKNNAKREKQMKANQRLQEESDDEDEGNEDEHEETLCGSCGTNGNEDEFWIGCDMCEKWYHGKCVKITPAKAQSIKEYRCPSCSNKRAKHMA

SEQ ID NO: 4749 - protein, 182 aa, Glycine max
  misc_feature (51)..(51): Xaa can be any naturally occurring amino acid
RAESARAVPRSPKPLHENKPQISAPAAKAHVEGWPPIRSFKKNSLASSASXMMRGQIPSLDAFIGKVSMEGAPYLRKVDLNSFTTYKDLSLALEKMFSCFTLSQCGSYGVSSRENLSESRLMDLLHGSEYVLTYEDKDGDWMLVGDVPWEMFTESCKRLRIMKSSEAIGLAPRAMEKCKSRY

SEQ ID NO: 4750 - protein, 125 aa, Agrobacterium tumefaciens str. C58
MADLAKIVEDLSTLTVLEAAELSKLLEEKWGVSAAAPVAVAAAGGAGAAAAVEEEKTEFDVVLVDAGANKINVIKEVRAITGLGLKEAKDLVEGAPKAVKEAVSKAEAADLKKKLEDAGAKVDVK

SEQ ID NO: 4751 - protein, 525 aa, Zea mays
  misc_feature (485)..(485): Xaa can be any naturally occurring amino acid
MAVAPMDCAAGSISLGHKVLGRFGVPNSSRLRWVGYDRKPRTDQLIARAVSVDRTQLDFSNPDWKKQFQEDFDKRFSLPHLTDVIDVEPRPTTFSLKSRAPLENANGTMQGSWNGYVNDDDRALLKVIKFASPTSAGADCIDPDCSWVEQWVHRAGPRKQIYFEPQYVKAGIVSCGGLCPGLNDVIRQIVLTLEKYGVKNIVGIQHGFRGFFEDHLSEVPLSRHVVQNINLAGGSFLGVSRGGANISDIVDSIQARRLDMLFVLGGNGTHAGANAIHDECRKRKLQVSIVCVPKTIDNDILLMDKTFGFDTAVEAAQRAINSAYIEAHSAFHGIGLVKLMGRSSGFITMHASLSSGQVDICLIPEVPFTVDGPNGVLRHLEHLIETKGFALVCVAEGAGQEYFQKSNATDASGNMVLSDIGVHLQQKIKSHFKDIGVHSDVKYIDPTYMLRAVRANASDAILCTVLGQNAVHGAFAGFSGITTGXCNTHNVYLPIPEVIKSTRFIDPNSRMWHRCLTSTGQPDFH

SEQ ID NO: 4752 - protein, 101 aa, Sorghum bicolor
VLAATTSEAAISCGQVSSAIAPCLSYARGQGSAPSAGCCSGVRSLNSAARTTADAAACNCLKNAARGISGLNAGNAASIPSKCGVSVPYTISTSTDCSRVN

SEQ ID NO: 4753 - protein, 261 aa, Triticum aestivum
INHSLAAGLRNSGGFFTDADVARIVAVAAARNATTVYVIEATLNYDDATAASVEQELSSVLATLRHEEGLAFVRDASYLEFLDRVHGEEVALDKIGLWRVPHPWLNVLVPRSRIADFDSAVFKGILQGTDIAGPLVVYPLNKSKWDDGMSAVTPAEEVFYAVSLLFSSVANDLKRLEAQNQKILRFCDLAGIGYKEYLAHYTAHGDWVRHFGGKWDRFVEMKDKYDPKRLLSPGQDIFALVRSVLPLSTSCYYLWINSCGQ

SEQ ID NO: 4754 - protein, 504 aa, Bifidobacterium adolescentis [sequence omitted]

SEQ ID NO: 4755 - protein, 322 aa, Staphylococcus epidermidis
MKKIAVLTSGGDSPGMNAAVRAVTRTAIYNNIEVYGVYQGYQGLLDDDIHKLELGSVGDTIQRGGTFLFSARCPQFKEEDVRKKAIENLRKRGIEGLVVIGGDGSYRGAQRISEECKEIQTIGIPGTIDNDINGTDFTIGFDTALNTIIESVDKIRDTASSHARTFIVEVMGRDCGDLALWAGLSVGAETIVLPEVNTDIKDVAEKIEQGIKRGKKHSIVMVAEGCMSGQECADELTKYINIDTRVSVLGHIQRGGSPSGADRVLASRLGGYAVELLKQGETAKGVGIRNNQLTSTPFDEIFAESDRKFNSQMYELAKELSI

SEQ ID NO: 4756 - protein, 84 aa, Glycine max
PENTPTTKEGYLYRTIFEKFFPKNAAKATVPGGPSVACSTAKAVEWDAAWSKNLDPSGRAALGIHDAAYDAVDTKIDEPKNGTL

SEQ ID NO: 4757 - protein, 261 aa, Vicia faba
MASTKDRENFVYIAKLAEQAERYEEMVDSMKNVANLDVELTIEERNLLSVGYKNVIGARRASWRILSSIEQKEESKGNDVNAKRIKEYRHKVETELSNICIDVMRVIDEHLIPSAAAGESTVFYYKMKGDYYRYLAEFKTGNEKKEAGDQSMKAYESATTAAEAELPPTHPIRLGLALNFSVFYYEILNSPERACHLAKQAFDEAISELDTLNEESYKDSTLIMQLLRDNLTLWTSDIPEDGEDSQKANGTAKFGGGDDAE

SEQ ID NO: 4758 - protein, 89 aa, Glycine max
MASFARRAMSLAQIPSARVPASVCQRRGLAGAADHHGSTKVDFWKQPTNPGNWKEEHFVLISLSGWGLLFYSGYKLFTGGKGDDEKPAQ

SEQ ID NO: 4759 - protein, 241 aa, Zea mays
HNNKYKQTGSPIEECRPKIWLMDSKGLIVASRKDSLQAFKKPWAHEHEPVATLLEAVQSLKPTVLIGTSGKGGTFTKEVVEAMASQNEKPVIFALSNPTSHSECTAEQAYTWTKGRAVFASGSPFDSVELDGKVLVPGQSNNAYIFPGFGLGVVISGAIRVRDDMLLAASEALAEQVTEEHFAKGLIFPPFTNIRAISARIAAKVAAKAYELGLASRLPRPDDLVKYAESCMYTPIYRSYR

SEQ ID NO: 4760 - protein, 472 aa, Shigella flexneri 2a str. 301
MTTHLAWFRQDLRLHDNLALAAACRNSSARVLALYIATPRKWETHNMSPRQAELINAQLNGLQIALAEKGIPLLFREVDDFVASVEIVKQVCAENSVTHLFYNYQYEVNERARDVDVERALRNVVCEGFDDSVILPPGAVMTGNHEMYKVFTPFKNAWLKRLREGMPECVAAPKVRSSGSIKPAPSITLNYPRQSFDTAHFPVEEKAAIAQLRQFCENGAGEYEQQRDFPAVEGTSRLSASLATGGLSPRQCLHRLLAEQPQALDGGAGSVWLSELIWREFYRHLMTYYPSLCKHRPFIAWTDRVQWQSNPAHLQAWQKGKTGYPIIDAAMRQLNSTGWMHNRLRMITASFLVKDLLIDWREGERYFMSQLIDGDLAANNGGWQWAASTGTDAAPYFRIFNPITQGEKFDREGEFIRRWLPELRDVPGKAVHEPWKWAQKAGVKLDYPQPIVEHKEARVQTLAAYEAARKGK

SEQ ID NO: 4761 - protein, 510 aa, Glycine max
  misc_feature (299)..(299): Xaa can be any naturally occurring amino acid
  misc_feature (473)..(473): Xaa can be any naturally occurring amino acid
MGSDNTNLEFLKEIGLGSSNIGSYINGQWKATGSSVTSVNPSNNQSIAQVTEATLQDYEEGLQACSEAAKTWMTIPAPKRGEIVRQIGEALRAKLDPLGRLVSLEMGKILPEGIGEVQEIIDMCDYCVGLSRQLNGSIIPSERPDHMMFEVWNPLGIVGVITAFNFPCAVLGWNACIALVCGNCVVWKGAPTTPLITIAVTKLVAEVLERNKLPGAIFTSFCGGADIGQAIAKDTRIPLVSFTGSSKVGLMVQQTVNERFGKCLLELSGNNAIIVMDDADIKLAVRSILFAAVGTAGQXRCTTCRRLFLHESIYADVLDQLIGVYKQVKIGNPLEKGTLVGPLHTPTSVENFQKGISVIKSQGGKILTGGSVLESAGNFVQPTIVEISPDAPVVKEELFGPVLYVMKFQTLEEAIALNNSVPQGLSSSIFTQRPGTIFKWIGPRGSDCGIVNANIPTNGAEIGGAFGGEKATXGGGREAGSDSWKQYMRRSTCTINYGSELPLAQGINFG

SEQ ID NO: 4762 - protein, 116 aa, Triticum aestivum
PRVREKAALSDEYFIKRKLYPNVDFYSGLIYRSMGFPTEFFPVLFAIPRMAGWLAHWKESLDDPDNKIMRPQQVYTGVWLRHYTPVRERVASNQGEELGQIATSNATRRRRAGSSL

SEQ ID NO: 4763 - protein, 510 aa, Oryza sativa (japonica cultivar-group)
MICRSLLLLRSNAASKASNIVKHVAATGCLPKYSSEAPARYFSSEPSLQVDSTEENGFKGHGMLAPFTAGWQSTDLHPLVIDRSEGSYVYDINGKKYIDALAGLWSTALGGNEPRLIKAATDQLNKLPFYHSFWNRTTKPSLDLANEILSMFTAREMGKIFFTNSGSEANDSQVKLVWYYNNALGRPNKKKFIARSKSYHGSTLVSASLSGLPALHQKFDLPAPFVLHTDCPHYWRFHLPDETEEEFATRLATNLENLILKEGPETIAAFIAEPVMGAGGVIPPPKTYFEKIQAVLKKYDILLIADEVITAFGRLGTMFGCDMYDIKPDLVSIAKALSSAYMPIGAILVSPEITDVIYSQSNKLGSFAHGFTYSGHPVSCAVAIEALKIYKERNIIEHVQKIAPRFQEGIKAFSGSPIVGEIRGLGLILGTEFVDNKSPNDPFPAEWGVGSLFGAECEKRGMLIRVAGDNIMLSPPLIMTPDEVEEIICKYGDALKATEERIAELKAKRG

SEQ ID NO: 4764 - protein, 302 aa, Burkholderia cepacia R18194
MDKLAATPSKPRHLMSPDEARTAFARISTILSPGADVRSTIALDIPVDGGTLRARLFVPDGRPQALLVYFHGGGWVVGGIDAFTPLCREIAAGAGVAVALVEYRKAPEHPFPGPVHDAWQAAQWLASQRVALLGAELPVFVGGDSAGANLAIAVTLLTRREGSMSFAGQLLVYPVTDCVFDRPSYVAAENQLLTTRDAMMGYWNHYAPSDAARHSSLASPLREADLSGLPEAIVVTAEHDVLRDEGEAYAQRLEQAGVPVHHRRALGQMHGFLMMIGVLPGSRDGLEFVCERLRDLVARSSR

SEQ ID NO: 4765 - protein, 494 aa, Pseudomonas aeruginosa PAO1
MIDLNPIQPICIAGEWRAGGGDLYESLYPATGEAVARLHAASLEDVEEAMAGAHRAFRESGWAQRKPHERATVLYRIAALIRERSEELAQLQRLDNGKPIRETRNLVASAAATFQFFAAACETLEESITPSRGDFVSMSVYEPMGVVVAITPWNSPIASEAQKLAPALAAGNAVVVKPAEITPLAALALARICDEAGLPRGLVSVLPGKGALIGDALTRHPLARRVSFTGGTRTGKHIARIAADKMMPVSLELGGKSPTMVLADADLDHAVAGVLYGIFSSSGESCIAGSRLFVASERYDEFMERLATGAAALRVGDPADERTQMGPLISARHRESVERYVEMGVAEGGRLRTGGLRPHGGAFDRGYFYTPTIIEGLTNGARLCREEVFGPVLVAMPFASEEALIEEANDSCYALAAGIWTRDFQRAWRLGRAVQAGTVWINTYKQFSISTPFGGWRDSGLGREKGRLGILQYMEQKSLYWGLNEQPLAWAGSH

SEQ ID NO: 4766 - protein, 497 aa, Mesorhizobium loti MAFF303099
MKGDDGLTVTQSLTRRLKNPELFDDLAGVPGRKAEQSTRRFSVFNPSTGELLAELPDMDVRDVSKAIDKAEAAQEHWAALTARERSDILWEWHQLILDHSEDLAAILTAEMGKPLAEAKSEIAHAAAYLQWYAEEANRIYGETISPPSNDRRMLVIKQPIGVVGAITPWNFPASMVARKISPALAAGCAIVLKPAEQTPLVAGAMFTLARMAGFPDGVLNLIYASEGDAVGRELCSNPKVRKISFTGSTEVGRLLMRECSDQIKRTSFELGGNAPFIVFDDADVDAAVDGALQAKFRNAGQTCVSANRLYVQSSVYNEFCDKFTKRVSALRVGDGFEPEVAIGPLIDKCALAKIEDHIRDAVRQGGKIRCGGNRIGESGTFFEPTVITDVERTMRVAQEETFGPLAPIIRFNDPDQVVREANDTIYGLAAYFYASNLKRVWRVAEALEYGMVGINTGRMSSEAAPFGGMKQSGIGREGSRHGLEDYLEMKYLCMGGL

SEQ ID NO: 4767 - protein, 364 aa, Magnaporthe grisea 70-15
MSQESQAPTQAKDAVLVQSAEMPAGSQKVEELDFNKFRGRPITAEDLLDGMRHMGFQASSMCEAVRIINDMRAWSDPETGERTTIFLGYTSNLISSGLRGVLRYLVQHKHVSAIVTTAGGVEEDLIKCLGDTYMSSFSAPGADLRKKGLNRIGNLVVPNSNYCAFEDWVVPILDKMLEEQEAGRGKGDDGQDAVNWTPSKVIHRLGQEINDERSVYYWAWKNDIPVFCPALTDGSLGDMLYFHSFKASPRHLRVDIVEDIRKINTIAVRAKRAGIIILGGGVVKHHIANACLMRNGAESAVYINTAQEFDGSDAGARPDEAVSWGKIKAGADAVKVYLEATSCFPFIVANSFAKDDQHIKPDSS

SEQ ID NO: 4768 - protein, 268 aa, Zea mays
MTKAATIYGSKTQSDALRPGPLRPANIIRNKFPTYKNGSNGIVIKLADGPEIPPLKEIVAKETADLLDRRQRLSVRELAMKFEKGLSTATLLSNEVKWRQVALMERDILLKNLKSVLESLRGQVTGKTKDEIEESISMVEILTVQLSKREAELVQQKEEVTKLAKSLKQASEDAKRIVEEERANAHTEIETAKGAVQRVQQAVQEHEKMSQNTGKQKQDMEELKKKKKGGRPFFFFFFFFFFFYQQNVTHILVTLPNSQVTHHLFLGN

SEQ ID NO: 4769 - protein, 307 aa, Zea mays
  misc_feature (247)..(247): Xaa can be any naturally occurring amino acid
MAARSSPSSTSPPAGGPAAAAWRRRRVASEPPYSCGAGASPNIPFCDVGLPIDRRVDDLGSRMTVAKKTSQLGDQSPAIPRLGVPAYKWWSEALHGIFNQGRGIHLDGPLRAATSFPQVILTAASFNLHLWDRIGQDVDELKEEVQEAPRVKMLHCPSKAMDIENEIQVLCDQLAKKSSDSLRLLKELELHRSYGENDMPLYELKGLETLGSTLHIVVHDCASVDFWNSSIQWFRIQPEGSKKEIIXGTTKPAYAPEPHDVGRYTQAEVKSGGQTSITKIAGSVDPAAGLVHYVEALVRRRETGYNV

SEQ ID NO: 4770 - protein, 272 aa, Pseudomonas aeruginosa PAO1
MSSTIHPLPSFGLGTFRLTGQVVVDSVRSALELGYRAIDTAQIYGNEADIGRAIAESGVPRSELFLTTKVWVDNYAREKLLASLRESLEKLRTDRLDLVLIHWPAPGNGVELGEYMAALAEAKSLGLTRRIGVSNFNIELTRQAIAAVGAGEISTNQIELSPYLQNRALTAYLEEQGIAVTSYMTLAYGKVLKDPTLAGIAARHRATVAQVALAWAMQLGYAVIPSSTRRENLASNLLARDLRLDAEDMARIAGLERNGREVSPQGLAPAWD

SEQ ID NO: 4771 - protein, 277 aa, Leuconostoc mesenteroides subsp. mesenteroides ATCC 8293
MTFHELSDGQHLPEIGFGTYKLNGFAGTQSILSAVDAGYRLFDTAFNYQNEGTVGQAIQQSHVNRDELIITSKLPGKYYSSYQDSIDLIQESLYRSKLDYFDLYLLHWPNPIDDHYLEAWHTLIQAQKFGLVKSIGVCNFLPEHIERLKKETNILPVVNQVELHPYFNQQELREYNNTQNILTQAWSPLGRASAILKDPVLVELAKKYHKNIGQLVLKWEISLGVLPIPKASSYARQKGNLDLFDFEISSSDMQRINDLTKPDGRTNNQDPAVYQEF

SEQ ID NO: 4772 - protein, 235 aa, Leuconostoc mesenteroides subsp. mesenteroides ATCC 8293
MRLIMNEKNFQKKQAALAALNYIQTDMIIGLGTGSTVSYFLDALAASQYNVIGVTTSTITSQRCAELNIPIVDIDAIDHIDVTVDGADEVDSYLNGIKGGGAALLMEKIVAKNSKKNIWIVDRSKVHNTLGSFPLPVEVIPYGSGQLLRQFANKGLFPKLRRHPGNNQPVITDAGHYIIDCHMTTINNPYALAEYLESQVGVVEHGLFLNICDRIIIGDNTVEIKERQQAHVEIN

SEQ ID NO: 4773 - protein, 355 aa, Alternaria brassicicola
MAEFVRAQIFGTTFEITSRYTDLQPVGMGAFGLVCSAKDQLTSQAVAIKKIMKPFSTPVLSKRTYRELKLLKHLRHENIISLSDIFISPLEDIYFVTELLGTDLHRLLTSRPLEKQFIQYFLYQILRGLKYVHSAGVVHRDLKPSNILVNENCDLKICDFGLARIQDPQMTGYVSTRYYRAPEIMLTWQKYDVEVDIWSAGCIFAEMLEGKPLFPGKDHVNQFSIITELLGTPPDDVIQTICSENTLRFVQSLPKRERQPLSNKFKNAEPQAVDLLENMLVFDPKKRVRAEQALAHPYLAPYHDPTDEPIAEEKFDWSFNDADLPVDTWKIMMYSEILDYHNVDAAAQEQENNGS

SEQ ID NO: 4774 - protein, 159 aa, Hyacinthus orientalis
MSDEGASLRVEADAGASKTYPQQAGTIRKNGYIVIKNRPCKVVEVSTSKTGKHGHAKCHFVAIDIFTAKKLEDIVPSSHNCDVPHVTRTDYQLIDISEDGFVSLLTENGGTKDDLRLPTDDSLLTQIKDGFAEGKELVVSVMSAMGEEQINALKDVGPK

SEQ ID NO: 4775 - protein, 98 aa, Glycine max
RDGSAHGGVVINMESLKVPEMQVHVDVGNSPPYVDVSGGELWINILHETLRYGLAPRSWTDYLHLTVGGTLSNAGVSGQAFRHGPQISNVQQLEIVTG

SEQ ID NO: 4776 - protein, 373 aa, Mycobacterium tuberculosis H37Rv
MTVVPENFVPGLDGVVAFTTEIAEPDKDGGALRYRGVDIEDLVSQRVTFGDVWALLVDGNFGSGLPPAEPFPLPIHSGDVRVDVQAGLAMLAPIWGYAPLLDIDDATARQQLARASVMALSYVAQSARGIYQPAVPQRIIDECSTVTARFMTRWQGEPDPRHIEAIDAYWVSAAEHGMNASTFTARVIASTGADVAAALSGAIGAMSGPLHGGAPARVLPMLDEVERAGDARSVVKGILDRGEKLMGFGHRVYRAEDPRARVLRAAAERLGAPRYEVAVAVEQAALSELRERRPDRAIETNVEFWAAVVLDFARVPANMMPAMFTCGRTAGWCAHILEQKRLGKLVRPSAIYVGPGPRSPESVDGWERVLTTA

SEQ ID NO: 4777 - protein, 214 aa, Brassica napus
  misc_feature (139)..(139): Xaa can be any naturally occurring amino acid
  misc_feature (182)..(182): Xaa can be any naturally occurring amino acid
  misc_feature (186)..(186): Xaa can be any naturally occurring amino acid
  misc_feature (189)..(189): Xaa can be any naturally occurring amino acid
  misc_feature (193)..(193): Xaa can be any naturally occurring amino acid
  misc_feature (204)..(204): Xaa can be any naturally occurring amino acid
  misc_feature (206)..(206): Xaa can be any naturally occurring amino acid
  misc_feature (212)..(212): Xaa can be any naturally occurring amino acid
METSSNSTNSSLFQWLGLIEDYDHPSTSTLPPVITLLASVLTKMIQKNEKPFHTRRNKFRDEEITMFHGSRAPSMNIQRYTERVHRYARCSPACFVAAFVYIIRYLEIPVATSTTRRLTSLNVHRLLITSLLVAAKFLXRKCYNNAYYAKIGGVSTEEMNRLERTFLFDLDFRLNITAEMFXKHCXMLXRQTXPCGSRRLRTAXEXMTCGCXAI

SEQ ID NO: 4778 - protein, 483 aa, Rhodobacter sphaeroides 2.4.1
MRAQPAASHFVDGRPLEDETGAPIPVIYPATGEEIARLHEATPAVIEAALASGARAQAAWAAMRPVERARILRRASDLIRAHNEELSLLETLDTGKPLQETLVADWASGADALEFFAGLAPVVTGETVPLGQDFVYTIREPLGLCVGIGAWNYPSQIACWKAAPALALGNAMVFKPSEVTPLGALKLAEILIEAGLPPGLFNVVQGRGAVGASLVTDSRVAKVSLTGSVPTGRRVYAAAAEGVRHVTMELGGKSPLIVFDDADLESAIGAAMLGNFYSAGQICSNGTRVFVQKGIKEAFLARLAERADAIRMGDPLDPEVQMGPLVSQAQLEKVLAYIEKARAEGGRLVCGGEASVSPGCYVQPTVFADVTDAMTLAREEVFGPVMAVLDFETEEEAIARANATDFGLAAGVFTADLTRAHRVVAQLQAGTCWINAYNLTPVEAPFGGVKLSGVGRENGRAAVQHYTQVKSVYVGMGPVDAPY

SEQ ID NO: 4779 - protein, 468 aa, Corynebacterium glutamicum ATCC 13032
MNDPQRSPTLLWFRDDLRLSDNAALKWAADHGPVIGLFIDETINRSIGAAARWWREQSLNALAQDLSFYGVPLLRRTGNPLEILPKIVSEMEVKAVTWNRRYHQPLCEVDATLKKNLRDKGIEVHSHPGFLLTEPWEVSTATGTPYKVFTPFSKAAWEVARVHAYETVKNNVPVPSHLTGPEDVELPILEMEQPFWSTTLVKECAPGEKNASEKLFDFLEHLQDYPQARDSLARSATSKLSAHLRFGEISIHRVWAETAAIDSEGTELFLKELLWRDFAWHRLYALPHMDTQNVRMQFNRFGWSWDPSEKDKLNTPSTPLIPTKADQFHEDLAAWRAGKTGIPLVDAGMRELWATGSMHNRVRMVVASFLTKNLQIHWRHGEEWFWETLVDADPASNAFNWQWAAGSGDDASPYFRIFNPVTQAKKFDPDETYIRRWVPEYGTPSYPDPIVDLKESRQIALDAYSAIK

SEQ ID NO: 4780 - protein, 189 aa, Desulfovibrio desulfuricans G20
MDIDFKKLAPWNWFKKEQEEQQSTASLPMQRNDLPVAGGPVSPILQLHREIDRLFDDAFRGFGFPALAMPRWPSDWPGLLKPALDIQETDKLYKISLEVPGVEEKDIQITLDNDVLLVRGEKRQEQETKDGGFHRVERSYGSFQRALNLPADANQDTIKAAFKNGVLTITMEKREACAPKQGRSIPING

SEQ ID NO: 4781 - protein, 320 aa, Escherichia coli O6
MIKKIGVLTSGGDAPGMNAAIRGVVRSALTEGLEVMGIYDGYLGLYEDRMVQLDRYSVSDMINRGGTFLGSARFPEFRDENIRAVAIENLKKRGIDALVVIGGDGSYMGAMRLTEMGFPCIGLPGTIDNDIKGTDYTIGFFTALSTVVEAIDRLRDTSSSHQRISVVEVMGRYCGDLTLAAAIAGGCEFVVVPEVEFSREDLVNEIKAGIAKGKKHAIVAITEHMCDVDELAHFIEKETGRETRATVLGHIQRGGSPVPYDRILASRMGAYAIELLLAGYGGRCVGIQNEQLVHHDIIDAIENMKRPFKGDWLDCAKKLY

SEQ ID NO: 4782 - protein, 546 aa, Zea mays
MARRAASSLVSRCLLARAPAGAPPAAPSAPRRTDGMHRLLPGVLQRFSTAAAVEEPITPSVHVNYTKLLINGNFVDSASGKTFPTLDPRTGEVIAHVAEGDAEDINRAVAAARKAFDEGPWPKMTAYERSRILLRFADLIEKHNDELAALETWDNGKPYEQAAQIEVPMVARLMRYYAGWADKIHGLIVPADGPHHVQILHEPIGVAGQIIPWNFPLLMYAWKVGPALACGNTLVLKTAEQTPLSALYISKLLHEAGLPEGVVNVVSGFGPTAGAALASHMDVDKIAFTGSTDTGKIILELAAKSNLKTVTLELGGKSPFIIMDDADVDHAVELAHFALFFNQGQCCCAGSRTFVHERVYDEFVEKAKARALKRVVGDPFRKGVEQGPQIDDEQFKKILRYIRYGVDGGATLVTGGDRLGDKGFYIQPTIFSDVQDGMKIAQEEIFGPVQSILKFKDLNEVIKRANASQYGLAAGVFTNSLDTANTLTRALRAGTVWVNCFDVFDAAIPFGGYKMSGMGREKGVDSLKNYLQVKAVVTPIKNAAWL

SEQ ID NO: 4783 - protein, 400 aa, Aspergillus nidulans FGSC A4
MATCQALVLHGAKDLRLEPRPVSSPSDGEVQIAIRSTGICGSDLHYYSHGRNGDFVVREPMCLGHESSGIVTAIGPNVHNLKVGDRVALEVGLPCRKCALCLSNPSRYNLCPEMKFRSSAKIFPHLDGTLMQLTTHPENMCHKLPDTVSYAGGALVEPLAVCLHAIRRSNPPAQSSLPPNYKSTALIFGAGAIGLLLAGALAAQETFAHIVIADIDDSRLKIASTMSLPNLSTFQIPKPSTPPPPRDAPHAEQTAFALSNAQATASSLKSAISSLDPSGLGFTRVYDCTGVPACVQTGIYAASPGSVLVQIGMGNPVQTLPVGAAALREVDIIGVFRYDGHAYPAAIELMASGKMDVVEKSVVTHRLGLQDGIRAFDIAGKGVDEGGRPVVKVLIESESP

SEQ ID NO: 4784 - protein, 306 aa, Arabidopsis thaliana
MAQLIRPIRQLSPQCNHHFRNLRYLFSKKLPNPPSSIPTLLLFSSFSTERSPPRRRIRPAPPEALKPTVIVAEEDGDNDGYESDSLRSRNQRKRDARRAVKWGMELASFSGDQVKQILKAASLGEEVYDALMLAKRLGSDVREGKRRHFNYIGKLLREVEPDLMDTLINATKQGDHSTLQTLISSAKDVADDVGDSYDDDTETESEDEEEGSDEYTAMAARWFDGLISQNVELTKEVYSLQSVDFDRQELRKLVRKVQLVHEQRKGTTEEKQKEVEAALVTAEKSLNQFLCSMAKQVHSEQTDLYL

SEQ ID NO: 4785 - protein, 165 aa, Leptospira interrogans serovar Lai str. 56601
MRFNMNETLYDLTATLNNGKEQKLENYKGKVLLIVNTASECAFTPQYAGLQNLYSKYKTEGLEILGFPCDQFKHQEPGSDETIKNFCQKNYGVEFPIFKKIEVNGDNAHPVFRFLRNKASGFFGNSIKWNFTKFLVDKQGNVIKRYSPITTPENIEKEIQNLLKR

SEQ ID NO: 4786 - protein, 183 aa, Glycine max
MAEERFTGVVQWFNNGKGFGFIKPDDGGEDLFVHQSSIRSDGYRTLLEGDRVEFAIATGDNDKTKAVDVTGVDGAPLQPRASAANNRAGGSGFGARRNGGSGAACYQCGDFGHLARDCNRSSNTGGGGGGSGGGCFNCGGFGHLARDCVRGGGGNVGVGGGGGSGSCFRCGGFGHMARDCATG

SEQ ID NO: 4787 - protein, 402 aa, Bordetella pertussis Tohama I
MLSPEVRALVKATAPVLKEHGEALTRHFYTRMLGGNPELRQLFNQGHQQSGQQQQALAAAVAAYAEHIDDPSVLLQVVERIAHKHVSLGVRAEHYAIVGKHLLASIREVLGEAATDELIDAWAAAYGQLADLLIGRERALYAAAASRDGGWTGWRAFKVVRKTPESAEITSFYLAPADGGATPDYLPGQYVSVRVYVPELGLMQPRQYSLSEAPGMPGQLRISVKREAGSPAGMVSGTLHNRINEGDVLDVSPPQGDFTLDAEDGRPVVLLSGGVGLTPMVSMLNHLTARDDGRQIRFVHACREAGVHAMKEHINALAAKRPNVRKAVFYERVGADDRRGVDYDYEGRVDLHAIRDEVILPDADYYLCGPLPFMQAQRRALADLGVAEHRIHAEVFGTGGVA

SEQ ID NO: 4788 - protein, 459 aa, Desulfovibrio desulfuricans G20
MNALQPDTERLRALDTAHVWHPFTQMATWHEDAPLIIEKARGNWLVDTDGNRYLDGVSSLWTNVHGHRHPHIDAAIRAQLDNVAHSTLLGLSSRPAIELAAMLARVAPQGLNRVFYSDSGSTAVEVALKIAYQYQKQRGPAGEGRSKFLCLRGAYHGDTVGAVSLGGIDLFHAVYGGLLFKTVRAEAPYCYRCPFGRQKESCRHECFTHLEETATRHAPELAAMVIEPLVQGAAGQITHPDGYLAHARALCDRLGILLIADEVAVGFGKTGTMFACEQEKVTPDLLCLAKGISGGYLPLAATMVTDAVYEAFLGDHAQCRTFFHGHTYTGNALACAAGIASLQLFRTEGTLERLQHIITIYDALLRQLETLPHVGDIRRRGIMTGIELVEDRATRRPYPFALRTAHKVVLAARRRGVIIRPLGDVLVLMPPLSITAQECGLLVEATAEAIQEVTGGPRV

SEQ ID NO: 4789 - protein, 230 aa, Zea mays
MAAAARQRGTVKWFNDTKGFGFISPEDGSEDLFVHQSSIKSEGFRSLAEGEEVEFSVSEGDDGRTKAVDVTGPDGSFVRGGGGGGGGGGGYGSRGGGGSGGGGRSYGGSWGGGRRSGGGGGPGACYKCGEPGHMARDCPSADGGGGYGGGGYGGGGYGGGGGGGGGCFKCGEPGHMARDCSSGGGGYGGGRRRRGGGGGGGRFGGGGGGGGDRSCYNCGEAGHIARDCPT

SEQ ID NO: 4790 - protein, 416 aa, Rickettsia heilongjiangensis
DSEFAELKIRGKIFKLPILKASIGEDVIDISRVSAEADCFTYDPGFMSTASCQSTITYIDGDKGILRHRGYDIKDLAEKSDFLEVAYLLIYGELPSGEQYNNFTKQVAHHSLVNERLHYLFQTFCSSSHPMAIMLAAVGSLSAFYPDLLNFKEADYELTAIRMIAKIPTIAAMSYKYSIGQPFIYPDNSLDFTENFLHMMFATPYTKYTVNPIIKNALNKIFILHADHEQNASTSTVRIAGSSGANPFACISTGIASLWGPAHGGANEAVINMLKEIGSSEYIPKYIAKAKDKNDPFRLMGFGHRVYKNYDPRAAVLKETCKEVLKELGQLDNNPLLQIAIELEAIALKDEYFIERKLYPNVDFYSGIIYKAMGIPSQMFTVLFAIARTVGWMAQWKEMHEDPEQKISRPRQLYTG

SEQ ID NO: 4791 - protein, 375 aa, Arabidopsis thaliana
MFAQLAPSPSPSPANVSHFVHRRTFRQCTYAVSASLPTANSSRPPPIQANIIVGGKDLNLDVTRKDDSIGFKLEANEDEIDWMNLESDIRLWTRALRPVQWYPGHIMKTEKELREQLKLMDVVIEVRDARIPLSTTHPKMDAWLGNRKRILVLNREDMISNDDRNDWARYFAKQGIKVIFTNGKLGMGAMKLGRLAKSLAGDVNGKRREKGLLPRSVRAGIIGYPNVGKSSLINRLLKRKICAAAPRPGVTREMKWVKLGKDLDLLDSPGMLPMRIDDQAAAIKLAICDDIGEKAYDFTDVAGILVQMLARIPEVGAKALYNRYKIQLEGNCGKKFVKTLGLNLFGGDSHQAAFRILTDFRKGKFGYVSLERPPL

SEQ ID NO: 4792 - protein, 160 aa, Pseudomonas aeruginosa PAO1
MSAFHDLTLQGLDGQDLPLSPFKGKVLLVVNVASKCGLTPQYAGLENLYQTYRERGFAVLGVPCNQFAGQEPGSEADIQSFCSLNYGVSFPMSAKVEVNGSARHPLYRLLAGEGAEFPGDITWNFEKFLLGPDGRVLARFSPRTAPDDPALVQAIEKALG

SEQ ID NO: 4793 - protein, 107 aa, Glycine max
MEHGSYTDQSKSTFSLVDEDHTFANAVRFTLNQDPRVSFCGYSIPHPSDNRVNIRVQTTGDPSREVLKDACQDLMLMCQHVRSTFDKAVSDFKISKARKNNEDMDVE

SEQ ID NO: 4794 - protein, 431 aa, Mycobacterium tuberculosis H37Rv
MADTDDTATLRYPGGEIDLQIVHATEGADGIALGPLLAKTGHTTFDVGFANTAAAKSSITYIDGDAGILRYRGYPIDQLAEKSTFIEVCYLLIYGELPDTDQLAQFTGRIQRHTMLHEDLKRFFDGFPRNAHPMPVLSSVVNALSAYYQDALDPMDNGQVELSTIRLLAKLPTIAAYAYKKSVGQPFLYPDNSLTLVENFLRLTFGFPAEPYQADPEVVRALDMLFILHADHEQNCSTSTVRLVGSSRANLFTSISGGINALWGPLHGGANQAVLEMLEGIRDSGDDVSEFVRKVKNREAGVKLMGFGHRVYKNYDPRARIVKEQADKILAKLGGDDSLLGIAKELEEAALTDDYFIERKLYPNVDFYTGLIYRALGFPTRMFTVLFALGRLPGWIAHWREMHDEGDSKIGRPRQIYTGYTERDYVTIDAR

SEQ ID NO: 4795 - protein, 166 aa, Zea mays
MDAVMFGLETPLMAALQHLLDVPDGDAGAGGDSDNKTGSGGSATRTYVRDARAMAATPADVKELPGAYAFVVDMPGLGTGDIRVQVEDERVLVVSGERRREEREDDAKYLRMERRMGKFMRKFVLPDNADVDKVAAVCRDGVLTVTVEKLPPPEPKKPKTIEVKVA

SEQ ID NO: 4796 - protein, 273 aa, Ureaplasma parvum serovar 3 str. ATCC 700970
MDIINKKINWFPGHMKKATDEILKNLKNVDFFIQLVDARCPLTSSNIELLKEVSSKPVINLANKADLSDWKKNFDNNFLLISTKKRNDKNKIIQHLYQLFDQKIKIYQKKGLINPKFVGMIIGLPNIGKSSLINFLAPKKVLKVENRPGVTKTQCIRQINQHFYLIDTPGIFLKNIQNERDSFVLTLINCVKKEVLELESIVHFAYDFYLKNYRNELFIKYKMNKVLNFDDFIHHICELYNYKLTNNEFDHVRAYENLFNDFSNGLICKVNYD

SEQ ID NO: 4797 - protein, 375 aa, Arabidopsis thaliana
MPLSLQSPPCATLSASIRKGRWKTLAAGFSVTPLPAVNFSLRRSIPRILASASSSSSPASSSLEAGENNELNAVSAFSEIVPDTVVFDDFERFPPTAATVSSALLLGICGLPDTIFRNAVDMALADSSCAGLETTESRLSCFFNKAIVNVGGDLVKLVPGRVSTEVDARLAYDTNGIIRKVHDLLRLYNEIDVPHDRLLFKIPATWQGIEAARLLESEGIQTHMTFVYSFAQAAAASQAGASVIQIFVGRLRDWARNHSGDTEIESAIKSGEDPGLALVKRSYNYIHKYGYKSKLMAAAVRNKQDLFSLLGVDYVIAPLKVLQSLKDSPAIPDDEKYSFVRKLTPETATHYHFTNKELVKWDQLSLSSSMGPASV

SEQ ID NO: 4798 - protein, 211 aa, Penicillium chrysogenum
MSTNITFHASALTRSERTELRNQRGLTIWLTGLSASGKSTLAVELEHQLVRDRRVHAYRLDGDNIRFGLNKDLGFSEADRNENIRRIAEVAKLFADSNSIAITSFISPYRKDRDTARQLHEVATPGEETGLPFVEVYVDVPVEVAEQRDPKGLYKKAREGVIKEFTGISAPYEAPANPEVHVKNYELPVQDAVKQIIDYLDTKGYLPAKKE

SEQ ID NO: 4799 - protein, 210 aa, Triticum aestivum
  misc_feature (208)..(208): Xaa can be any naturally occurring amino acid
MTTLLDALRQTTQVDCDTLDANVAHQLGPFVDCTSNQAIAFSEISRPLAGEPLLHYDALVKDAIEKARGALKEFQGSATFEEFVVQILMVKLQLLIVPNVTGYVHIQTNPKLSYSTDGTMSDAHRIVNIFKALAPEFDTKRVCIKIPATWEGLQACRALEVEGIATLATTMFCMEQATLAADAQCTYIAPYVNELKVHFEAGYVDEHXAF

SEQ ID NO: 4800 - protein, 366 aa, Clostridium perfringens
MMQPIKKIAILTGGGDCPGLNAVIRAVTRTAILKYGYEVIGYKFGYRGLYNNDFVKLDLDSVSGILHRGGTILHSSNKDNLFDYQVEDENGKIVKKDVSDVGVENLKKEGVDALVVIGGDGTLTSARDFSRKGVNVIGVPKTIDNDLLATDVTFGFNTATEIATEALDRLHTTAESHHRIMLLEVMGRNAGWIALESGIAGSADVILLPEIPYDINKIVEKVKEREEAGKQFTIIVVAEGAKPKDGEVVVSKIVDDSPDPIRLGGIANKLAIDLEGLIKNHEIRSTVLGHIQRGGNTSTYDRILSTKYGVKAVELINSNLFGNMVALKGNKVSYESLENVIGHTKNVDPEGELVNTAKSIGISFAD

SEQ ID NO: 4801 - protein, 263 aa, Hordeum vulgare
MSAPGELSREENVYMAKLAEQAERYEEMVEFMEKVAKTVDSEELTVEERNLLSVAYKNVIGARRASWRIISSIEQKEESRGNEDRVTLIKEYRGKIETELSKICDGILKLLETHLVPSSTAPESKVFYLKMKGDYYRYLAEFKSGPERKDAAENTMVAYKAAQDIALAELAPTHPIRLGLALNFSVFYYEILNSPDRACNLAKQAFDEAISELDTLSEESYKDSTLIMQLLRDNLTLWTSDITEDTAEEEIREAPKHDSSEGQ

SEQ ID NO: 4802 - protein, 357 aa, Nostoc sp. PCC 7120
MRKRIGILTSGGDCPGLNCVIRAVVSHATLTYDWEVLGIPYATQGLRERQAIALNMHGWDLRGIDPLLNMGGTILGTINKGDTLAHVDEMLASYQALALDALIVIGGDGSLGILHELASRGNWNLVAIPKTIDNDVALTERAVGFDTAVNTIVDALNRLTFTAASHDRVMIVEVMGRSAGHLALHAGIAGGADVILIPEISYTISGLCQHIAELRDRWQRKFAIVVVAEGAKLCLEDVQENIASSCAPSKCGRGQYIADQIAQCSKNLIDTRVSVLGHIQRGGIPSALDRLTATVFGKTAVDLIAQGKFGQMVAWQNGEAIPVPIQDVVAQSPLHVNPQGSLVQSARCLGIYVGEKT

SEQ ID NO: 4803 - protein, 518 aa, Triticum aestivum
MGNRTSRHRRAAADQPATAPPPTAQPKPQPPPKPQTAPAPAPTPEAGQVAMGRVLGRPMEDVRATYTFGRELGRGQFGVTYLVTHKATGQRFACKSIATRKLVHRDDIEDVQREVQIMHHLTGHRNIVELRGAYEDRHSVNLIMELCEGGELFDRIIARGHYSERAAALLCREMVSVVHSCHSMGVFHRDLKPENFLFLNNKEDSPLKATDFGLSVFFKHGEQFKDLVGSAYYVAPEVLKRHYGAEADIWSAGIILYILLSGVPPFWADNEDGIFEAVLLGHIDFSSDPWPSISNGAKDLVKKMLRQDPKERLTAAEILNHPWIREDGEAPDKPLDITVISRMKQFRAMNKLKKVALKIVAENLSEEEITGLKEMFRSLDTDNSGTITLEELRSGLPKLGTKISESEITQLMEAADVDGNGTIDYSEFVSATMHMNRLEKEDHILKAFEYFDKDHSGYITVDELEEALKKYDMGDDKTIKDIIAEVDTDHDGRINYQEFVAMMRNNSPEIVPNRRRMF

SEQ ID NO: 4804 - protein, 320 aa, Bordetella parapertussis 12822
MPSQLEALRRHTVVVADTGDFEAMRALRPTDATTNPSLILKAVQQEAYRPLLVQTARAHQGASPAEITDRLLVAFGRQILDIVPGRVSTEVDARLSFDTRATVERARGLIALYQAAGVPRERVLIKIASTWEGIQAARVLQAEGIRCNLTLLFCLPQAAACADAGVQLISPFVGRIYDWHKKNAGAEWVEDARRGANDPGVQSVSRIYRYYKRFGIETEIMGASFRNVDQILALAGCDLLTISPELLTRLSQTEGEVPAALSPQAGHDDADAVRLDGGEVAFRTQLNEDAMASEKLSEGIRLFVADARKLDALIESHGAA

SEQ ID NO: 4805 - protein, 442 aa, Zea mays
MEQAEVCYLISSISPLRENVVSKGGLCFVKLYQVDNLMRVLCFPTAGGKSVKKPRFSLRGYDFVPLDVKTDNLCIGEQDVSSAVPSTKASQTMVAERLENVEEQTEDLAPEFALPPKANTSVSELLDNLQRRGGSFVRTPSLLHQHAPSISIREQEVSSGVPPTKASQALMDEPFENVNGQTEELPSELPCSIKRPKFSVAELLEDLQGRSGSYVETASLSHQHTRAKHWKPKFLSSEKKTIAILGDRSIDSEDPLEHVIDGTSSEEEDATQNHLSLVNKDENQQTMADLFQEVFNPTNMDGAMKSMTSTGAGNYGRMQQIMQMEKYWHVEFLRQYSREHSYSGDLKGTTVQIMSRSLEGKLTVCSCMFQEKGNDATISNASADGTMDESRTRRTIIFSPKICNNVDLLVGNIIHIFPPWKEVKIQEEHVIICTYFSHHHRT

SEQ ID NO: 4806 - protein, 159 aa, Exiguobacterium sp. 255-15
MNTSLYEIEVQDATGQTVSLNDYAGEVLVIVNTASKCGLVKQLGDLQQLHDKYADQGVKVLGFPCDQFNNQEFADQQETMQFCQRNYGVTFPMFQKIDVNGPAEHRLYTYLKQQQGGLLSSNIKWNFTKFLVDREGRVVKRFAPVDSIQTIEKTLARYV

SEQ ID NO: 4807 - protein, 443 aa, Arabidopsis thaliana
MGSGRDRDDPLSFTSNPCTASSPVTVSDYLDNFLGEPTSRSGSFQSESLLGGGGGESINDADFGFARPDFRSEQLAGTVQFYERHVFLCYKKPSVWPARIEAAEFDRLPRLLSAAVSARKGSMKKETRLTICEGHDGTETSNGDVLIFPDMIRYRRLTHFDVETFVEEVLVKDGEWLPGNPELLKGSYVFVCSHGSRDRRCGVCGPSLVSRFREELEFHGLQGKVSISPCSHIGGHKYAGNVIIYRSNINREVTGHWYGYVTPEDVPILLEQHINKGEIVDRLWRGEMGLSEEDQKKTQEGRFQLNGTVHSVKINGKVSQESSVHNADVSCCQSRAAEPNGCCQQNGNSSSCCQDDTTLMLSLGTSEDNQLESENNTEKLTPGRKIAEKTFFRINSDKGSSTRKVCGIPTWLESWEREDTYAALAVVCAAASVAVAYTCYKQL

SEQ ID NO: 4808 - protein, 163 aa, Arabidopsis thaliana
MDPMDIVGKSKEDASLPKATMTKIIKEMLPADVRVARDAQDLLIECCVEFINLISSESNEVCNKEDKRTIAPEHVLKALQVLGFGEYVEEVYAAYEQHKYETMQDSQRSVKMNSGAEMTEEEAAAEQQRMFAEARARMNGGVTVPQPEQLEEPQQQQQTSLQS

SEQ ID NO: 4809 - protein, 370 aa, Triticum aestivum
MEKTNIVACRNPTSRDASDDEEATWSHAWGLISGFAVSITLKTAIELGIIDALTNAVGRALTVDELAAQLPAPDKAGSAASVDRLLRLLAAFDVVRCSTETGPDCEAVRKYTPAPVCRWLTSNRSDGSLAPLAMLAVDQDYLPTWNQMGAAVVCGVPTPFERAHGVPLFEYMGKNPRLSGVFNQAMFHMSVTVISKMVERFDGFDGVEVLVDVGGGTGAALEMITARHKHIKGINFDLPYVITQAPSLPGVENIAGNMFENVPTGDAIFLKWILHLQNDDECIKILKNCHRALPANGKVIVVEIVLPTTTEATREAQNMFLLDVIMFNNQQGGKERTEQDFLKMARSSGFDGAFRSTYIFGNFWALEFTK

SEQ ID NO: 4810 - protein, 469 aa, Synechococcus elongatus PCC 6301
MASALTPNASHSVSVLVRMPSNTAAMLHVVQAIATTGANLTEMELLQRTNQWIDRRLIVEAASEEQAAAVVEAIAAVPDLELLDSEDRTFALHRGGKISVEPKLPLTSQAQLAMAYTPGVGRVCKAIAANPDRVYELTVKQNMVAIVTDGTAVLGLGNLGPAGALPVMEGKAMLFKAFGDVDAFPICLDTQDTDEIVETMKRIAPVFGGVNLEDIAAPRCFEIEARLKQELDIPVFHDDQHGTAIVTLAALENALKLVKKSLSQVRIVMNGAGAAGLSVASLLREAGATNIIICDSRGILSCDRSDLTPQKQAFAIEAGGSLADALVNADVFIGVSVPGVLTVEMVETMASDRIIFAMANPIPEIQPELIQGRAAVIATGRSDYPNQINNVLAFPGVFRGALDCRAKSLTSSMFLAAARAIAALVPPETLSAEHIVPSAFDSRVAPAVAAAVVEAAQANGLAQTLAVTH

SEQ ID NO: 4811 - protein, 422 aa, Mesorhizobium loti MAFF303099
MMPQSRVWHPFTQHALEPAIPEIARTEGAYLYKADGTRILDAISSWWVVTHGHRHPRIIKAIETTASSLVQIIFAGFTHEPAERLAKALVGLAPAGLDWVFYSDSGSTSVEVALKMALGYFRNIDAPRSRIVVMEHSYHGDTIGTMSVGARGAFNAAYEPLLFEVDTIPFPAAGREQETLDRFEAVARDRRTAALIVEPLVLGAGGMLMYPAWVLAELKKIAETSGTLLIADEVMTGWGRTGTMFACEQASISPDILCTSKGLTGGAIPLAATLATDAIFQAHYSEDRKKTFFHSSSYTANPIACAAALANVEIWRDEPVAERVAALSAKQAAGLQRFRDNPYFTDCRATGTIAALDLRTGSAGYLAEIGPKLRAFFLERGLLVRPLGNVLYLLPPYCITGGELDALYDAIEEAAERFGSRP

SEQ ID NO: 4812 - protein, 498 aa, Chlamydomonas reinhardtii
MADEMDPMTACITALTDAAMTTAQATALCGQFAFAADNSDLSDRLDQTNQGLNTLYLVSCGALVFVMHAGFAMLCAGAIRSKNTMNILLQTVMDAAVSAVAFYILGYGFAYGIGNNPNGFIGDSLFGLSRWVSHSSSSDAGANWQAWFFQWAFAATATTIPAGAVAERLNFNAYLIYSFFISAFVYPVVVHWVWAAEGWLGYARFGGYSHLFRSGMIDFAGSGVVHMTGGLAGLAGCIMVGPRMGRFDSNGQPVEMPGHSATLVVLGTVLLWFGWYGFNPGSQLIINYTASAAVVGRAAVTTTLSGAAGCLSCLLTAFLRHKAWDLVSGCNGALVGFVSITASANVVEPWAALIAGLVGGWVFDAVCLLFLKLRIDDPLSAAPMHAFCGAWGVFFAGLLAKKEYICESYGRDCEGYVADGLFYVGDGRLLAQVIGIISIFAWVFGLMLLLFGGLKAVGLLRISAEEEQAGLDVSKHGGSAYNYDHGLGKPEKAQALGL

SEQ ID NO: 4813 - protein, 211 aa, Buchnera aphidicola str. Sg (Schizaphis graminum)
MHNNSKKNIIWQKHSVTRIKREQKNGHKSIVIWFTGLSGSGKSSIANSLEEILFQNNFNTYLLDGDNIRSSLCSDLSFSILDRNENIRRIGEVSKLMIDAGIIVLVSVISPYRNQRKKIRLMLGKINFLEVFVDTPLNICEERDPKKLYQKSRLGKISDLTGIQSLYEIPEKPDLHLDETISLKNNTKKLIHILCDKNIISFPNIDETFLF

SEQ ID NO: 4814 - protein, 503 aa, Ralstonia solanacearum
MSPSPETLLQRLHLDTLTGGDGPLAARSPIDGAVLARLPVETAADADRIVAQAHAAFRNWRTVPAPRRGELVRLLGEELRAHKADLGALVTLEAGKITQEGLGEVQEMIDICDFAVGLSRQLYGLTIASERPAHRMMETWHPLGPCLVITAFNFPVAVWAWNATLALVCGDPVIWKPSEKTPLTALAVERLFLRACQRFGEAPPHLAQVAIGAHDLGEALARHPGVPLVSATGSTGMGRAVAQAAAPRFARTILELGGNNAAIVCTSADLALAERAIAFAAMGTAGQRCTSLRRLFVQRPVYDALVPRLTTLYARVQVGDPRDDGTLVGPLIDGHAYERMQAALARARAEGGTVHGGGRVTVGAGDGAYYVRPALVEMPAQDGVVCEETFAPILYVMPFDSLDEAIALNNAVPHGLSSSLFTLDMREAERFVSATGSDCGIANVNIGPSGAEIGGAFGGEKDTGGGREAGSDAWKAYMRRATNTVNYGTALPLAQGIRFEVGG

SEQ ID NO: 4815 - protein, 502 aa, Neurospora crassa
MWLPLILLTATAAPILANPLSSPLNKRAAIDDCLKSAGVPADAQGSSEWRTDVNPFNQRLPYTPVAIAVPTTIEHIQGAVSCATKLGIKVTPKSGGHSYASFGLGGENGHLVVELDRMSKVTLDKTTNIADVQSGARLGHVATELYKQGKRAFSHGTCPGVGVGGHSLHGGFGFSSHTYGLAVDWIAAATVVLANSTVVTASPTENPDLFWALRGAGSNFGIVASFKFNTFAAPSQVTAFQINLPWNSASSIASGWEKLQDWLAAGNMPKEMNMRVFGSPSQTQLQGLYHGSSSALRTAVQPLLSTLGASLSNAQQYDWMGAFTYYTYGGTVDVTHPYNTVETFYSKSLVTTALPSAALNSVANYWINTAKRVSRDWFIIIDMHGGPKSAITSSTTNSANYTSSYAYRAPEYLFLYELYDRVMFGSYPSNGFSFLDGWVKSFTDNMKQEQWGMYINYADPTMKRAEAVGNYYRSSLSRLQKVKAQYDPNEVFYYPQSVEPAK

SEQ ID NO: 4816 - protein, 111 aa, Beta vulgaris subsp. vulgaris
YKAVNRESYEIVAVKKMKRKFYFWEECVNLREVKSLPSIESSNIIKLKEVVRENNDLFFIFEYMQYNLYQIMKDRHRPFTEEEIRNFLTQVLQGLAHMHRNGYFHRDLKPQ

SEQ ID NO: 4817 - protein, 270 aa, Lactococcus lactis subsp. cremoris
MTKKIVTLAGDGIGPEIMSAGLRVLKAVSKKIAFEYELVAKDFGGIAIDKHGHPLPEETLQAVKNADAILLAAIGHPKYNDAKVRPEQGLLALRKELGLYANVRPLKIYPALKNLSPIRNVENVDFVVIRELTGGIYFGQHELSDEKARDINDYTADEIRRILHFAFKIAQNRPRKLLTSVDKQNVLATSKLWRKIADEIAVEYPDVTLEHQLVDSCAMLLITEPQKFDVIVTENLFGDILSDEASSLAGTLALCPLVLMDLTDCHYMSQ

SEQ ID NO: 4818 - protein, 501 aa, Glycine max
MTSLTNGDAGSLNKVPTIKFTKLFINGDFVDSLSGKTFETIDPRTGDVIARISEGDKEDIDIAVKAARHAFDNGPWPRLPGSERARILLKWAEIIEENAEELAALDAIDAGKLYHMCRNVEVPAAANTLRYYAGAADKIHGEVLKMSREFHAYTLLEPLGVVGHITPWNFPNTMFYIKVAPSLAAGCTMVLKPAEQTPLSALFSAHLAKLAGIPDGVINVVPGFGPTAGAALSSHMDVDKVSFTGSTQTGRVIMQAAAKSNLKQVSLELGGKSPLIIFDDADIDKATELALLGILYNKGEVCVASSRVFVQEGIYDEFEKKLVEKAKAWVVGDPFDPKVQQGPQVDKEQFEKVLSYIEHGKKEGATLLTGGKTVGNKGYFIEPTIFSNIREDMLIAQDEIFGPVMALKKFKTIEEAIKSANNTKYGLAAGIVTKNLDTANTVSRSIRAGTIWINCYFAFGDDVPFGGYKVSGFGKDHGLEALHKYLQVKSVVTPLYNSPWL

SEQ ID NO: 4819 - protein, 105 aa, Zea mays
MASRSSAMEGGAAIQRRNAVKRHLQQRQQEADFLDKKVIASTYFSIGAFLVLACLTVSLLILPLVLPPLPPPPSLLLWLPVCLLVLLVVLAFMPTDVRSMASSYL

SEQ ID NO: 4820 - protein, 496 aa, Pseudomonas aeruginosa PAO1
MTELLSREEYAAIAATLDLPQRAFIDGGFRDACGGRTFASTNPATGELLAQVAACDAEDVGHAVASARRAFEDGRWRSRTPAERKAALLRLAELLEEHLLELAVMESLDSGKPIRECQHTDLPETINTLRWHAELIDKIYDSTAPVGSAALAMVVREPIGVVGLVLPWNFPLLMLAWKIGPALAAGCSVVVKPAPETSLTALRVAELASQAGIPAGVFNVVPGGGREAGEPLGRHPDVAMVSFTGSTATGRLFLKYAAESNLKRVVLECGGKNPAVVMNDVEDLDLVAQHVVNGAFWNMGENCSASSRLIVHAEVREALLERIGAQLREWRMGDPLDPRNRLGALVSPAHFEKVRAYLDQARTERLAVRFGGATEAGIFVEPTVVDGVSPHSRLFREEIFGPLLSVTSFDDIDEAIALANDTVYGLAASAYTGSLRHALRLSREIRAGIVTVNCFGEGDASTPFGGYKESGFGGRDKSVWAHDQYTELKTIWIDAS

SEQ ID NO: 4821 - protein, 203 aa, Zea mays
  misc_feature (42)..(42): Xaa can be any naturally occurring amino acid
RGANNIKIGSTIPYHRTGIDAIEEVIYHDETYDVTTIRASTXPMFLMARKIKSLGVKMVLSGEGSDELLGGYLYFHFAPNKEEFHRETCRKVKALHQYDCLRANKATSAWGLEVRVPFLDKEFINVAMGMDPEWKMVQIRGLSDCAYSSVLCCFMMIDDDVFSSSCFDLLAHTRTVRQEPGPHREVGHEEGVRRRRAPLPAQG

SEQ ID NO: 4822 - protein, 318 aa, Photorhabdus luminescens subsp. laumondii TTO1
MLTELIASNRRSAAIHAFVDTGLSTHFKDGIYVDISELSRKSGVNYARFSRLCDFLVEMGVLVSNDNKFRLSDECHVFANPESFESFMIKLEICSHYSNAWLMYGKSLFEDDGKSAFEMAHGRPFFEYLDGNKFLKSNFDALMTRVSNLIVEKLLGIYDFNQHNRILDVGGGEGELLVRISEKVKGKHYAVLDRYSELPVSDNIDFINGNFLNSIPSGYDLYILKNVLHNWSDSDSILILENFRKAMDKNSSLLLINMVKEPEFSRSFDILMDVLFLGKERSFTEFEYLANQAGLVVQETKVIDQSYSPYSFIKLQIK

SEQ ID NO: 4823 - protein, 317 aa, Photorhabdus luminescens subsp. laumondii TTO1
MLIDLITSCRKSTVIYAFVDMGLSVHFKDGACVNISELASQYGLDHSRFSRLCEYLIKIGVLVSCNEGVALSEECSALADPESMESLMIRCEVSPEYWKAWSMYSKSLYENNSKTAFEIAHGKPFFEYLDHHELFRSNFDSFMSKNSDKIIEKLLDIYDFSQHNRILDVGGGEGNLLIRINEKIKGKHYAVLDRYNETPVLEDIEFINGDFFKLVPSGYDLYILKNVIHNWSDSNAILILENCRKAMDDNATILLIGTVKKLKLEIIDSTDILMDVLLLGKERYLNELEDLAHQAGFVVKDIKEINEKYSIIELGVK

SEQ ID NO: 4824 - protein, 317 aa, Photorhabdus luminescens subsp. laumondii TTO1
MLAELITSYRKSIAIYTFVDTGLSVHFKNGTYMDINELASQYGIDYSRLNRLCDFLIEIGVLVSSNDRVALSEECRVLADPESMESLIAKWEFNSGLWNAWLMYPKSLLENNGKSAFEIANGKPFFEYLDSNKLLKSKFDSLMSKDSDKMIEKLFNVYDFNQHDKILDVGGGEGNLLIRMSEKVKEKHYAVLDRYNELPDYGNINFIDGDFFKSIPSGYDLYILKNVIHDWPDNDAILILENCRKAMGNNATILLITLMKKPQSNIIKYFDILMDVSSLGKERDLTEFEYLANQAGLVIQDVKDIDESYSIIQLGVK

SEQ ID NO: 4825 - protein, 104 aa, Zea mays
  misc_feature (41)..(41): Xaa can be any naturally occurring amino acid
  misc_feature (49)..(49): Xaa can be any naturally occurring amino acid
  misc_feature (77)..(77): Xaa can be any naturally occurring amino acid
MTMGVVVAALPEHHQEPRIQVNEEIYNHDELKAKFRTHEFXTGSDCEVXAHLYEEFGEEFVDMLDGIISFVLLDTRXKSFVAAHDVVAICPLYMGWCLDVVNNA

SEQ ID NO: 4826 - protein, 117 aa, Avicennia marina
MEGMNKSMCIIVVVAVLAAWVVPHGEAAISCGTVASKLAPCIPYVTNRGPLGGCCGGVKSLYGLARTTPDRQSVCGCLKSLASSYNVNLGKAAGLPGQCGVNIPYKISPSTDCSKVH

SEQ ID NO: 4827 - protein, 124 aa, Glycine max
  misc_feature (8)..(8): Xaa can be any naturally occurring amino acid
  misc_feature (10)..(10): Xaa can be any naturally occurring amino acid
  misc_feature (15)..(16): Xaa can be any naturally occurring amino acid
  misc_feature (23)..(23): Xaa can be any naturally occurring amino acid
  misc_feature (25)..(26): Xaa can be any naturally occurring amino acid
  misc_feature (29)..(29): Xaa can be any naturally occurring amino acid
  misc_feature (39)..(39): Xaa can be any naturally occurring amino acid
  misc_feature (43)..(43): Xaa can be any naturally occurring amino acid
AETKRTDXTXNEKAXXQQARARXKXXPTXNHDTRDTDTXEAAXEEPERAQAHQIFFFYSTKDSASQSDVSKLLADQSFVSSILASLPGVDPNDPSVKDLLASLQNQAEPQQKNEDKPPNEEEKK

SEQ ID NO: 4828 - protein, 213 aa, Candida tropicalis
ISLLNILVAGRDTTAGLLSFVFFELARTPRVANKLREEIEDKFGLGQDARVEEISFESLKSCEYLKAVLNECLRLYPSVPQNFRVATRNTTLPRGGGKDGLSPVLVRKGQTVMYSVYAAHRNKQIYGEDALEFRPERWFEPETKKLGWAFLPFNGGPRICLGQQFALTEASYVTVRLLQEFSHLTMDPNTEYSPKKMSHLTMSLFDGANIQMY

SEQ ID NO: 4829 - protein, 283 aa, Streptococcus pneumoniae TIGR4
MATIQWFPGHMSKARRQVQENLKFVDFVTILVDARLPLSSQNPMLTKIVGDKPKLLILNKADLADPAMTKEWRQYFESQGIQTLAINSKEQVTVKVVTDAAKKLMADKIARQKERGIQIETLRTMIIGIPNAGKSTLMNRLAGKKIAVVGNKPGVTKGQQWLKTNKDLEILDTPGILWPKFEDETVALKLALTGAIKDQLLPMDEVTIFGINYFKEHYPEKLAERFKQMKIEEEAPVIIMDMTRALGFRDDYDRFYSLFVKEVRDGKLGNYTLDTLEDLDGND

SEQ ID NO: 4830 - protein, 333 aa, Mycoplasma gallisepticum R
MMAIQTQRIAILTSGGDSPGMNPAIYGLVQQAIINNIQPYLVYEGYKGLVEDQIVLANQQEVIDHFFDSGTFIYSARLVEFKDLEVRKKAVSNLKAKKIDTLVVIGGDGSYQGAKLLSEMGINVIVMPGTIDNDVSSSDYTIGFYSALEHITRTIQEIISTSVSHNRVSISEVMGRHCGDLAVYAALATKADLVITSENIKTTQEIVDLAAKRMLQDHKRTFTVIVCEHIYGEDGRDSLKTIAQQINDQLGIKTNLNILTYGQRGQVPTPMERILAMKFAIKAFECINEQRYGVVLGLSGDEIVAYNFQEALNKRNPSRIKLINLSNRINGGF

SEQ ID NO: 4831 - protein, 503 aa, Pisum sativum
MAITVSSRQLFIDGEWRVPILNKRIPNINPSTENIIGDIPAATKEDVDLAVDAAKRAISRKNGRDWSAASGSLRARYLRAIAAKIKEKKDELGKLESIDCGKPLEEALADLDDVVACFEYYAGLAEELDSKQKAPISLPMDTFKSYILKEPIGVVALITPWNYPFLMATWKIAPALAAGCAAILKPSELASVTCLELGEICKEVGLPRGVLNIVTGLGHEAGASLASHPDVDKISFTGSSATGSKIMTTAAQLVKPVSLELGGKSPIVVFEDVDLDKVAEWTGFGCFFTNGQICSATSRLIVHESIAVEFVDKLVKWAENIKISDPLEEGCRLGPIVSEAQYKKVLNCISSAKSEGATILTGGRRPEHLKKGYFVEPTIITDVTTSMQIWREEVFGPVLAVKTFSTEEEAINLANDTHYGLGSAVMSNDLERCERLSKALQAGIVWINCAQPSFIQAPWGGIKRSGFGRELGEWGLENYLSVKQVTRYTSDEPWGWYQPPSKL

SEQ ID NO: 4832 - protein, 163 aa, Glycine max
EAAAKKAAEDAAKQEKDGEQQASPQDTTMTKGVSAAASEAETKRTDLTVNENALLQQALAMSMDDPTINHDMRDTDMSEAAAEDPELALALQLSVEDSSKDSASQSDVSKLLADQSFVSSILASLPGVDPNDPSVKDLLASLQNQSEPQQKNEDKPPNEEEKK

SEQ ID NO: 4833 - protein, 421 aa, Mesorhizobium loti
MSQSQVWHPFTQHALEPAIPEIVRTEGAYLYKADGTRILDAISSWWVVTHGHRHPRIIRAIETTASSLDQIIFAGFTHEPAERLARALVGLAPTGLDWVFYSDSGSTSVEVALKMALGYFRNIGAPRSRIVVMEHSYHGDTIGTMSVGARGVFNAAYEPLLFEVDTIPFPASGREQETLDRFEAVSRDRRAAALIVEPLVLGAGGMLMYPASVLTELKKIAETSGTLLIADEVMTGWGRTGTMFACEQASISLDILCTSKGLTGGAIPLAATLATDAIFQAHYSEDRTKTFFHSSSYTANPIACAAALANVEIWRDEPVAERIATLSAKQAAGLQRFRDNPYFTDCRATGTIAALDLRTGSAGYLAEIGPKLRAFFLERGLLVRPLGNVLYLLPPYCITGEELDGLHDAIEEAGERFGTKP

SEQ ID NO: 4834 - protein, 451 aa, Bdellovibrio bacteriovorus HD100
MSQKPYDLIIQGGICLLPHPSESGLIEHQADIAITDGRIEKIRDSINEPALRIIKAHGLHVLPGVIDSQVHFREPGLTHKEDLETGTRAAVLGGVTSIFEMPNTNPSTTTKEAFEDKLQRAKNRAHCNYAFFIGGAHDNVAHIAELELMPHCSGVKIFMGSSTGNLLVEDDETLEQILKRGHRRIIFHSEDEMRLRERKHIATDMADPHYHPVWRDVETAVNSTTRLLRLARKTGRKIHVLHVSTGEEMDLLKDAKDIATVEVLPQHLTLYAPDCYDKLGTYAQQNPPIREKRHMDRIWKALLDGTVDVIGSDHAPHTREEKDRPYPASPSGVPGVQTLVPIMLNHVHDGRLSLKKFTELVTENPCRVFGVKNKGRLRQGFDADITIVDLKKEMTIDNSWIASRCGWTPFHGMRVTGWPTHTIVGGKLVMENDQVVLPSQGQAVDFLETRS

SEQ ID NO: 4835 - protein, 327 aa, Rhodospirillum rubrum
MSETKLDALRRHTIIVADSGDIDAIRSFAPQDCTTNPSLILKAAKMPAYAGLIAQAIEAGSAEAGPSEGLIDRILDHLAVTFGSELARIVPGVVSTEVDARLSFDTQATVARAERLIGLYAARGVAAERILIKVAATWEGIRAVEILQSRGIACNVTLVFSLAQAVAAAEAGAFLISPFVGRILDWHVKASGKSFDIDEDPGVRSVTEIYTYFKHFGYKTIVMGASFRSSAEVEALCGCDRLTVSPALLDQLRSQTGDVPKRLDPAASKAATISRLAVDEASFRWQINEDALATEKLAEGIRLFNADTDALRRTIAETLAKRASTVA

SEQ ID NO: 4836 - protein, 141 aa, Brassica napus
MPRSLKPLDLGIQIPYHFRCPISLQLMRDPVTVCTGQTYDRTSIESWVSTGTDTTCPVTRAPLSDFTLIPNHTLRRLIQEWCVANRSNGVERIPTPKQPADPTSVRALLSQASAACGTHVSVRSRAAALRRLRAFARDSEK

SEQ ID NO: 4837 - protein, 109 aa, Ammopiptanthus mongolicus
ASFPRSLSSNLGRETFAVRFCTHPDTDSAHKMDKTQNPSEEATHGDVMFHPFGEGYTTRFDEEGFGGIYGGNQTRPEKSVHENHPAYDKTQGSEVKEKEKARHQTNTNA

SEQ ID NO: 4838 - protein, 166 aa, Brassica napus
MERGAPLSHYQLPKSNSGLNLDQHNNSIPTMTGSISACDDKNKTILPQQQPSMPREQDQYMPIANVIRIMRKILPPHAKISDDAKETIQECVSEYISFVTGEANERCQREQRKTITAEDILWAMSKLGFDDYVGPLNVFINRYREFETDRGCSLRGESSFTPVYGG

SEQ ID NO: 4839 - protein, 297 aa, Saccharomyces cerevisiae
MAFQKDAKSSAYSSRFQTPFRRRREGKTDYYQRKRLVTQHKAKYNTPKYRLVVRFTNKDIICQIISSTITGDVVLAAAYSHELPRYGITHGLTNWAAAYATGLLIARRTLQKLGLDETYKGVEEVEGEYELTEAVEDGPRPFKVFLDIGLQRTTTGARVFGALKGASDGGLYVPHSENRFPGWDFETEEIDPELLRSYIFGGHVSQYMEELADDDEERFSELFKGYLADDIDADSLEDIYTSAHEAIRADPAFKPTEKKFTKEQYAAESKKYRQTKLSKEERAARVAAKIAALAGQQ

SEQ ID NO: 4840 - protein, 350 aa, Bacillus cereus ATCC 14579
MKALLWHNQRDVRVEEVPEPTVKPGTVKIKVKWCGICGTDLHEYLAGPIFIPTEEHPLTHVKAPVILGHEFSGEVIEIGEGVTSHKVGDRVVVEPIYSCGKCEACKHGHYNVCEQLVFHGLGGEGGGFSEYTVVPEDMVHHIPDEMTYEQGALVEPAAVAVHAVRQSKLKEGEAVAVFGCGPIGLLVIQAAKAAGATPVIAVELSKERQELAKLAGADYVLNPATQDVLAEIRNLTNGLGVNVSFEVTGVEVVLRQAIESTSFEGQTVIVSVWEKDATITPNNLVLKEKEVIGILGYRHIFPAVIKLISSGQIQAEKLITKKITVDQVVEEGFEALVKDKTQVKILVSPK

SEQ ID NO: 4841 - protein, 381 aa, Arabidopsis thaliana
MENHLQHSLTIIPKPDLIKEEQRYHEDTVSLQAERILHAMTFPMVLKTALELGVIDMITSVDDGVWLSPSEIALGLPTKPTNPEAPVLLDRMLVLLASHSILKYRTVETGDNIGSRKTERVYAAEPVCTFFLNRGDGLGSLATLFMVLQGEVCMKPWEHLKDMILEGKDAFTSAHGMRFFELIGSNEQFAEMFNRAMSEASTLIMKKVLEVYKGFEDVNTLVDVGGGIGTIIGQVTSKYPHIKGINFDLASVLAHAPFNKGVEHVSGDMFKEIPKGDAIFMKWILHDWTDEDCVKILKNYWKSLPEKGKVIIVEVVTPEEPKINDISSNIVFGMDMLMLAVSSGGKERSLSQFETLASDSGFLRCEIICHAFSYSVIELHK

SEQ ID NO: 4842 - protein, 391 aa, Methanocaldococcus jannaschii DSM 2661
MFEVKHMDGIDVFFFMWAASLIFFMKAGFIALEIGQFRAKNVSYHCVLKLLDLAAVFIAYLFIGYGISYGFENIMPLITGTFDADLGAWWMKMVMFAAAAVTIITGGVAERIKILPYFIGALIVGGILYPIVEHLVWGGGFANLGINFHDYAGSGAVHLFGGLVGLMAAYVLGPRIDKYINGKPQAIPGHNIPIAVLGAFILAFGWYGFNIGSASGIANGVELASVAMATTMALAGGIIGGALSSRNDPLYTANGMCAGLVAVCSGVDLFTPIGAFIVGLLAGIQQPFTYKFIEEKLKIDDVCAIGPVHAMSGLIGVICAGIPFLLKADAVSKVSITGQIIGAIVIALIAIVGGLIIYKGLDLTIGLRVSEEAEKVGLDTAILQTTAYSEE

SEQ ID NO: 4843 - protein, 244 aa, Triticum aestivum
  misc_feature (114)..(115): Xaa can be any naturally occurring amino acid
MFGYRKAPDLDLEAGGSAPLYPGMTEDVELRWAFIRKIYVILSVQLAMTAAVAGFVVKVPAVSDFFVSSNAGLGLYIFFLVLPLIVLCPLRYYHQKHPVNLILLGVFTVSISFXXGMTCAFTSGKIILEAAILTAVVVISLTAYTFWAAKRGHDFNFLGPFLFGALMVLMVFSLIQIFFPLGKISTMIYGAVASIIFCGYIIFDTDNIIKRHTYDEYIWAAVSLYLDIINLFLNLMQILRAADS

SEQ ID NO: 4844 - protein, 488 aa, Bacillus subtilis subsp. subtilis str. 168
MSVITEQNTYLNFINGEWVKSQSGDMVKVENPADVNDIVGYVQNSTAEDVERAVTAANEAKTAWRKLTGAERGQYLYKTADIMEQRLEEIAACATREMGKTLPEAKGETARGIAILRYYAGEGMRKTGDVIPSTDKDALMFTTRVPLGVVGVISPWNFPVAIPIWKMAPALVYGNTVVIKPATETAVTCAKIIACFEEAGLPAGVINLVTGPGSVVGQGLAEHDGVNAVTFTGSNQVGKIIGQAALARGAKYQLEMGGKNPVIVADDADLEAAAEAVITGAFRSTGQKCTATSRVIVQSGIYERFKEKLLQRTKDITIGDSLKEDVWMGPIASKNQLDNCLSYIEKGKQEGASLLIGGEKLENGKYQNGYYVQPAIFDNVTSEMTIAQEEIFGPVIALIKVDSIEEALNIANDVKFGLSASIFTENIGRMLSFIDEIDAGLVRINAESAGVELQAPFGGMKQSSSHSREQGEAAKDFFTAIKTVFVKP

SEQ ID NO: 4845 - protein, 449 aa, Oryza sativa (japonica cultivar-group)
MYRAKRAALSPKVKRRVGKYELGRTIGEGTFAKVRFAKNTENDEPVAIKILDKEKVQKHRLVEQIRREICTMKLVKHPNVVRLFEVMGSKARIFIVLEYVTGGELFEIIATNGRLKEEEARKYFQQLINAVDYCHSRGVYHRDLKLENLLLDASGNLKVSDFGLSALTEQVKADGLLHTTCGTPNYVAPEVIEDRGYDGAAADIWSCGVILYVLLAGFLPFEDDNIIALYKKISEAQFTCPSWFSTGAKKLITRILDPNPTTRITISQILEDPWFKKGYKPPVFDEKYETSFDDVDAAFGDSEDRHVKEETEDQPTSMNAFELISLNQALNLDNLFEAKKEYKRETRFTSQCPPKEIITKIEEAAKPLGFDIQKKNYKMRMENLKAGRKGNLNVATEVFQVAPSLHVVELKKAKGDTLEFQKFYRTLSTQLKDVVWKCDGEVEGNGAAA

SEQ ID NO: 4846 - protein, 466 aa, Sinorhizobium fredii
MSKRFRSRSAARAARHRLRRGEQDMSNRLNTTPNDLSAFWMPFTANRQFKKEPRLFVGAKDMYYTTHDGRTVLDGTAGLWCVNAGHCRPKITEAIREQAGELDYAPAFQLGHPKAFELANRLVDIAPEGLNHVLYTNSGSESVDTALKVALAYHRAKGNGSRFRLIGRERGYHGVNFGGISVGGIVANRKMFGTLLTGVDHLPHTHLPAKNAFTRGEPEHGGDLASELERIVTLHDASTIAAVIVEPVAGSTGVLIPPKGYLQKLREICTKHGILLIFDEVITGYGRLGTPFAAQYFDVKPDIITTAKGLTNGVIPMGAVFVTSEIHDAFMTGPEHLIEFFHGYTYSGNPIASAAALGTLDTYKEEGLLTRAAELASYWEEALHSLKDCPHVIDIRNIGLIGAVELEPIAGEPTKRAFSAFLKAYEKGLLIRTTGDIIALSPPLIIEKKQIDELIDKLRDVLKNNI

SEQ ID NO: 4847 - protein, 498 aa, Aspergillus nidulans FGSC A4
MANVRVKGENFYRDAKKVKRLNMLKDGKPQRDAAGNITVAASYQSREAPVARIEPNRKWFGNTRVISQEALSSFREAVAERASDPYQVLLKTNKLPMSLIRDNKTVNGLKQHEAKMTIETSPFSDTFGPKAQRKRVKLGVSSLEDLAGETMKMHDSYVEKSEQGRHEDGTPIVAGDDVATDLSVGTLPTSREAVFLKGQSKRIWNELYKVIDSSDVVIHVIDARDPEGTRCRGIEKYIREEAPHKHLIFVLNKCDLVPTGVAAAWISVGLIGYPNTGKSSIINTLRKKKVCTVAPIPGETKVWQYVTLMKRIYLIDCPGVVPPSQTDTPEDILLRGVVRVENVENPEQYIPAILKRVQPKHLERTYGIKETSDAIEFLSILARKGGRLLRGGEPDLDGVAKMVINDFLRGKIPWFTPPPFTPGEEGEKIEGREGRLGEMGRKRKIEETSQDASEGQEGQDQSASDSEEEFGGFDDEQDDSDNDSIANLEVSDEESGEE

SEQ ID NO: 4848 - protein, 405 aa, Glycine max
MVLEATMICIDNSEWMRNGDYSPSRFQAQADAVNLICGAKTQSNPENTVGVLTMAGKGVRVLVTPTSDLGKILACMHGLDIGGEMNLAAGIQVAQLALKHRQNKKQQQRIIVFAGSPVKHEKKMLEMIGRKLKKNSVALDIVNFGEEDEGKTEKLEALLAAVNNNDTSHIVHVPSGPNALSDVLISTPIFTGDGEGGSGFAAAAATAAAGGVSGFEFGVDPNLDPELALALRVSMEEERARQEAAAKKAAEDAANLEKGDEQQASSQHATMTERAGAATSEAENKTSDLMDDENALLQQALAMSMDDSAISHDVKDTDMSEASASDPDLALALQLSITDSAKDQSSQSDMSKLLADQSFVSSILASLPGVDPNDPSVKDLLASMQNQSEPQQKNDDKPSNEEEKK

SEQ ID NO: 4849 - protein, 166 aa, Brassica napus
  misc_feature (163)..(163): Xaa can be any naturally occurring amino acid
KKILRSSLLCCIVFLLISNFYGSVEAGKRRIEITDDLDDVEDSEEDESWKTWGNKAAAPEFDPPPDFSNMGFDQIQEEMAKRTFAPVVGFVKLRLGVQRTKDMVVDIAMKWTKVLRTGGLGVRFMAVDRSTVMFNMQNGKEVTELREFVLRQEEAYEVKIGKXEFD

SEQ ID NO: 4850 - protein, 487 aa, Vigna radiata
MRRGLDNQAYYVLGHKTPNIRDLYTLGRKLGQGQFGTTYLCTENSTSNEYACKSISKRKLISKEDVEDVRREIQIMHHLAGHKNIVTIKGAYEDPLYVHIVMELCSGGELFDRIIQRGHYTERKAAELTKIIVGVVEACHSLGVMHRDLKPENFLLVNKDDDFSLKAIDFGLSVFFKPGQIFTDVVGSPYYVAPEVLLKHYGPEADVWTAGVILYILLSGVPPFWAETQQGIFDAVLKGHIDFDSDPWPLISDSGKDLIRKMLCSQPSERLTAHQVLCHPWICENGVAPDRAIDPAVLSRLKQFSAMNKLKKMALRVIAESLSEEEIAGLREMFQAMDTDNSGAITFDELKAGLRRYGSTLKDVEIRDLMEAADVDKSGTIDYGEFIAATVHLNKLEREEHLIAAFQYFDKDGSGYITVDELQQACAEHNMTDAFLEDIIREVDQDNDGRIDYGEFAAMMQKGNAGIGRRTMRNSLNLSMRDASSAQ

SEQ ID NO: 4851 - protein, 184 aa, Amaranthus hypochondriacus
MASSMMSNAATAVAVAATSGGAQANMVAPFNGLKSIASFPVTRKSNDITSIASNGGRVQCMQVWPPVGKKKFETLSYLPPLSDAQLLAQVQYLLNKGWIPCIEFELEHPFVYRENHRSPGYQDGRYWTMWKLPMYGCTDPAQVLNEVEEAKKAYPTAFIRIIGFDNKRQVQCVSFIAYKPADSY

SEQ ID NO: 4852 - protein, 344 aa, Candida albicans SC5314
MSPSTQQQVHESNQSQSNDSSSIGLRLNDNNIQPIEIELSSFKHDSITFHKQDSSYWFYEKSKQSFPGQSFGLQVEKILYHTKSSFQDILIFKSTNFGNVLVLNGIIQCTEKDEFAYQELITHLPIMSHPSPKKVLVIGGGDCGVIRELIKHVNDQTIQEITMVEIDDMVIKLSTKFLPEMAKYHNHPKVNLIIGDGFEFLKNSSKEKKYDVIITDSSDPDDGPAEEFFQINYFKLLLNALNEKGIVIMQSSENIWLNLPYLKELKSKAATVFSNVKYCQCYMPSYTSGQLGLIIATMDTGKDLVNPLRKFDHDKELKLFKYYNQHIHTNSFVLPTWADDYLNN

SEQ ID NO: 4853 - protein, 180 aa, Amaranthus hypochondriacus
MASSLMSNAITAVVGASGAQANMVAPFNGLKSIASFPVTRKSNDITSIASNGGRVQCMQVWPPVGKKKFETLSYLPPLSDAQLLAQVQYLLNNGWIPCIEFELEHPFVYRENHRSPGYQDGRYWTMWKLPMYGCTDPAQVLNEVEEAKKAYPSAFIRIIGFDNKRQVQCVSFIAFKPPGY

SEQ ID NO: 4854 - protein, 160 aa, Manihot esculenta
MSDEEHHFESKADAGASKTFPQQAGTIRKNGYIVIKNRPCKVMEVSTSKTGKHGHAKCHFVGIDIFNGKKLEDIVPSSHNCDVPHVNRTDYQLIDISEDGFVSLLTETGNTKDDLRLPTDENLLSQIKDGFAEGKDLVVSVMSAMGEERICSLKDIGPKN

SEQ ID NO: 4855 - protein, 210 aa, Photorhabdus luminescens subsp. laumondii TTO1
MADIENLPLENVVWHPHQLTRAQREVENGHPALVIWFTGLSGSGKSTVAGALEQALFQRGIKTYLLDGDNLRHGLCRDLGFSEQDRQENIRRVGEVASLMVDAGLVVLTAFISPYKAERKKVRELLEPGQFIEVFVDTPLEICESRDPKGLYKKARAGEIRHFTGIDSVYEVPDSPEIYLPGQQSVETSVTQLLVELKKSGIIRSRIHHG

SEQ ID NO: 4856 - protein, 1062 aa, Gibberella zeae PH-1
MSVDSLLSSLASSYNRVQLHLSYFARVYRASCASATVMSSNWHSLIARAIDIPLEGDDSRVGSTRDGSSGGTLSTNNASKSSSLQSLGGTFIPVVIYCVVCIIFFSIFRVKCSRVYAPRAIPSLRSPHKHIPPLPTGWFDWVKPFFKTPDTFVLNHGSLDGFFFLRYLKVLRNTFLVGMLIAWPILFPIHITGGNKLSQLDILTIGKISDRKRFVLFTITRECFYYIGIRQAYLSSPHYSKRLSSRTVLITSIPDRYLDEARLRKLYGDSVKRVWIPRTAKALIKLVEEREETAMRLEKAEIALIKKAHLARKKHFNKSPSSASSSVDPYPTESSSSYRSDPSSEQTRSDSPRVGVSQNETAQDETQEAGFKAQYPQVTQTVTQDTHDLLERSAEDPEYVHPYGLNPNLPDVRGSVAAQWIPAKARPHHRPLQNFFRRVDTIRWCRMRLKDLNLEIYKLRRQVRRGDGDTLPAAFIEFDTQEAAQAAHQIVAHHRPLQLAPRLLGVRPDEVVWKALRMCWWERIIRRFLIMGLVAVAIIFWSIPSAMIGIISNIDFLSGIVFLRWIKLLPKPILGFLQGFIPAIALSFWMSLVPAMLRFCGVQAGIPSLVLVELFTQNIYFAFQVVQVFLITTLTSAASAAVLDIIKQPMSAPDLLARNLPKASNFYLSYILVQCLAIGATGLLHLFELFRQHILGRGLQNPRTRFNIWYNLRPPRWGGIFPIYTNMACIAFCYTCIAPLILLFACAGMAFTRLIYRYNILYVFDSEMDSMGLFYPNALLQLIVGLYLAEICMIGLFALKLAFPPMVLMLIFLIFTGIVHMSLRDSISPLLQNLPQTLTLEEELQQQEKAEAEQKLQEAAESGEVNGGTAASYFDADLNFGEEEVEEPPSDDEDGQHDGPQGSRGVDGGGGVKLMVREWMKTTAKAQVKKEIQQSGIKRFLDRWILAGDPSNPDQQPTFLQRFLHPEVYEDFIALRKLIPFEEPPDVDYAGDEKMSNYWPPELWMPKPVLWIPRDEARVSRQEVAHTRKITPITDVGVTLNEKGLIIVDVEAAPFPRMRLVH

SEQ ID NO: 4857 - protein, 509 aa, Streptomyces coelicolor A3(2)
MANSTHTPAERAHRTIHAGGEWLAASSGATREILDPADAVAFAVVAEGDEKDTDLAVAAARRAFDAGDWPHTPVAERAALLRRVAGLLVRDREKLGLLESRDAGKTVEEGRVDIDCVADAFRYFADLVAGEAPGRVVDAGSPEVHSVVVHEPVGVCAMITPWNYPLLQASWKIAPALAAGNTFVIKPSEITPMTTIALIDLLVEAGLPTGVANIVTGPGHTVGARLAEHPDVDLVSFTGGLTSGVKVAQAAAVTVKKVALELGGKNPNVVFADACATEEGFDTAVDQALNAAFMHSGQVCSAGGRLIVEESVRERFVAELARRAERIRLGRGTEEGVECGPLVSAQQRAKTEDYVASALAEGAELRCGGKRPEPSPQRPESGYFYEPTVLDHCHREMRVVREEVFGPVLTVETFRTEDEAVALANDTEYGLAGAVWTADAGRARRVAGRLRHGTVWINDFHPYLPQAEWGGFGKSGVGRELGPAGLAEYRESKHVYQNLAPKPVRWFSG

SEQ ID NO: 4858 - protein, 494 aa, Geobacillus stearothermophilus
SSIAAPKLKEKVEKFLSGKKKMYINGSFVESASGKTFDTPNPATGERLATVYEGDAEDIDRAVKAAREAFDRGPWSRMSAAERSRLMYKLADLMEENKEELAQLETLDNGKPIRETINADVPLAIEHMRYYAGWSTKIVGQTIPVNGPYFNYTRHEPVGVVGQIIPWNFPLLMAMWKLGAALATGCTVVLKPAEQTPLSALYLAELIEEAGFPAGVVNIVPGFGETAGDALVKHPQVDKIAFTGSTEVGKLIMANASKSLKRVTLELGGKSPNIILPDADFSKAIPGALNGVMFNQGQVCCAGSRVFIQKKQYDNVVADMVSHAKSIKQGFGLKADTEMGPLVSSEQQNRVLGYIEKGLEEGAELLTGGQKPSEQGYFVEPTIFANVEDSMTISKEEIFGPVIAALPYEDIDELIERANDTNYGLAAGVWTRDVTKAHYIANKLRAGTVWVNCYNVFDAASPFGGYKESGIGREMGSYALDNYTEVKSVWIAQN

SEQ ID NO: 4859 - protein, 405 aa, Thermoplasma volcanium GSS1
MAYIQVREDGTLLVPDKVTIGYIEGDGIGPDITKTTINVINAALEVAYGGKRSIEWHKVLAGDEAYDKTGNRLPDSSLEELKKCVVSIKGPLTTPIGEGFRSLNVTLRQYLDLYANIRPVRYFPGVPSPVLHPEYMNMVVFRENTEDLYAGIEWRYDSEDAEKVRAFLSSTFNINLTPDTGIGIKPISKFKSTRLVRKAIQYAIANGRKSVTLVHKGNIMKYTEGAFRDWGYEVARTEFGDYTVTEAEYLKDPEKYANKIVIKDRITDNMFQQVLTRTQEYDVIATPNLNGDYLSDALAAQVGGIGLAPGANIGDHYAVFEAVHGTAPKYAGLDVANPTSLILSAEMMLDHIGWKEASKILDDAIMQTYRDQKLTQDIARLLNLKALKCSEFGEEIINRMKPIKS

SEQ ID NO: 4860 - protein, 54 aa, Zea mays
MASATFLEVLLAIFLPPVGVFLRYGCGVEFWIDLLLTVLGYIPGIIYAVYVLVA

SEQ ID NO: 4861 - protein, 120 aa, Glycine max
MAGMVFGLDAPMMAALQHLLDIPDGEAGAAAGEKQGPTRAYVRDARAMAATPADVKELPGAYAFVVDMPGLGSGDIKVQVEDERVLVISGERRREEKEDAKYLRMERRMGKLMRKFVLPE

SEQ ID NO: 4862 - protein, 122 aa, Oryza sativa (japonica cultivar-group)
MAPRCATLAVVVVLVAAVVAPPTAVRAAISCSAVYNTLMPCLPYVQAGGTVPRACCGGIQSLLAAANNTPDRRTICGCLKNVANGASGGPYITRAAALPSKCNVSLPYKISTSVNCNAYVHA

SEQ ID NO: 4863 - protein, 266 aa, Zea mays
PARREPALLHLRRSCEFNPRVSMSSYSPPPPLPPRDQSMDTEAPNAPITRERRLNPDLQEQLPKPYLARALEAVDPSHPQGTKGRDPRGMSVLQQHAAFFDRNGDGVIYPWETFQGLRAIGCGLTVSFAFSILINLFLSYPTQPGWLPSPLLSIRIDNIHKGKHGSDSETYDTEGRFDPSKFDAIFSKYGRTHPNALTKDELSSMLQGNRNTYDFLGWLAAAGEWLLLYSLAKDKDGLLQRETVRGLFDGSLFERLEDDNNKKKSS

SEQ ID NO: 4864 - protein, 427 aa, Photorhabdus luminescens subsp. laumondii TTO1
MADNKATLAPDGSVAIELDVLTPTLGSKVIDVRTLGSQGFYTYDPGFTSTASCESKITYIDGNEGVLLHRGFPIDQLATKSTYLEVCYILLYGETPTQEQFDKFKKTITRHTMIHEQIHRLFNGFRRDSHPMAVLCGVTGALAAFYHDALDVNNPRHRDITAYRLLSKMPTVAAMCYKYSIGQPFVYPRNDLSYAGNFLNMMFATPCEEYKVNPVLERAMDRIFILHADHEQNASTSTVRTAGSSGANPFACIAAGIASLWGPAHGGANEACLRMLEEIQSVEHIPEFIKRAKDKNDAFRLMGFGHRVYKNYDPRATVMRETCHEVLDELGLNDSLLEVAMELERIALHDPYFIEKKLYPNVDFYSGIILKAMGIPSTMFTVIFAIARTIGWIAHWNEMHDGGVKIARPRQLYTGYTKRDFDSQLEK

SEQ ID NO: 4865 - protein, 286 aa, Hordeum vulgare
  misc_feature (4)..(6): Xaa can be any naturally occurring amino acid
TTMXXXPSGLELERPQQLFPQWQPLPQQPPFLQQEPEQPYPQQQPLPQQQPFPQQPQLPHQHQFPQQLPQQQFPQQMPLQPQQQFPQQMPLQPQQQPQFPQQKPFGQYQQPLTQQPYPQQQPLAQQQPSIEEQHQLNLCKEFLLQQCTLDEKVPLLQSVISFLRPHISQQNSCQLKRQQCCQQLANINEQSRCPAIQTIVHAIVMQQQVQQQVGHGFVQSQLQQLGQGMPIQLQQQPGQAFVLPQQQAQFKVVGSLVIQTLPMLCNVHVPPYCSPFGSMATGSGGQ

SEQ ID NO: 4866 - protein, 470 aa, Dechloromonas aromatica RCB
MKKEKALVWFRRDLRDHDHAALSAALAEAQQVYCAFVFDSEILDPLPTRHDRRVHFIRESLVELDAALRARGGGLIIRHGQAVDEIPALARRLGVSAVFTNRDYEPSAKRRDAQVARQLRNDDIAFHGVKDQAIFDGDEVLTQAGKAFSVFTPYKNAWLKRLTTADYAAWPCDGRLAGQELAGIPTLEEIGFTPTDLAELGIQPGMSGAKGLWDDFSRDRIERYGSLRDFPAVKGVSYLSVHLRFGTISIRQLVRQALAHQADTWLSELIWRDFYFMILDHFPHVAGHAFKPEYDAIQWASRPEAFAAWCEGCTGYPLVDAAMRQLNFSGWMHNRLRMVVASFLTKDLGIDWRLGEKYFAEQLNDFDLSANNGGWQWASSSGCDAQPYFRIFNPVTQSEKFDAEGKFIRRYVPELAKVHDKYIHAPWKMGRIEQEALGVVIGRDYPSPIVDHATARDETLARYAVVKKQA

SEQ ID NO: 4867 - protein, 73 aa, Triticum aestivum
MEHGSLTDSTSSTFSIMDEDHTLANSARFVLNQDPRVAFCGYTIPHPSEKKVNIRLQTTGDAAKDVLKDALQI

SEQ ID NO: 4868 - protein, 216 aa, Escherichia coli
DLYICLRPVRYYQGTPSPVKHPELTDMVIFRENSEDIYAGIEWKADSADAEKVIKFLREEMGVKKIRFPEHCGIGIKPCSEEGTKRLVRAAIEYAIANDRDSVTLVHKGNIMKFTEGAFKDWGYQLAREEFGGELIDGGPWLKVKNPNTGKEIVIKDVIADAFLQQILLRPAEYDVIACMNLNGDYISDALAAQVGGIGIAPGANIGDECALFEAT

SEQ ID NO: 4869 - protein, 360 aa, Triticum aestivum
MGSTATDMAASADEEACMYALQLVSSSILPMTLKNAIELGLLETLVAAGGKLLTPAEVAAKLPSTANPAAADMVDRMLRLLASYNVVSCTMEEGKDGRLSRRYGAAPVCKFLTPNEDGVSMAALALMNQDKVLMESWYYLKDAVLDGGIPFNKAYGMSAFEYHGTDPRFNRVFNEGMKNHSIIITKKLLEVYKGFEGLGTIVDVGGGVGATVGAIVAAYPAIKGINFDLPHVISEAPPFPGVTHVGGDMFQKVPSGDAILMKWILHDWSDEHCATLLKNCYDALPAHGKVVLVECILPVNPEATPKAQGVFHVDMIMLAHNPGGRERYEREFEGLAKGAGFAAIKTTYIYANAFAIEFTK

SEQ ID NO: 4870 - protein, 88 aa, Zea mays
  misc_feature (65)..(65): Xaa can be any naturally occurring amino acid
MAPTVMASAGTSVAPFQGLKSTAGLPVSRRSNGASLCSVSNGGRIRCMQGWPFEGIKKCETLSYXPPVNTEALLEQEDYLVRCQGAPG

SEQ ID NO: 4871 - protein, 323 aa, Aspergillus nidulans FGSC A4
MSLPSHFSLNTGAKIPAVGFGTWQAKPLEVENSVEVALKQGYRHIDCAAIYRNETEVGNGIRKSGVPREEIFLTGKLWNTKHAPEDVEPALDKTLKDLGVEYLDLYLMHWPCAFKASDKWFPLDDNGVFQLADIDYVTTYRAMEKLLNTGKVRAIGVSNFNVRRLEDLLSKVSVVPAANQIEAHPYLQQPDLLRYCQSKGIIIEAYSPLGNNQTGEPRTVDDPVVHTVAGQLSMDPGPLLASWAVQRGTVVLSKSVTPSRIAANLQVKRLPDDAFATLAALERHKRFNFPAFWGYDIFDEAGEEAVKKAAMDAAPINKTKFTV

SEQ ID NO: 4872 - protein, 334 aa, Arabidopsis thaliana
MDAKETSATDLKRPREEDDNGGAATMETENGDQKKEPACFSTVIPGWFSEMSPMWPGEAHSLKVEKVLFQGKSDYQDVIVFQSATYGKVLVLDGVIQLTERDECAYQEMITHLPLCSIPNPKKVLVIGGGDGGVLREVARHASIEQIDMCEIDKMVVDVSKQFFPDVAIGYEDPRVNLVIGDGVAFLKNAAEGSYDAVIVDSSDPIGPAKELFEKPFFQSVARALRPGGVVCTQAESLWLHMDIIEDIVSNCREIFKGSVNYAWTSVPTYPSGVIGFMLCSTEGPDVDFKHPLNPIDESSSKSNGPLKFYNAEIHSAAFCLPSFAKKVIESKAN

SEQ ID NO: 4873 - protein, 319 aa, Escherichia coli CFT073
MKPENKLPVLDLISAEMKTVVNTLQPDLPPWPATGTIAEQRQYYTLERRFWNVGAPEMATRAYRVPTKYGQVKTRIFYPQPDRPATLFYLHGGGFILGNLDTHDRIMRLLASYSQCTVIGIDYTLSPEARFPQAIEEIVAACCYFHQQAEDYQINMSRIGFAGDSAGAMLALASALWLRDKQIDCGKVAGVLLWYGLYGLRDSVTRRLLGGVWDGLTQQDLQMYEEAYLSNDADRESPYYCLFNNDLTREVPPCFIAGAEFDPLLDDSRLLYQTLAAHQQPCEFKLYPGTLHAFLHYSRMMKTADEALRDGAQFFTAQL

(The sequence listing continues in the following parts.)
